United States Patent Application Publication US 2012/0005773 A1 - sequence listing, part 7

SEQ ID NO: 26620 - protein, 297 aa, Rhizobium sp. USDA 1955
  misc_feature (131)..(131): Xaa can be any naturally occurring amino acid
  unsure (1)..(297): unsure at all Xaa locations
RGKTQIKEFDAFPTLEQLPLWGFDGSSTLQAEGRSSDCVLKPVAVYPDPVRTNGALVMCEVMMPDGKTPHASNTRATVLDDESAWFGFEQEYFFYKNGRPLGFPEQGYPAPQGPYYTGVGYKNVGDFARQXVEEHLDICLAAGINHEGINAEVAKGQWEFQIFGKGSKKAADEVWLARYLLLRLTEKYGIDVEFHCKPLGDTDWNGSGMHANFSTAYLREVGGQDYFEALMAAFEKNLHDHINVYGPDNHLRLTGKHETAPWDKFSYGVADRGASIRVPHSFVNNGYRGYLEDRRPN

SEQ ID NO: 26621 - protein, 297 aa, Rhizobium sp. USDA 1970
RGKTQIKEFDAFPTLEQLPLWGFDGSSTQQAEGRSSDCVLKPVAVYPDPVRTNGALVMCEVMMPDGKTPHPSNTRATVLDDESAWFGFEQEYFFYKNGRPLGFPEQGYPAPQGPYYTGVGYKNVGDIARQIVEEHLDICLAAGINHEGINAEVAKGQWEFQVFGKGSKNAADEVWLARYLLLRLTEKYGIDVEFHCKPLGDTDWNGSGMHANFSTAYLREVGGKDYFEALMAAFEKNLHDHINVYGPDNHLRLTGKHETAPWDKFSYGVADRGASIRVPHSFVNNGYRGYLEDRRPN

SEQ ID NO: 26622 - protein, 295 aa, Rhizobium sp. CC2129
RGKTQIKEFDAFPTLEQLPLWGFDGSSTQQAEGRSSDCVLKPVAVYPDPVRTNGALVMCEVMMPDGKTPHPSNTRATVLDDEGAWFGFEQEYFFYKNGRPLGFPEQGYPAPQGPYYTGVGYKNVGDIARRIVEEHLDICLAAGINHEGINAEVAKGQWEFQVFGKGSKKAADEVWLARYLLLRLTEKYGIDVEFHCKPLGDTDWNGSGMHANFSTAYMREVGGKDYFEALMAAFEKNLHDHINVYGPDNHLRLTGKHETAPWDKFSYGVADRGASIRVPHSFVNNGYRGYLEDRR

SEQ ID NO: 26623 - protein, 292 aa, Rhizobium sp. CC2155
RGKTQIKEFDAFPTLEQLPLWGFDGSSTQQAEGRSSDCVLKPVAVYPDPVRTNGALVMCEVMMPDGKTPHPSNTRATVLDDEGAWFGFEQEYFFYKNGRPLGFPEQGYPAPQGPYYTGVGYKNVGDIARRIVEEHLDICLAAGINHEGINAEVAKGQWEFQVFGKGSKKAADEVWLARYLLLRLTEKYGIDVEFHCKPLGDTDWNGSGMHANFSTAYMREVGGKDYFEALMAAFEKNLHDHINVYGPDNHLRLTGKHETAPWDKFSYGVADRGASIRVPHSFVNNGYRRYVE

SEQ ID NO: 26624 - protein, 296 aa, Rhizobium sp. CC2160
RGKTQIKEFDAFPTLEQLPLWGFDGSSTQQAEGRSSDCVLKPVAVYPDPVRTNGALVMCEVMMPDGKTPHPSNTRATVLDDESAWFGFEQEYFFYKNGRPLGFPEQGYPAPQGPYYTGVGYKNVGDIARRIVEEHLDICLAAGINHEGINAEVAKGQWEFQVFGKGSKKAADEVWLARYLLLRLTEKYGIDVEFHCKPLGDTDWNGSGMHANFSTAYMREVGGKDYFEALMAAFEKNLHDHINVYGPDNHLRLTGKHETAPWDKFSYGVADRGASIRVPHSFVNNGYRGYLEDRRP

SEQ ID NO: 26625 - protein, 291 aa, Rhizobium sp. USDA 1079
  misc_feature (266)..(266): Xaa can be any naturally occurring amino acid
  unsure (1)..(291): unsure at all Xaa locations
RGKTQIKEFDAFPTLEQLPLWGFDGSSTQQAEGRSSDCVLKPVAVYPDPVRTNGALVMCEVMMPDGKTPHPSNTRATVLDDESAWFGFEQEYFFYKNGRPLGFPEQGYPAPQGPYYTGVGYKNVGDIARQIVEEHLDICLAAGINHEGINAEVAKGQWEFQVFGKGSKKAADEVWLARYLLLRLTEKYGIDVEFHCKPLGDTDWNGSGMHANFSTAYLREVGGKDYFEALMAAFEKNLHDHINVYGPDNHLRLTGKHETAPWDKFXYGVADRGASIRVPHSFVNNGYRGYL

SEQ ID NO: 26626 - protein, 287 aa, Rhizobium sp. USDA 1083
  misc_feature (5)..(5): Xaa can be any naturally occurring amino acid
  misc_feature (24)..(24): Xaa can be any naturally occurring amino acid
  misc_feature (180)..(180): Xaa can be any naturally occurring amino acid
  misc_feature (194)..(194): Xaa can be any naturally occurring amino acid
  misc_feature (282)..(282): Xaa can be any naturally occurring amino acid
  misc_feature (285)..(285): Xaa can be any naturally occurring amino acid
  unsure (1)..(287): unsure at all Xaa locations
RGKTXIKEFDSFPTLEQLPLWGFXGSSTHQAEGRSSDCVLKPVAVYPDPVRTNGALVMCEVMMPDGKTPHPSNTRATVLDDESTWFGFEHEYFFYKNGRPLGFPEQGYPAPQGPYYTGVGYKNVGDIARQIVEEHLDICLAAGINHEGINAEVAKGQWEFQVFGKGSKKAADEVWLARYXLLRLTEKYGIDVEXHCKPLGDTDWNGSGMHANFSTAYLREVGGKDYFEALMAAFEKNLHDHINVYGPDNHLRLTGKHETAPWDKFSYGVADRGASIRVPHSXVNXRY

SEQ ID NO: 26627 - protein, 296 aa, Rhizobium sp. USDA 1088
  misc_feature (266)..(266): Xaa can be any naturally occurring amino acid
  unsure (1)..(296): unsure at all Xaa locations
RGKTQIKEFDAFPTLEQLPLWGFDGSSTQQAEGRSSDCVLKPVAVYPDPVRTNGALVMCEVMMPDGKTPHPSNTRATVLDDESAWFGFEQEYFFYKNGRPLGFPEQGYPAPQGPYYTGVGYKNVGDIARQIVEEHLDICLAAGINHEGINAEVAKGQWEFQVFGKGSKKAADEVWLARYLLLRLTEKYGIDVEFHCKPFGDTDWNGSGMHANFSTAYLREVGGKDYFEALMAAFEKNLHDHINVYGPDNHLRLTGKHETAPWDKFXYGVADRGASIRVPHSFVNNGYRGYLEDRRP

SEQ ID NO: 26628 - protein, 296 aa, Rhizobium sp. USDA 1114
RGKTQIKEFDAFPTLEQLPLWGFDGSSTQQAEGRSSDCVLKPVAVYPDPVRTNGALVMCEVMMPDGKTPHPSNTRATVLDDESAWFGFEQEYFFYKNGRPLGFPEQGYPAPQGPYYTGVGYKNVGDIARQIVEEHLDICLAAGINHEGINAEVAKGQWEFQVFGKGSKKAADEVWLARYLLLRLTEKYGIDVEFHCKPLGDTDWNGSGMHANFSTAYLREVGGKDYFEALMAAFEKNLHDHINVYGPDNHLRLTGKHETAPWDKFSYGVADRGASIRVPHSFVNNGYRGYLEDRRP

SEQ ID NO: 26629 - protein, 296 aa, Rhizobium sp. USDA 1115
  misc_feature (162)..(162): Xaa can be any naturally occurring amino acid
  unsure (1)..(296): unsure at all Xaa locations
RGKTQIKEFDAFPTLEQLPLWGFDGSSTQQAEGRSSDCVLKPVAVYPDPVRTNGALVMCEVMMPDGKTPHPSNTRATVLDDESAWFGFEQEYFFYKNGRPLGFPEQGYPAPQGPYYTGVGYKNVGDIARQIVEEHLDICLAAGINHEGINAEVAKGQWEFQXFGKGSKKAADEVWLARYLLLRLTEKIRIDVEFHCKPLGDTDWNGSGMHANFSTAYLREVGGKDYFEALMAAFEKNLHDHINVYGPDNHLRLTGKHETAPWDKFSYGVADRGASIRVPHSFVNNGYRGYLEDRRP

SEQ ID NO: 26630 - protein, 293 aa, Rhizobium sp. USDA 1177
RGKTQIKEFDAFPTLEQLPLWGFDGSSTQQAEGRSSDCVLKPVAVYPDPVRTNGALVMCEVMMPDGKTPHPSNTRATVLDDESAWFGFEQEYFFYKNGRPLGFPEQGYPAPQGPYYTGVGYKNVGDIARQIVEEHLDICLAAGINHEGINAEVAKGQWEFQVFGKGSKKAADEVWLARYLLLRLTEKYGIDVEFHCKPLGDTDWNGSGMHANFSTAYLREVGGKDYFEALMAAFEKNLHDHINVYGPDNHLRLTGKHETAPWDKFSYGVADRGASIRVPHSFVTRCSASTSST

SEQ ID NO: 26631 - protein, 297 aa, Rhizobium sp. USDA 1944
  misc_feature (282)..(282): Xaa can be any naturally occurring amino acid
  unsure (1)..(297): unsure at all Xaa locations
RGKTQIKEFDAFPTLEQLPLWGFDGSSTQQAEGRSSDCVLKPVAVYPDPVRTNGALVMCEVMMPDGKTPHPSNTRATVLDDESAWFGFEQEYFFYKNGRPLGFPEQGYPAPQGPYYTGVGYKNVGDIARQIVEEHLDICLAAGINHEGINAEVAKGQWEFQVFGKGSKKAADEVWLARYLLLRLTEKYGIDVEFHCKPLGDTDWNGSGMHANFSTAYLREVGGKDYFEALMAAFEKNLHDHINVYGPDNHLRLTGKHETAPWDKFSYGVADRGASIRVPHSXVNNGYRGYLEDRRPN

SEQ ID NO: 26632 - protein, 294 aa, Rhizobium sp. USDA 3394
RGKTQIKEFDTFPTLEQLPLWGFDGSSTMQAEGRSSDCVLKPVALYPDPARTNGALVMCEVMMPDGVTPHASNARATILDDEDAWFGFEQEYFFYQNGRPLGFPEQGYPAPQGPYYTGVGYSNVGDVAREIVEEHLDLCLAAGINHEGINAEVAKGQWEFQIFGKGSKKAADQIWMARYLLQRLTEKYGIDIEYHCKPLGDTDWNGSGMHCNFSTKYMREVGGKDYFEALMAAFDKNMMDHIAVYGPDNDKRLTGKHETAPWNKFSYGVADRGASIRVPHSFIKNDYKGYVEDR

SEQ ID NO: 26633 - protein, 291 aa, Rhizobium sp. CIAM1141
GKTQIKEFDTFPTLEQLPLWGFDGSSTMQAEGRSSDCVLKPVALYPDPARTNGALVMCEVMMPDGVTPHATNARATILDDEDAWFGFEQEYFFYQNGRPLGFPEQGYPAPQGPYYTGVGYSNVGDVAREIVEEHLDLCLEAGINHEGINAEVAKGQWEFQVFGKGSKKAADQIWMARYLLQRLTEKYGIDIEYHCKPLGDTDWNGSGMHCNFSTKYMREVGGKDYFEALMAAFDKNLMDHIAVYGPDNDKRLTGKHETAPWNKFSYGVADRGASIRVPHSFVKNDYKGYVE

SEQ ID NO: 26634 - protein, 296 aa, Rhizobium sp. CIAM1143
  misc_feature (216)..(216): Xaa can be any naturally occurring amino acid
  unsure (1)..(296): unsure at all Xaa locations
RGKTQIKEFDTFPTLEQLPLWGFDGSSTMQAEGRSSDCVLKPVALYPDPARTNGALVMCEVMMPDGVTPHPTNARATILDDEDAWFGFEQEYFFYQNGRPLGFPEQGYPAPQGPYYTGVGYSNVGDVAREIVEEHLDLCLAAGINHEGINAEVAKGQWEFQVFGKGSKKAADQIWMARYLLQRLTEKYGIDIEYHCKPLGDTDWNGSGMHCNFSTXYMREVGGKDYFEALMAAFDKNLMDHIAVYGPDNDKRLTGKHETAPWNKFSYGVADRGASIRVPHSFVKNDYKGYLEDRRP

SEQ ID NO: 26635 - protein, 295 aa, Rhizobium sp. CIAM1146
RGKTQIKEFDTFPTLEQLPLWGFDGSSTMQAEGRSSDCVLKPVALYPDPARTNGALVMCEVMMPDGVTPHASNARATILDDEDAWFGFEQEYFFYQNGRPLGFPEQGYPAPQGPYYTGVGYSNVGDVAREIVEEHLDLCLAAGINHEGINAEVAKGQWEFQIFGKGSKKAADQIWMARYLLQRLTEKYGIDIEYHCKPLGDTDWNGSGMHCNFSTKYMREVGGKDYFEALMAAFDKNMMDHIAVYGPDNDKRLTGKHETAPWNKFSYGVADRGASIRVPHSFIKNDYKGYLEDRR

SEQ ID NO: 26636 - protein, 293 aa, Rhizobium sp. CIAM490
GKTQIKEFDTFPTLEQLPLWGFDGSSTMQAEGRSSDCVLKPVALYPDPARTNGALVMCEVMMPDGVTPHASNARATILDDEDAWFGFEQEYFFYQNGRPLGFPEQGYPAPQGPYYTGVGYSNVGDVAREIVEEHLDLCLAAGINHEGINAEVAKGQWEFQIFGKGSKKAADQIWMARYLLQRLTEKYGIDIEYHCKPLGDTDWNGWGMHCNFSTKYMREVGGKDYFEALMAAFDKNMMDHIAVYGPDNDKRLTGKHETAPWNKFSYGVADRGASIRVPHSFIQNDYKGYVEDR

SEQ ID NO: 26637 - protein, 295 aa, Rhizobium sp. CIAM540
RGKTQIKEFDTFPTLEQLPLWGFDGSSTMQAEGRSSDCVLKPVALYPDPARTNGALVMCEVMMPDGVTPHATNARATILDDEDAWFGFEQEYFFYQNGRPLGFPEQGYPAPQGPYYTGVGYSNVGDVAREIVEEHLDLCLEAGINHEGINAEVAKGQWEFQVFGKGSKKAADQIWMARYLLQRLTEKYGIDIEYHCKPLGDTDWNGSGMHCNFSTKYMREVGGKDYFEALMAAFDKNLMDHIAVYGPDNDKRLTGKHETAPWNKFSYGVADRGASIRVPHSFVKNDYKGYLEDRR

SEQ ID NO: 26638 - protein, 293 aa, Rhizobium sp. USDA 3353
  misc_feature (291)..(291): Xaa can be any naturally occurring amino acid
  unsure (1)..(293): unsure at all Xaa locations
RGKSQIKDYAEFPTLEQLPLWGFDGSSTQQAEGHSSDCVLKPVAVFPDPARTNGVLVMCEVMMPDGVTPHSSNKRATILDDEGAWFGFEQEYFFYKDGRPLGFPESGYPAPQGPYYTGVGYSNVGSVARQIVEEHLDQCLAAGINHEGINAEVAKGQWEFQIFGKGSKKAADQMWMARYLMQRLTEKYGIDIEYHCKPLGDTDWNGSGMHANFSTAYMREVGGKAYFEALMAAFDKNLMDHIAVYGPDNDKRLTGKHETAPWNKFSYGIADRGASIRVPHSFINNGYKGYXED

SEQ ID NO: 26639 - protein, 294 aa, Rhizobium sp. USDA 3357
  misc_feature (82)..(82): Xaa can be any naturally occurring amino acid
  unsure (1)..(294): unsure at all Xaa locations
RGKTQIKDYAEFPTLEQLPLWGFDGSSTQQAEGHSSDCVLKPVAVFPDPARTNGVLVMCEVMMPDGVTPHSSNKRATILDDXGAWFGFEHEYFFYKDGRPLGFPESGYPAPQGPYYTGVGYSNVGSVARQIVEEHLDQCLAAGINHEGINAEVAKGQWEFQIFGKGSKKAADQMWMARYLMQRLTEKYGIDIEYHCKPLGDTDWNGSGMHANFSTAYMREVGGKAYFEALMAAFDKNLMDHIAVYGPDNDKRLTGKHETAPWNKFSYGIADRGASIRVPHSFINNGYKGYMEDR

SEQ ID NO: 26640 - protein, 296 aa, Rhizobium sp. USDA 3584
RGKTQIKEFAEFPTLEQLPLWGFDGSSTQQAEGHSSDCVLKPVAVFPDPARTNGVLVMCEVMMPDGVTPHASNKRATILDDEGAWFGFEQEYFFYKDGRPLGFPESGYPAPQGPYYTGVGYSNVGSVARQIVEEHLDLCLAAGINHEGINAEVAKGQWEFQIFGKGSKKAADQMWMARYLLQRLTEKYGIDIEYHCKPLGDTDWNGSGMHANFSTAYMREVGGKAYFEALMAAFDKNLMDHIAVYGPDNDKRLTGKHETAPWNRFSYGIADRGASIRVPHSFIKSDYKGYLEDRRP

SEQ ID NO: 26641 - protein, 295 aa, Rhizobium sp. USDA 3876
RGKTQIKEFAEFPDLEQLPLWGFDGSSTQQAEGHSSDCVLKPVAVYPDPARTNGVLVMCEVMMPDGVTPHASNKRATILDDEGAWFGFEQEYFFYKDGRPLGFPESGYPAPQGPYYTGVGYSNVGSVARQIVEEHLDLCLAAGINHEGINAEVAKGQWEFQIFGKGSKKAADQMWMARYLMQRLTEKYGIDIEYHCKPLGDTDWNGSGMHANFSTAYMREVGGKAYFEALMAAFDKNLMDHIAVYGPDNDKRLTGKHETAPWNRFSYGIADRGASIRVPHSFIKSDYKGYLEDRL

SEQ ID NO: 26642 - protein, 284 aa, Rhizobium sp. USDA 3883
  misc_feature (279)..(279): Xaa can be any naturally occurring amino acid
  unsure (1)..(284): unsure at all Xaa locations
RGKTQIKEFAEFPTLEQLPLWGFDGSSTQQAEGHSSDCVLKPVAVYPDPARTNGVLVMCEVMMPDGVTQHASNKRATILDDEGAWFGFEQEYFFYKDGRPLGFPESGYPAPQGPYYTGVGYSNVGSVARQIVEEHLDQCLAAGINHEGINAEVAKGQWEFQIFGKGSKKAADQMWMARYLMQRLTEKYGIDIEYHCKPLGDTDWNGSGMHANFSTSYMREVGGKAYFEALMAAFDKNLMDHIAVYGPDNDKRMTGKHETAPWNKFSYGIADRGASIRVXHSFIK

SEQ ID NO: 26643 - protein, 296 aa, Rhizobium sp. USDA 4004
RGKTQIKEFAEFPTLEQLPLWGFDGSSTQQAEGHSSDCVLKPVAVYPDPARTNGVLVMCEVMMPDGVTPHASNKRATILDNKGAWFGFEQEYFFYKDGRPLGFPESGYPAPQGPYYTGVGYSNVGSVARQIVEEHLDQCLAAGINHEGINAEVAKGQWEFQIFGKGSKKAADQMWMARYLMQRLTEKYGIDIEYHCKPLGDTDWNGSGMHANFSTAYMREVGGKGYFEALMAAFDKNLMDHIAVYGPDNDKRLTGKHETAPWNRFSYGIADRGASIRVPHSFINNGYKGYLEDRRP

SEQ ID NO: 26644 - protein, 297 aa, Rhizobium sp. USDA 4007
RGKTQIKEFAEFPTLEQLPLWGFDGSSTQQAEGHSSDCVLKPVAVYPDPARTNGVLVMCEVMMPDGVTPHASNKRATILDDEGAWFGFEQEYFFYKDGRPLGFPESGYPAPQGPYYTGVGYSNVGSVARQIVEEHLDQCLAAGINHEGINAEVAKGQWEFQIFGKGSKKAADQMWMARYLMQRLTEKYGIDIEYHCKPLGDTDWNGSGMHANFSTAYMREVGGKAYFEALMAAFDKNLMDHIAVYGPDNDKRLTGKHETAPWNKFSYGIADRGASIRVPHSFIKNDYKGYLEDRRPN

SEQ ID NO: 26645 - protein, 297 aa, Rhizobium sp. CIAM0128
RGKTQIKEFAEFPTLEQLPLWGFDGSSTMQAEGHSSDCVLKPVAVYPDPARTNGVLVMCEVMMPDGVTPHASNKRATILDDEGAWFGFEQEYFFYKDGRPLGFPESGYPAPQGPYYTGVGYSNVGSVARQIVEEHLDLCLAAGINHEGINAEVAKGQWEFQIFGKGSKKAADQMWMARYLMQRLTEKYGIDIEYHCKPLGDTDWNGSGMHANFSTAYMREVGGKAYFEALMAAFDKNLMDHIAVYGPDNDKRLTGKHETAPWNRFSYGIADRGASIRVPHSFIKSDYKGYLEDRRPN

SEQ ID NO: 26646 - protein, 297 aa, Rhizobium sp. CIAM2026
  misc_feature (82)..(82): Xaa can be any naturally occurring amino acid
  misc_feature (91)..(91): Xaa can be any naturally occurring amino acid
  unsure (1)..(297): unsure at all Xaa locations
RGKTQVKEFAEFPTLEELPLWGFDGSSTMQAEGHSSDCVLKPVAAYPDPTRTNGVLVMCEVMMPDGVTPHASNKRATILDDXGAWFGFEQXYFFYKDGRPLGFPETGYPAPQGPYYTGVGYKNVGDVARQIVEDHLDLCLAAGINHEGINAEVAKGQWEFQIFGKGSKKAADQMWIARYLLLRLTEKYRIDIEFHCKPLGDTDWNGSGMHANFSTAYMREVGGKAYFESLMAQFDKNLMDHIAVYGPDNDKRLTGKHETAPWNKFSYGIADRGASIRVPHSFVKNDYKGYLEDRRPN

SEQ ID NO: 26647 - protein, 297 aa, Rhizobium sp. CIAM2032
RGKTQVKEFAEFPTLEELPLWGFDGSSTMQAEGHSSDCVLKPVAVYPDPTRTNGVLVMCEVMMPDGVTPHASNKRATILDDEGAWFGFEQEYFFYKDGRPLGFPETGYPAPQGPYYTGVGYKNVGDVARQIVEDHLDLCLAAGINHEGINAEVAKGQWEFQIFGKGSKKAADQMWIARYLLLRLTEKYRIDIEFHCKPLGDTDWNGSGMHANFSTAYMREVGGKAYFESLMAQFDKNLMDHIAVYGPDNDKRLTGKHETAPWNKFSYGIADRGASIRVPHSFIKNDYKGYLEDRRPN

SEQ ID NO: 26648 - protein, 296 aa, Rhizobium sp. CIAM2209
  misc_feature (236)..(236): Xaa can be any naturally occurring amino acid
  unsure (1)..(296): unsure at all Xaa locations
RGKTQIKDYAEFPTLEQLPLWGFDGSSTQQAEGHSSDCVLKPVAVFPDPARTNGVLVMCEVMMPDGVTPHSSNKRATILDDEGAWFGFEQEYFFYKDGRPLGFPESGYPAPQGPYYTGVGYSNVGSVARQIVEEHLDQCLAAGINHEGINAEVAKGQWEFQIFGKGSKKAADQMWMARYLMQRLTEKYGIDIEYHCKPLGDTDWNGSGMHANFSTAYMREVGGKAYFEALMAAFDXNLMDHIAVYGPDNDKRLTGKHETAPWNKFSYGIADRGASIRVPHSFVNNGYKGYLEDRRP

SEQ ID NO: 26649 - protein, 294 aa, Rhizobium sp. USDA 4003
RGKTQIKEFAEFPDLEQLPLWGFDGSSTQQAEGHSSDCVLKPVAVYPDPARTNGVLVMCEVMMPDGVTPHASNKRATILDDEGAWFGFEQEYFFYKDGRPLGFPESGYPAPQGPYYTGVGYSNVGSVARQIVEEHLDLCLAAGINHEGINAEVAKGQWEFQIFGKGSKKAADQMWMARYLMQRLTEKYGIDIEYHCKPLGDTDWNGSGMHANFSTAYMREVGGKAYFEALMAAFDKNLMDHIAVYGPDNDKRLTGKHETAPWNRFSYGIADRGASIRVPHSFIKSDYKGYLEDR

SEQ ID NO: 26650 - protein, 294 aa, Rhizobium sp. USDA 2061
RGKTQIKEFDAFPTLEQLPLWGFDGSSTQQAEGRSSDCVLKPVAVYPDPVRTNGALVMCEVMMPDGKTPHPSNTRATVLDDESAWFGFEQEYFFYKNGRPLGFPEQGYPAPQGPYYTGVGYKNVGDIARRIVEEHLDICLAAGINHEGINAEVAKGQWEFQVFGKGSKKAADEVWLARYLLLRLTEKYGIDVEFHCKPLGDTDWNGSGMHANFSTAYMREVGGKDYFEALMAAFEKNLHDHINVYGPDNHLRLTGKHETAPWDKFSYGVADRGASIRVPHSFVNNGYRGYVEDR

SEQ ID NO: 26651 - protein, 296 aa, Rhizobium sp. 2M164
RGKTQIKEFDEFPTLEQLPLWGFDGSSTQQAEGRSSDCVLKPVAIYPDPARTNGALVMCEVMMPDGVTPHASNARATILDDEHAWFGFEQEYFFYQNGRPLGFPEQGYPAPQGPYYTGVGYSNVGDVAREIVEEHLDLCLAAGINHEGINAEVAKGQWEFQIFGKGSKKAADQIWMARYLLQRLTEKYGIDIEYHCKPLGDTDWNGSGMHCNFSTKFLREVGGKEYFEALMAQFDKNLMDHIAVYGPDNDKRLTGKHETAPWNKFSYGVADRGASIRVPHSFIKKDYKGYLEDRRP

SEQ ID NO: 26652 - protein, 296 aa, Rhizobium sp. USDA 3620
  misc_feature (82)..(82): Xaa can be any naturally occurring amino acid
  misc_feature (291)..(291): Xaa can be any naturally occurring amino acid
  misc_feature (294)..(294): Xaa can be any naturally occurring amino acid
  unsure (1)..(296): unsure at all Xaa locations
RGKTQIKEYAEFPTLDQLPLWGFDGSSTMQAEGHSSDCVLKPVAIYPDPARTNGVLVMCEVMMPDGVTPHASNKRATILDDXGAWFGFEQEYFFYKDGRPLGFPESGYPAPQGPYYTGVGYSNVGSVARQIVEEHLDLCLAAGINHEGINAEVAKGQWEFQIFGKGSKKAADQMWMARYLLQRLTEKYGIDIEYHCKPLGDTDWNGSGMHANFSTAHMREVGGKAYFEALMAAFDKNLMDHIAVYGPDNDKRLTGKHETAPWNKFSYGIADRGASIRVPHSFIKNDYKGYXEDXRP

SEQ ID NO: 26653 - protein, 396 aa, Mesembryanthemum crystallinum
MLSRLISFLKACWRPSSDRSHSGSDAAGRQDGLLWYKDTGQHINGEFSMAVVQANNLLEDQSQIESGCLSLLDSGPYGTFVGVYDGHGGPETSRYINDHLFHHLKRFAAEQQSMSVDVIKKAFQATEEGFFSVVAKQWPMKPQIAAVGSCCLVGVVCNGILYIANLGDSRAVLGRAVKATGEVLAIQLSAEHNASIESVRQEMQATHPEDKDIVVLKHNVWRVKGLIQITRSIGDVYLKKTEYNREPLYSKFRLREPFKKPILSSDPAISVHELQPHDQVCIFASDGLWEHLTNQEAVDLVQKSPRNGSAKRLVKVALQEAAKKREMRYSDLKKIDRGVRRHFHDDITVVVVFLDSNLISRGSSVRGPTLSLRGGGIHLPAKTLAPCATPMEVGNS

SEQ ID NO: 26654 - protein, 289 aa, Saccharomyces cerevisiae
DPHNQIWIISGRDQKFLNKWLGGKLPQLGLSAEHGCFMKDVSCQDWVNLTEKVDMSWQVRVNEVMEEFTTRTPGSFIERKKVALTWHYRRTVPELGEFHAKELKEKLLSFTDDFDLEVMDGKANIEVRPRFVNKGEIVKRLVWHQHGKPQDMLKGISEKLPKDEMPDFVLCLGDDFTDEDMFRQLNTIETCWKEKYPDQKNQWGNYGFYPVTVGSASKKTVAKAHLTDPQQVLETLGLLVGDVSLFQSAGTVDLDSRGHVKNSESSLKSKLASKAYVMKRSASYTGAKV

SEQ ID NO: 26655 - protein, 264 aa, Gerbera hybrid cultivar
MENSDVLELDFSCVDRSMSFPDDTGDMSPQRKMGKGKIEIKRIENTTNRQVTFCKRRNGLLKKAYELSVLCDAEVALIVFSSRGRLYEYANNSVKGTIDKYKKACLDPPTSGTVAEANTQYYQQEAAKLRQQIANLQNQNRQFYRNIMGESLGDMPVKDLKNLEGKLEKAISRIRAKKNELLFAEIEYMQKRELELHNSNQFLRAKIVENERAQQHHMSLMPGSSDYELVTPHQPFDGRNYLQTNDLQPNNDYSCQDQTPLQLV

SEQ ID NO: 26656 - protein, 246 aa, Gerbera hybrid cultivar
MSFPNDSGEMSPQRKLGRGKIEIKRIENTTNRQVTFCKRRNGLLKKAYELSVLCDAEVALIVFSSRGRLYEYANNSVKGTIDRYKKACLDPPSSGSVAEANAQFYQQEAAKLRQQIANLQNQNRQFYRNIMGESLGNMPAKDLKNLESKLEKGIGKIRSKKNEILFAEIEYMQKRENELHNSNQFLRSKIAENERAQQHMSLMPGSSDYELVAPHQPFDGRNYLQVNDLQPNNNYSCQDQTPLQLV

SEQ ID NO: 26657 - protein, 308 aa, Brassica rapa subsp. chinensis
MDCSSSLDISLNLNTNAFDRSFPAKLPKEEEVKVSTSAGVERKWLVKDKSASELREELNRVYSENKKIKEMLETVCEKYYALHHHLEKLQSRKSPGIDHIEQPTKKRKQDPEDFLGFPNGKTENSSSNQDHHHQQYEQKNQLLSCKRPVTDSFNKVKVSTVYFPADFSDTSLTVKDGYQWRKYGQKVTRDNPSARAYFRCSFAPSCPVKKKVQRSAEDSSILVATYEGTHNHLGPNASEGDATSQGGSSTVTLDMVHVGQRLDLEKNERGTMQEVLVQQMASSLTNDSNFTAALAAAITGRLMEQSRT

SEQ ID NO: 26658 - protein, 354 aa, Nicotiana attenuata
MQSLKNNAQSNGGNQYNNQSSQSIREQKRSEDGYNWRKYGQKQVKGSENPRSYYKCTFPNCPTKKKVERSLDGQITEIVYKGNHNHPKPQSTRRSSSTASSSSAVQPYNTQTNEIPDHQSYGSNATPENSSISFGDDDHEHSSQKSRSRGDDFDEEEEEPDSKRWKRESESESLSAPGSRTVREPRVVVQTTSDIDILDDGYRWRKYGQKVVKGNPNPRSYYKCTSPGCPVRKHVERASQDIRSVITTYEGKHNHDVPAARGSGINRPVAPSITYNNGANAVRPFVTSQIPLQSIRPHQSPFTLEMLQKPSNYNGFSGYANSEDSYENQLQDNNVFSRAKDEPRDDMFMDTLLC

SEQ ID NO: 26659 - protein, 563 aa, Nicotiana attenuata
MASSGGNMNTFMNSFTSNYSFSSFSDLLSDNNNNNNNNNNMRSNNSSMNQEKNSLNWGFSDQRMNQQNKDEVPKFKSFPPCSLPMISSSSPASPSSYLAFPPSLSPSVLLDSPVLFNNSNTLPSPTTGSFGNLNSKEDNSKISDFSFQSRAATSSSMFQSSAPRNSLEDLMTRQQHANQQNEFSTAKTTGVKSEVAQIQSFSQEKMQSYPAPVHYTQPSQYVREQKAEDGYNWRKYGQKQVKGSENPRSYYKCTFPNCPTKKKVERNLDGHITEIVYKGNHNHPKPQSTRRSSSQSIQNLAYSNLDITNQPNAFLDNAQRDSFAGTDNSSASFGDEDVDQGSPISKSGEDDGNEPEAKRWKCDNENEVISSASRTVREPRIVVQTTSDIDILDDGYRWRKYGQKVVKGNPNPRSYYKCTFTGCPVRKHVERASHDLRAVITTYEGKHNHDVPAARGSGSYAMNKPPSGNSNNSMPVVPRPSMLANNSNQGMNFNDTFFNTRVQTTQNQPPITLQMLQSSGSSSYSGFDTSSGSYMDQMQPMNNTKPISKEEPKDDLFFSSFLN

SEQ ID NO: 26660 - protein, 716 aa, Cypripedium parviflorum var. pubescens
LSFHYMLPLSVPPWRHELKRSLWESYVLANKIFSQKVIEVINPEEDYVWIHDYHLMALPTFLRRRFNRLRMGFFLHSPFPSSEIYRTLPVREEILKALLNCDLIGFHTFDYARHFLSCCSRMLGMEYQSKRGYIGLDYFGRTVGIKIMPVGIQMAQLQLTLSLPDKAWRVSELQQRFLVKLFCLVLMTWTFSKASISSSLHLSRCSRYIPSGRGMRFLCRLLILLGAREGTLRRFKQRFGKAAKRINEQFGNANYNPVVFIDLPISLEERVAFYTIAECVVVTAVRDGMNLTPYEYIVCRQGIISGSDSSLEADGPKKSMLVVSEFLGCSPSLSGAIRINPWNTESTAEAMNEAISMSDAEKQLRHEKHYRYVSTHDVAYWSKSFMHDLERTCKDHFKRRCWGIGLGFGFRVVALDPNFRKLNIDAIVSAHERAKSRAILLDYDGTMMPQMPINKTPSAEIISIINTLCGDKKNVVFIVVVEEWCNLEKWFSPCRKLGLAAEHGYFTRWSRDESWEICSQSSDFEWMQIAEPVMKLYTESTDGSYIDKKESALVWHHHDADPDFGSAQAKEMLDHLESVLANEPVSVKSGQFIVEVKPQGVTKGIVVEKILSSMVNYNKQADFLLCIGDDRSHEDMFECISAILSKDLVAPNTTSVCFHKWDRNRAKARYYLDDTVEVTNMLGALADSSQPSSPISDVKLESLSFSEMAAKPNMST

SEQ ID NO: 26661 - protein, 528 aa, Oryza sativa Japonica Group
MSTDNFRRHRDSPGKRGDTPLHLAARSGNAAGAQRIIAEFDPEVAAERAAQANHDGETPLYVAAERGHTDVVREILKVSDVQTAGVKANNSFDAFHIAAKQGHLEVLKELLQAFPALAMTTNSVNATALDTAAILGHTEIVNLLLESDANLARIARNNGKTVLHSAARLGHVEIVRSLLSRDPGIGLRTDKKGQTALHMASKGQNAEIVIELLKPDISVIHLEDNKGNRPLHVATRKANIVIVQTLLSVEGIEVNAVNRSGHTALAIAEQLNNEELVNILREAGGVTAKEQVHPPNPAKQLKQTVSDIRHDVQSQIKQTKQTKMQVQKIKKRLEKLHIGGLNNAINSNTVVAVLIATVAFAAIFTVPGNFVEDITQAPPGMSLGQAYVASNPAFLVFLVFDALALFISLAVVVVQTSLIVVEQKAKRRMVFVMNKLMWLACLFISVAFIALTYVVVGRDDWWLAWCTMAIGAVIMLTTLGSMCYCIIAHRMDERKIRKASTSQSRSWSQTVDSDPDLLNSEYKKMYAL

SEQ ID NO: 26662 - protein, 621 aa, Oryza sativa Japonica Group
MATAAAASRAALSRPHAAAAAARASPAAGARVTLPRRRSVRSAVISSSASAAAVAASEPAAGRVTLGAGTDGALWPKPAVLVAEKLSEAGLAVLRGFADVECAYGMSPAELLAKVAQFDALIVRSGTKVTREVLEAGRGRLRVVGRAGVGIDNVDLQAATEAGCLVVNAPTANTVAAAEHGIALLASMARNVSQADAALKAGKWQRTKYVGVSLVGKTLAVMGFGKVGSEVARRAKGLGMHVIAHDPYAPADRARAIGAELVSFDEAIGRADFISLHMPLTPATSKVFNDESFSRMKNGVRIINVARGGVIDEDALVRALDSGKVAQAALDVFTEEPPAKDSKLVLHENVTVTPHLGASTVEAQEGVAIEIAEAVVGALRGELAATAVNAPMVPAEVMSELAPYVSLAEKLGKLAVQLVAGESGGIKGVKVVYTTARGPDDLDTRLLRAMVTKGIVEPVSSTFVNLVNADYTAKQRGLRITEERVSHESPAAEAPLESIQVRLSHVQSKFAGAISDGGDIVLEGRVKYGVPHLTVVGPYEVDVSLEGNLILCRQIDQPGMIGKVGNILGQTNVNISFMSVGRTFRGKQAIMAIGVDEEPDKETLEHIGHIPAIEEFVFLEL

SEQ ID NO: 26663 - protein, 221 aa, Oryza sativa Japonica Group
MEALNSSEERHEDRDSRASGTRTGSVADSSENEAESHSTPVERKDGGGKSRHCRSLSVDSFIEKLNFDESPKLPLPSPSGGLSRSGSGSLDGGAASLFGAEFANGEFTEAEKKKIMANERLAEIALTDPKRVKRILANRQSAARSKERKMRYIQELEHKVQVLQTEATTLSAQLTMLQRDSTGLATQNNELKIRLQAMEQQAQLRDDKFVSKSFPSFLSWR

SEQ ID NO: 26664 - protein, 323 aa, Oryza sativa Japonica Group
MSGGEDVRKVSRQDIQLVQNLIERCLQLYMNQKEVVETLSFQAKIEPSFTELVWQKLEEENREFFKAYYVRLMLKNQIMVFNKLLEDQYRLMCKEQPSGVPSMPPTTNGSNMGTLNQNACFLPDTTPSTAMPDSLLPNGSSSGIVNGTPSSDQFIYAGKVIHGLPSSMDASSSLLAAHNSTAGRFNGDNGTTIKTEASYSGNSDFGFCNESAFLEPCQSIGDASGGSFSSSELNGQPLGDPIMDMDSSSFGFLSQIPRNFSFSDLTEDFSQSAEILENYGRSPFIPSEPNNFSESTPGDHAEIGNRRLDTISEGVSYEDFGSD

SEQ ID NO: 26665 - protein, 576 aa, Schizosaccharomyces pombe
MQPQEVDLMENSTMRNGARVLPPEAISKRHIGPYIIRETLGEGSFGKVKLATHYKTQQKVALKFISRQLLKKSDMHMRVEREISYLKLLRHPHIIKLYDVITTPTDIVMVIEYAGGELFDYIVEKKRMTEDEGRRFFQQIICAIEYCHRHKIVHRDLKPENLLLDDNLNVKIADFGLSNIMTDGNFLKTSCGSPNYAAPEVINGKLYAGPEVDVWSCGIVLYVMLVGRLPFDDEFIPNLFKKVNSCVYVMPDFLSPGAQSLIRRMIVADPMQRITIQEIRRDPWFNVNLPDYLRPMEEVQGSYADSRIVSKLGEAMGFSEDYIVEALRSDENNEVKEAYNLLHENQVIQEKSHLSKSKRVDSFLSVSPPAFSEYTSELQKKSKQELIDPTLEGPRWTVSDPPTYAKQTIDSNICVLVPTAEKNKLEMRTLADAASAVDTSQSTRKKSRRNKWHFGVRCRGDAPEILLAVYRALQRAGAQFTVPKPVNGKYRSDMYTIKSRWEIPHCKREGKNTYAYIELQLYEVMPGCFMLDVKSNGYKDIYSHPERTADHGMDDLKSSSPFSDLCAMLVCKLFSA

SEQ ID NO: 26666 - protein, 654 aa, Trichophyton verrucosum
MAPAVGIDLGTTYSCVGIFRDDRIEIIANDQGNRTTPSFVAFTDTERLIGDAAKNQVAMNPINTVFDAKRLIGRKFNDAEVQADMKHFPFKVVEKSGKPIVQVEFKGEEKQFTPEEISSMVLTKMRETAEAYLGGTVNNAVITVPAYFNDSQRQATKDAGLIAGLNVLRIINEPTAAAIAYGLDKKAECERNVLIFDLGGGTFDVSLLTIEEGIFEVKSTAGDTHLGGEDFDNRLVNHFVNEFKRKNKKDLSTNARALRRLRTACERAKRTLSSAAQTSIEIDSLYEGVDFYTSITRARFEELCQDLFRSTMEPVERVLRDAKIDKSSVHEIVLVGGSTRIPKIQKMVSDFFNGKEPNKSINPDEAVAYGAAVQAAILSGDTSSKSTNEILLLDVAPLSLGIETAGGVMTPLIKRNTTIPTKKSETFSTFSDNQPGVLIQVFEGERARTKDNNLLGKFELTGIPPAPRGVPQIEVTFDVDANGIMNVSALEKGTGKTNKIVITNDKGRLSKEEIERMLAEAEKYKAEDEAETARIGAKNGLESYAYSLKNTLSDSKVDEKLDAADKEKLKSEIDKVVAWLDDNQTATKEEYESQQKELEGVANPIMMKFYGAGGEGGAPGGFPGAGAGGPGGFPGAGAGGAAAHDDGPTVEEVD

SEQ ID NO: 26667 - protein, 256 aa, Silene latifolia
MGRGRVELKRIENKINRQVTFAKRRNGLLKKAYELSVLCDAEVALIIFSNRGKLYEFCSGPSSMLKTLERYQKCSYGAVEVNKPSKELESSYKEYLKLKARYESLQRAHRNLLGEDLGPLNVKELDQLERQLESSLKQIRCIKTQSMLDQLTDLQSKEHALMEANKSLKAELERIMVKDNQVRQSWEGHHEHQNVHYEHQHAHSQHQHAHSQGLFQPIDCNPNLHLGYNAETSDHQLTAGTSHAQVPGFLPGWMQM

SEQ ID NO: 26668 - protein, 244 aa, Silene latifolia
MGRGRVELKRIENKINRQVTFAKRRNGLLKKAYELSVLCDAEVALIIFSNRGKLYEFCSSPSMLKTLERYQKSNYGPPDNTAVSSREALEISSHQEYIRLKARYEALQRTHRNLMGEDLGPLSSKELESLERQLDMSLKHIRSTRTQYMLDQLADLQRKEHVLNEANITLKQRLIEADQVSSAQCYGHELDYGRQNPQAQADHVFFHPLECEPTLQIGYQPEQMNVTAAGPSINNFMTGWLPQN

SEQ ID NO: 26669 - protein, 224 aa, Mycobacterium bovis BCG
MDEILARAGIFQGVEPSAIAALTKQLQPVDFPRGHTVFAEGEPGDRLYIIISGKVKIGRRAPDGRENLLTIMGPSDMFGELSIFDPGPRTSSATTITEVRAVSMDRDALRSWIADRPEISEQLLRVLARRLRRTNNNLADLIFTDVPGRVAKQLLQLAQRFGTQEGGALRVTHDLTQKEIAQLVGASRETVNKALADFAHRGWIRLEGKSVLISDSERLARRAR

SEQ ID NO: 26670 - protein, 179 aa, Natrialba asiatica
GKGLDTAKAVRENVGGAMVSMPTIASTDSPTSSLSVIYSEDGEFERYRFYESHPDVVLVDTSVIAGAPVRFLTSGIADAMATWFEADAVHRTGGANFFDEDPTYAAHSLSSLCYDLLRDHAVSSIRAVENGIVTESVEAVVEANTLLSGLGFENGGLAAAHSIHNGLTQLEDTHHATHG

SEQ ID NO: 26671 - protein, 450 aa, Lactobacillus johnsonii NCC 533
MKQQNHLKRSLGFFSAISIVIGTIIGSGIFFKQASVLQSAHNSTLAISAWIFGGVITLAAGLTIAEIGAQMPYTGGLYVYIEKLYGRILGFLAGWMQVIVYGPAIIAAVGGFTGILIANFFNLNDSWRIPLSIGCMLFITIINFLDNKVGAAFSVITTIGKMIPIAAIIIFGIFWGQNNALGQTISDVKQSSGGFGVAVLATLFAYDGWILIANLGGEMKNPQKVLPQAIILGITIVLTIYTLITVGILRFIPADLIERLGEDTTTYLATKAFGNIGGKLLTLGIIISMLGTLNGKIITFPRIVYAMAKRNDLPFSSYLTYLTPKGKSPIVATIFITVLATLMLVLFDPDRLSDLCVFTIYCFYILAFFGIFKLRRENSNRPFSTPLYPLVPIVAILGGLFIIVSELFNDPAGVVLFLGIVAVGLPIFYYLKRKEKTSRNKAIEINENHD

SEQ ID NO: 26672 - protein, 329 aa, Lactobacillus johnsonii NCC 533
MKKEELHEMLHPMKLIGLGGNQALAERIAAALDKPLLETAVQHFSDGEIQVNITESVRGCDVYVIQSIQDPVNENFMELMIVLDALHRASAHSVNVVIPYMAYSRQDTKNRSREPITAKLLANLLQLTDIDDLIAVDLHASQIQGFYNIPVDHLHAMPILAQYFLDNGIASKENDDVVVVSPDHSGAKLVRTFGSYFDAPIAIVDQRGARYDAEAHDMIGDVKDKTVIIVDDLIDTGSRIASSTRSVLAAGAKKVYVAATHALLSQNAIDVLNELPVEQIVVTDTIKHKKYPDRMVRLSVARLLAKGIDYIYNDKSIHQIFDEQNRIQG

SEQ ID NO: 26673 - protein, 451 aa, Lactobacillus johnsonii NCC 533
MDEKEKLKLKRSLKSRHVTMIAIGGAIGTGLFLGSGTAIQSAGPSIILSYLIVGIISFFMMRALGELILADPEQHSFIESVKKYLGNRMEFVAGWTYWLCWLSLAMADLTATGIYLKYWFKNLPQWVGPLVIVILLMLVNMVNVGLFGELESWFSMIKVLAILALIITGLILLIMHTKIDSRTVSLSNLVNYGGFFPTGSWGFLKSFQMVVFAFVGIEIVGLTAGETANPDKDIPKAINTLPVRIGLFYVGSMIAIMAVYPWNKIVTTTSPFVQVFGAIGIPAAAGILNFVVLTAAMSATNSAIFSTSRSLYALSRGNNAPKRFGKLSKKAVPNNALTFSSLILFIVVILNYIMPAQVFDIISSVSTINFIMVWIIIMWTHLKYRAENKEQLGKFRMPGFPITSWITIIFYLVILVILALIPATRLPLIISIIFILALALSYTLLERRKSK

SEQ ID NO: 26674 - protein, 649 aa, Lactobacillus johnsonii NCC 533
MCGICAFFDPELKDKDCAIQGMMDTIKHRGPSSDGKYTNDKVALGFRRLSIIDLRGGSQPIFNEDKSRAIIFNGEIYNFKPLRKELIDAGHTFTTKADTEVLLHGYEEWGMDGLLKKVRGMFAFVIWDDNTKTLYGARDFFGIKPMYYSDQNGKLIVGSELKSFLAYPGFKKELNTEAVKPYLMNQYNDLKETFFKGVYRFPAGHWFEYKDGKMKTHQYWDAKYVENSLSFEETLDKINEDLKETVDLYRNADVPVGAFLSEGIDSSYLTSLLDPEDVFSVSFDDSTYNEASKAKALSDLHGWKFFADKVDADEAMRDFPEMQYHMDEPDANPSIIPLWYLCKLARKHVTVALSGEGADELFAGYVNYGMHTHNDVIKVFTAGLKKLPKKSRVRLAHKIKKMPNFPGKVHMYTNLAEPSEFYVGQSVIYDMDYPTIFTSKDANGILRDKYKNDLTVNGIYQEDFKKVKNIDEVKQMQYIDLHHFMLNDIEQKADKISMAHSLELRVPYLDKKIAELANSIPTKYLVNRHDTKYALRKASEKVLPEEWAQRPKLGFPTPIKQWLKEPRFYKQVRALFTEDFVDDIFDQKKIVKLLDDNYKGDGSARRQIWAIYTFLVWYKLFFVDYDETVKKYQHVQPEVAELIESGRLV

SEQ ID NO: 26675 - protein, 323 aa, Lactobacillus johnsonii NCC 533
MSQLDKEIKIFALNSNKPLAEKIADKVGVKLGKSDVKRFSDGEIQINIDESVRGKDVYLVQSTSAPVNDNLMELLIMIDAVKRASARSVNLVMPYYGYARQDRKTRAREPITAKLVADMLQKAGADRVLSLDLHAPQIQGFFDIPVDNLMGAPLLADYFLGHDLEKDAVVVSPDHGGVTRARKLAEFLKTPIAIVDKRRPKANVAEVMNIIGDVKGKRAIIIDDMIDTAGTITLASQALMDAGATEVYASATHAVLSGPAIERLNNSPIKKLILTDSINQPEEKDLSKAEIVSVGPLMGEAIKLIQEHKPVSPLFNTRFQSHN

SEQ ID NO: 26676 - protein, 532 aa, Lactobacillus johnsonii NCC 533
MNKGHKISLFSAIMLALNSLIGSGWLFGSGSAAKIAGPAAILSWIIGAVIIIAIALTYVELGTMFPESGGMSKYAQYSHGPMLGFIAAWANWISLVTLVPMEAVAAVQYMSSWPWKWANWTHHFMQDGNITTPGLLLVFVFMIIFTLINFWSIKIMTHFTNLISVFKVLLPTITIIMLFASSFHPANFGHDVKTFMPYGSRAIFEAASGAGIIMSYDAFQTIINIGGELKNPRKNIIRGVLISMFATAAIYILLQVAFIGAVDPGMLAKNSWHGIDFASPFADIAILLGINWLVILLYMDAFVSPFGTGVAFVATASRALAAMTYTKHLPAWLGRLNRRYLVPRFAMIADLILAMILVSVFRNWNLLATVITCATLIAYLTGPVTTITLRKIAPDLERPYKPNYMRWFAPLTFVLTSLAIYWTMWPTTIQVILVILVGIPIYFYYEVKYQKKDFKSQFKHAAWLLGYLVFISIMSYCGSDGFGGQNWIKYPWDFLLIAIVSLIFYKVAIDTGLEKVDPAAIKVNEKIKLKKD

SEQ ID NO: 26677 - protein, 708 aa, Lactobacillus johnsonii NCC 533
MKNRRNRLLSNGLFYIIVFVILLAGINWAVGGSGSNGSTENIRYSQLVKDLKAGKVKSINVQPSNGVYTVTGSYKKAQKSNNQNNNGFGLIPSSQSSNEVTRFSTTMLQNDSMVKTISDLAQKSGASISGQGESQSGTWISTIVMLVPTLIFIVMLWMMMNQGGQGRGGGMMNFGKSHVKPQDPSKNKVRFSDVAGEEEEKQELVEIVEFLKSPAKYTKLGARIPAGVLLEGPPGTGKTLLARAVAGEAGVPFYSISGSDFVEMFVGVGASRVRDLFETAKKNAPSIIFIDEIDAVGRKRGNGVSGGHDEREQTLNQLLVEMDGFEGDEGVIVMAATNRSDVLDPALLRPGRFDRKVLVGRPDVKGREAILKVHAKNKPLAPDVDLKKVARQTPGFVGADLENVLNEAALVAARRNKTEITASDIDEAEDRVIAGPAKKDTVISPEERKRVAYHEAGHAIVGLVLSDSRTVRKVTIVPRGRAGGYNIMLPKEDENIITKKQLMEQVAGLMGGRAGEEVVVGDKSTGASNDFEQATNIARGMVTQYGMTDVGMTELESPSMQSPYGTKPYSEATAAKIDEAVKEILDEGHKQAVDIIKSHRETHKIIAEALLKYETLNEKQILSLFKTGKMPENDENEFPSESKASTYEEAKAAMEKKDQQREETENKDDKEDIHPLPDDHKNIDNIPLNPPSEKNESDDHSSDENKDD

SEQ ID NO: 26678 - protein, 822 aa, Lactobacillus johnsonii NCC 533
MEKSYSDSAKNVLEIAKEQAQNFHHRIIGTEHVLLALVIEANGDAGKLLRERNVTLTLVREEIERYTGYGSSPKATYMEMSPRLSLVLNFAKQRADELGTAQIETKHILLGLLASDQILASLILKNIGVDPRDLSQDVNDSFMDGSGEENNVLGISSATGMKKGKSLTPNLDKVSVNLNKRAREGAIDPVIGRDKEIKRVIQILSRRTKNNPVLVGEPGVGKTAVAQGIAAAIVNHEVPDTLAKKRVMALDMGSLIAGTKYRGEFEDRMKKILKEIQQDGSVILFVDEMHTLIGAGGAEGAIDASNILKPSLARGDIQMIGATTFDEYQKYIEKDQALARRFQQVKIGEPSKEETVDILKGLRPKYEKFHNVKIEDEAINDAVEFSTRYIANRFLPDKAIDLIDEASAAVKIQAIGKSDPRLTKLDTQINDVIHQKEQAAENQNFVQAAKLRDEENKLTQDRDKLIEKVENKNSKKSIVDSDKIAQIVSEWTGVPVTRMKKSETKRLAHLESILHERVIGQDEAISAVSRAIRRSRSGIKDENRPIGSFLFLGPTGVGKTELAKALAAAVFGSERNIIRVDMSEYMDQIATSKLIGSAPGYVGYEEGGQLSERVRRNPYSVILLDEVEKAHPDVFNLLLQVLDEGFLTDSKGRKVDFRNTIIIMTSNLGSRSLQEDKTVGFAADNADKNKLQQEKVTAAVKQFFRPEFLNRIDETVVFDSLTKKQLREIVSLMTGHLVDRLAKKDVTLKISPAALDVLAKDGFDPEMGARPLRRAIQHELEDVIAEDLISEKIKADQIVKVGAHQGKLKFTILDKDNTLVKN

SEQ ID NO: 26679 - protein, 392 aa, Lactobacillus johnsonii NCC 533
MKKVLAINSGSSSFKYKLFSFPNEKVIASGMADRVGKENAVFKIKLSNGQEYIKNLPIHNQEEAVKLLIEDLKKFHVVEDLREISGVGHRVVNGGEIFKESVHVKEKELQEIFDLGELAPLHNIPEANGIKAFMRIIPNVPQVAVFDTSYHQTLDQIHYLYSIPYEYYQKYGIRKYGAHGISISYVAQRAAKMLNKNPNLVNLIVCHLGSGASVTAVKNEKSYDTSMGISPLTGVTMGTRSGDFDPAALQRLMHKTGMNIDEAVKVLNYKSGLLGISGVSSDMRDLIESKDKRATLARKIFINRVVRYVGAYAAELNGVDAIIFTAGIGEHDPGIRAGVMASLKYLGLDPDFKANRTDGEKFISKPNSKVKAMIVPTNEELMIAREVVRVLQ

SEQ ID NO: 26680 - protein, 458 aa, Lactobacillus johnsonii NCC 533
MVKKTVPKKLTFMSIYFLGINGIIGSGAFLLPQSIYKDMDLLSVVVLLSAALTVGLIALCYADLASRFTGSGAAWLYSYNAFGRFAGYELGVFTWFLGCCTYAAEVVAFLTTLKSFVPAFNQSSVYFAVGIGLVLLFSIINFFGRALVKIIDNTSSIAKLSTIILFIIVGMFFMHIANFHPVLPAAAAKGVGPFFHHFGAAFSVVFYLFSGFSFIPIAASQMKDPAKNIPRALVAVMVTVTILYTLMVLIAIGILGHKMSWYTIPIANAFKSAVGEWGYVIIIIGVLLSIFGVAFTCSFNTPALIASLALEHQLLPNWVGKKNKFDAPWVGIILTAAVTLLLITQSYLFLVGCIVLASFVQYVPSIFAVIKFKHTGQYPNHGFKLPGGYTIPILALLVACYLIFNFTWETILLSIVVAAVTAVLYLFLGKKRLAKMGGIPTAVREKKNHIEADLKKKN

SEQ ID NO: 26681 - protein, 273 aa, Lactobacillus johnsonii NCC 533
MKRKLRFFSLFIVLFSVFLLSACQKNTRNVYQEVKKSNEITWGVKADTRLFGLMSIKTGKIEGFEVDLANALTKEILGKNAKANFVQTTAKTKIPLLKNGNIDAVLAAMTITPERKKQIDFSDPYFYAGQSLLVKDDSTIKSIKDMNGKTALAVKGTTAVANVKKFAPKAKVLEFDDYGQAFTALKAGQGQAMTTDNGLLAGIATENKGYKLVGGTYTKEPYGIAVNKGQIQMKNAINRALVKLKKDGTYDALVKKWFSGIPGFNIKEAEGEK

SEQ ID NO: 26682 - protein, 274 aa, Lactobacillus johnsonii NCC 533
MKKSTKIFILPLVLALLVTLTGCAKKQKSSNVYDQVKESKTITWGVKADTRLFGLMSIKTGKIEGFEVDLAKALTKQMLGKDAKAEFVQTTPKTRIPLLKNGNIDAILATMTITPDRKKQVTFSEPYFTAGQSLLVKDDSSIKNVRDLNGKTALAVKGTTAVDNVKKFAPKATVLEYDDYGQAFTALKAGQGQAMTTDNGLLAGIASENKGYKLVGGTYTSEPYGIAVEKGQTDFADHINKALNELKKNGTYHRLLVKWFDGIPGFNIKEVENS

SEQ ID NO: 26683 - protein, 436 aa, Lactobacillus johnsonii NCC 533
MKRQISFGQALATVVGTVIGGGVFFKIGSISHETGTSSLTLFVWILAGIVSIASGLTVSEIAAALPVTGGSIKYIEYTYGKVWGFLFGWAQMLVYFPANIAALSVIFGQQFVVLFNLPAKYATLIGLLLAIFLMGLNFISTKFSTRMQSVMTILKAIPIALIVLFGLFNSSKVDINLFPLSAGHNTSFWTGLSGGLLAALFAYDGWINVTNLAGEIEKPEKNLSRAIIIGLSAITLIYVLVNYAFLTAIPFKEIVGNQNTAYLASLKLFGSLGGKLVTIGILISVYGAINGFMLTGMRIPYTLAKNKMLPFSDKISRTNVNTGVPTLSALIILVVSLIMILLGTFDLLTNMLVFVMWTFTTLISIAVVILRYREPKLERPYVVPWYPIVPIISIGGGLFIVISTVINEFWLSITGIGLTLLGLPIYYYMKKQNNRQ

SEQ ID NO: 26684 - protein, 325 aa, Lactobacillus johnsonii NCC 533
MKVFDSLKKKAEESKKVIVFPEGNDDRIIKAAVRLEKEGIVKPLLLGKPDEVIKTAQSLNVDLGSIEIINPAVYPDFEKMCQDFVELRKGKNTLAEAKEILQDVSYFGTMLVYEGKADGMVSGATHSTANTVRPALQIIKTKKGMSRVSGAMIMERGDEKYIFADCAINIDPDSETLAEIAYQSSKTAEMIGLEPKIAMLSFSTKGSAKGPMVTKVQEATELVHQKYPDLICDGELQFDAAIVPRVGEAKAPGSAVAGHANVFIFPELQSGNISYKVAERLGGFSAIGPVLQGLAAPINDLSRGCKTEDVYLLAILTAAQANMEK

SEQ ID NO: 26685 - protein, 402 aa, Lactobacillus johnsonii NCC 533
MKKVLAVNSGSSSFKYKLFSLDNEEVIASGMADRVGLPGSVFTMTLADGSQHDEQSDIANQEEAVQKLLSWLKEYNVIDSLEDIAGVGHRVVAGGEEFTDSTVITEDNLWKIYNMSDYAPLHNPAEADGIYAFMKVLPNVPEVAVFDTSFHQSLDPVQYLYSVPYKYYEKFRARKYGAHGTSARYVSRRTADLLNKPVEDLKMVLCHLGSGASVTAIKDGKSFDTSMGFSPVAGITMSTRSGDVDPSLLQFIMKKGNITSFNEVIKMLNTESGLLGLSGISPDMRDIEKAIKNGDKQAQLTKDIFINRIVRYIGAYMTEMGGLDVLVFTAGIGEHDASVRKQIMDGLTWLGLEYDEEANKANHESVITTPNSKITAMIVPTNEELMIARDVVRLAKLDKLNK

SEQ ID NO: 26686 - protein, 384 aa, Lactobacillus johnsonii NCC 533
MIYFDNSATTAVYPAALETYDKVTKDIWGNPSSLHKMGDRSHQLLEASRKQIANLLNVKPYEIFFTSSGSESDNWAIKGTALAKKEFGNHIITSSVEHAAVSNSVRALENLGFRITVLPVDKSGQVNPEDLKEALDKETILVSIMGVNNEIGTIQPIKAISKVLEDYPNVTFHVDNVQALGKDVWDEVFTDRVDLMSLSAHKFHAPRGVGILYKKEGKMIKPLIDGGGQEKALRSSTENLPAIAATAKAMRLYLADEKKNAEQELAVKNKIVSYLNGKPGIHIFSPINDNFVPSILCFSLEGIRGETLVHTLESEDIYVSTTSACSSRSGVESGTLNSMKVDDDLATGAIRLSFDPSNTIEEAEQFISVFDKIYKHFAEINHLK

SEQ ID NO: 26687 - protein, 384 aa, Lactobacillus johnsonii NCC 533
MTRKNVYLDNAATTPMDPKVIEKISSEMADDFGNASSQHAFGRKARHVVETARHQLAETINAQDKEIIFTSGGSESNNTAIFGTVRARKDIGKKIITTKIEHPSVLNPMKRLAQEGYEIVYLDVDETGHINLDDLKRELTPDTILVSIMAVNNEVGSIMPLKEIGELVKDSNAYFHVDDVQGFGNIEIDVKEMNIDLLSTSAHKVNGPKFLGFLYEKNGLKVSNLLLGGEQETKRRPGTENVPGIAGFGIAAQELNEMDKQKLQEKYQNFQKIILDELDKNQIDYEVNGTLEGKVSHHVLNLWLKGVGTYSALTNLDLSGYAVSGGSACTAGSLTPSHVLQAMYGEDSPRIEESIRISFGRFNTEEEIQEFAADLVKMCKRLDK

SEQ ID NO: 26688 - protein, 428 aa, Lactobacillus johnsonii NCC 533
MFVDQTKIDVQAGKGGDGAVAFRHEKYVPLGGPAGGDGGRGGSIILVADSGLRTLMDFRFRRKFKADNGENGRIKSQYGRGAKDVRLKVPMGTSVYDFNTGELLGDLVENGQELVVAHGGKGGRGNIHFATPTRTAPEIAENGEPGEFRTLRLELKVLADVGLVGFPSVGKSTLLSVVTKAKPKIAAYEFTTLTPNLGMVVLPDGRDFSMADLPGLIEGASKGVGLGIQFLRHVERTKVILHLVSMDPNNGRDAYEDYETIRKELAGYTKDLTTKKEIIVATQMDIPGSEEKFAEFKKKLGDKTVYPISSVTHKGVSELMGKTADLVEEVAKEEAEKPAEIKVAEKEYVYKKPEDEGFKVERTGEHSFVVTGNKLERLVQRTNLDHTDGIMLLARKLKRLGVDEALRENGAVTGDDVSIADFTFEFVD

SEQ ID NO: 26689 - protein, 559 aa, Lactobacillus johnsonii NCC 533
MAEEKYYGANAIVDSLINHDVKFVFGIPGAKIDRVFELLEHSKDPRTPKFVLTRHEQNAAFMAAGVGRITGKPGVVLTTSGPGASNLATGLVTATAEGDPVLAISGQVQRTDLLRLTHQSMKNAALFAPITKYSAEVQEPENISEVIANAYQEAEASKQGASFVSVPQDVTDAEVKTSVIAPLEPPKLGPASPIESTLLSQRIKAAKLPVLLLGMRASDPETTRAIRRLIAETHLPVVETFQGAGIIPRELEDDFFGRVGLFRNQPGDQLLKKSDLVIAIGYDPIEYEPRNWNSDRSANIVVIDSMRAEIDKNYQPERELVGDISQTLDFLLPYMKGYSMPNESKEYLDSLRKTLQKRDTPPAVTKDQVKSHPLSIIQALQDRVTDDMTVTVDVGSFYIWMARHFRSYEPRHLLFSNGMQTLGVALPWAVAAALVRPNTKIVSVSGDGGFMFSSQDLETAVRLGLNIVHIIWNDGNYDMVKFQEELKYGDSAAVKFGPVDFVKYAESFGAKGYRVEKAADLDRILDKAFKEDGPTVVDIPVDYSFNQELGKTILEDQLH

SEQ ID NO: 26690 - protein, 264 aa, Lactobacillus johnsonii NCC 533
MATLEIKDLHVEVEDKDKKSRKKILKGVNLSLKTGEIHAIMGPNGTGKSTLSETIMGNPRYHVTQGDILLNNESIVEMPVDERARKGLFLAMQYPAEVPGVTNAEFLRAAINARRPKDDPISVMTFLNELDKNLDLLDMNEAMTERYLNEGFSGGEKKRNEILQMLMIKPSFGILDEIDSGLDIDALRVVSRGVNAMRGDNFGALMITHYQRLLDYIVPDIVHVMMDGRVVKDGGPDLAKKLEQEGYAGLRDELGLDIKLVDEN

SEQ ID NO: 26691 - protein, 583 aa, Lactobacillus johnsonii NCC 533
MDRGRPRIEKGKHSFSFQDFFKLINRVHPKYWQLIVGILAGLIATGANLIVPQFAQRIINNFKHLNINLVIITGIVFFGGVIISALSGYILGVFGEHVVSKLRDNLWARLLKMPVSYFDNTSTGEISSRLVNDTSQVKNLLANTLPNAITSLLQFFGAVVIMFMMDWQMSLIMVLAVPLVIFVLLPFMRLSGKIGRARQDELAKFSSDSTNVLSEIRLVKSSNSEKKELATGTKRIAKLYAIGVKESWINSLMQPISNMLMMILVIGILTYGAIRVMQGTLTMGALISFLMYLFQLMGPVIIISQFFNELAKTSGSTERIGEMLNEPIEVSADNQKVDIAGKELKLQNVSFSYEKGKQILHDINVSAKPNTVVAFAGPSGGGKSTIFSLIERFYKPTSGKITIGGQNIEEIDLTDWRKQIGLVGQNSSVMPGTIRENLVYGLGRKVSDDELWHVLKMAYADKFVKEAEDGLETQIGERGVKLSGGQRQRIAIARAFLRDPKILMLDEATASLDSESEAMVQKALASLMKNRMTLVIAHRLSTIVDADKIYFIDHGTVSGSGTHDELVKSTPLYAEYVHNQFKK

SEQ ID NO: 26692 - protein, 284 aa, Lactobacillus johnsonii NCC 533
MKKHKFIKKLIAAVGILSVGAVTLTACSNNSSSSSSSNNPSSVAAIKKRGTLKVAVFGDLPPYGWVNKDGKRVGYDVRLARELAKEMGVKVKFVQVNANNRVDTLNANKADIVLANFTVTPERKQVVDFAKPYMKVSVGVVSPKSKPITNVNQLKGKKVIVTKGTTAENYFTSKQPDVDLLKFDSKTQQFNAMKNGRAAALADDNSYLYAWVKNNPKYTVGIKHLGPNSYIAPAVKKGNKSLLDWTNKHINKLNKDGFFINDYNQELKPYFGDDVKPSDIIINK

SEQ ID NO: 26693 - protein, 303 aa, Lactobacillus johnsonii NCC 533
MMDEKKDFKSGFVALIGRPNVGKSTLLNYLVGQKVAIMSPQPQTTRNKISGIYTDDQEQIVFIDTPGIHKPKNKLDDFMDKSSYSALDEVDVVLFMVEPEPAGKGDQYIAELLKKIKKPVFLVINKIDKVHPDELLSIIDSYKNLGDFAEIVPISASQGNNVSELIKTIAKYLPEGPQFYDADQLTDRPEYFIVAELIREQVLKLTHEEVPHATAVVVDRMRDHEGGKLQVEATIYVERPGQKGIIIGKKGQMLKQIGIAARQEIEALLGEKVNLRLWVKVQKNWRSDPAFLKSIGYNAKELR

SEQ ID NO: 26694 - protein, 394 aa, Lactobacillus johnsonii NCC 533
MPKLSNDLSLTKNTRLNSLGPSKIRAFDEKASQIPGIIKLTIGEPDLNTPDHVKDAAIADIKANDSHYAPQAGKPELLEAISNYLDRSLDVKYDPKTEICVTVGATGALNDVFMSILNPGDKILVPTPVWALYFQLIKLTGAIPVQIDTSKDDFILTPEHLETVLQNEGKGAKAIILTDPSNPTGRVYPAATLKALAEVITKYHLFSVTDEIYGELVYDNNVHHSLSQYIPERNILISGLSKAYAMTGWRLGYIAAPADIMKTIQKVNAFLVTSVTDNVQAAAIEALNNGQADPLEARKIYEDRLEFMKTGLEKLGFEMSTPQGAFYIFAKIPDTFGTDDEAFANELATKAKVGVTPGRYFGKGGQGYVRMSYASSTEQLQEALKRIAKFVENI

SEQ ID NO: 26695 - protein, 624 aa, Lactobacillus johnsonii NCC 533
MSKVIGIDLGTTNSAVAVLEGKEPKIITNPEGNRTTPSVVAFKNGEIQVGEVAKRQAITNPNTIVSIKSHMGEEGYKVKVGDKEYTPQEISAFILQYIKKFSEDYLGEKVTDAVITVPAYFNDAQRQATKDAGKIAGLNVQRIINEPTASALAYGLDKDENDEKVLVYDLGGGTFDVSILQLGDGVFQVLSTNGDTHLGGDDFDQRIMDWLIQNFKEENGVDLSNDKMALQRLKDAAEKAKKDLSGVSSTHISLPFISAGEAGPLHLEADLTRAKFDELTDDLVQKTKVAFDNALSDAGLTVNDIDKVILNGGSTRIPAVQKAVKDWAGKEPDHSINPDEAVALGAAIQGGVISGDVKDIVLLDVTPLSLGIETMGGVFTKLIDRNTTIPTSKSQIFSTAADNQPAVDVHVLQGERPMAADDKTLGRFELTDIPPAPRGVPQIQVTFDIDKNGIVNVSAKDMGTGKEQKITIKSSSGLSDEEIKKMQKDAEEHAEEDKKRKEEVDLRNEVDQLIFTTEKTLKETEGKVPETETKNVQDALDALKKAQKDNNLDEMKEKKEALSKAAQDLAVKLYQQNGGAQGAAGQAGPQGPQNGGQPNNDNGSDNGQGGSTVDGDFHKVDPDK

SEQ ID NO: 26696 - protein, 103 aa, Lactobacillus johnsonii NCC 533
MYAVIKTGGKQYKVAKGDSVFVEKLEVKPGDEVTFDEVILVNDGKSTKIGTPVVEGAKVVAKVEKQGKEKKVVTFKYKPKKHSHTKYGHRQPYTKVTIESIEA

SEQ ID NO: 26697 - protein, 388 aa, Lactobacillus johnsonii NCC 533
MLQDVYIVGMNRIPFGKYRGFYKDKSAVDLGVLALKGLLKKNIVPQDKIDSILVGNVLSAGLGQNVARQIALKSGLPESVVGTSVDDVCGSSLKALRFAQGQMLLGDSQIAIVGGAESMTNAPLLLDKSKKHDENPAYQDSLMIDGIGDAYSRKPMGITAENVADKYHITRQDMDEFARDSHAKAYAAQENDWFKEEYAPIELDGHVLDHDETIRPDSSLEALGQLKPVFKENGRVTAGNSSPLTDGASMLLLSNQQKLDELNLTPLAYLGAYAEIGCDPAYMGYAPYFAIKKLLTKTNSTIEDYDLIEINEAFAAQAYAVARDLNIPKEKLNIAGGAISLGHPLGATGTRLVMSAVNSLRKINGRRAIVSLCIGGGQGIAYEIRRII

SEQ ID NO: 26698 - protein, 369 aa, Lactobacillus johnsonii NCC 533
MSEELRCIGCGSILQDQDPKKSGYLPSSALKKALESDDNEVYCQRCFRLRHYNEIMPVEENNDDFLALLNSISQKKALVVNVVDLFDFSNSLISSIKRFIGGNEYILVGNKVDLFPKNSKESKIKDWMRQEANRNGLKPEKIFLVSAAKKKNLDELMAFLAKKGEKKDIYFVGTTNVGKSTLINAIINMNSDLKDVITTSKFPGTTLDEIKIPLSNGHYLIDTPGILNANQLASHLSGKELEVVEPKKPLKPATYQLLPGQTIFLAGLGRFDYVDGPSAGFTIYVARDLYVHRTKTENADVFYEKHKDDLLLPPSKEDNLGPLKGQTFSPKEKSDILFGGVGFITTPANVVVKAYTPEGIGLGIRRALI

SEQ ID NO: 26699 - protein, 462 aa, Lactobacillus johnsonii NCC 533
MKLNPFRKESLKRYLGTDKHFVKTLGAFDLLTIGIGAVIGTGIFILPGTVAAKEAGPGVTLSFLIAALVCTLASMCYAELSSSIPVAGSAYSYGNILYGEVIGWILGWALILEYMLSVAAVSAGWASYFNSLLHSFGLHIPHHFEGPFDPLNGTYLNLWAVISVLLIGILLSRGMKASMKFNNAAVLIKIAIIFIFIGVGLFFIKPKNYQPFTPYGTTGVLRGATTVFFAFLGFDVVSSSAAEVKNPKKNMPIGIIGTLIVAALLYMGVSVVLTGMVNYKQLDVANPVAYALKVVNQGWVADLLSIGAIVGMSTMMLTMIYSSSRLIYSIGRDGLLPSFLGKIDKHGLPENALWIVTIVIAIMGGLFSLEELTSLVSIGTLLAFTFVSFGVILLRRRKDIPEGDFKVPFYPVIPILSGLACIGMMCFLSVKTYIFASVWFLFGLFIYCVYGYKHSKISKRNN

SEQ ID NO: 26700 - protein, 336 aa, Lactobacillus johnsonii NCC 533
MTLILPKDYHPSLTIRDTEAAIVFIRENFQDKIADKLNLQRMSAPMFVEKSTGLNDNLNGIERPVAFDMKAMPDDTIEVVHSLAKWKRLALKRYGFGMHEGLYTNMNAIRRDEDLDNFHSIYVDQWDWEKIIAKEERNIETLKTTVKQIFKAIKETEKELSARYPGSTYRLPSDITFITTQELEDRWPDLAPEEREDKIAKEKKAVFLMKIGDKLKRSGKPHDGRAPDYDDWELNGDLLFWYEPLKRKIEISSMGIRVSEESLKEQLKKAHTEERSDLPFHKMLLEGKLPYTIGGGIGQSRLCMLLLGKAHIGEVQASIWPPEMIESCKAADIKIL

SEQ ID NO: 26701 - protein, 466 aa, Lactobacillus johnsonii NCC 533
MNENETSKLGFWSIVLLAINSIIGSGIFLTPGSVVQQAGSKALIVYFIAAIFASILAISFAAAAKYVTKSGAAYAYSKAAFGNNVGFYMGILRYFSASVAWGIMAVGVIKSTISIFGGNPNETMSVTIGFLILMAVITVINLFGQKVVKYVMNLATIGKLAALVLIIVAGVVLLIVSGASSNLSQVDQITQNGQKIVPTLTTTGFVMAIVSAFYAFTGFESVASGSDDMKNPAKNLPRAIPLAIIVIAVIYIGVVAVAMMLDPKALMTTKQVVAIAAIFKNEILRDVILVGALVSMFGINVASSFNAPRILEAMARENQFSKALTKRTKNNFPIRTFFISVLFAILIPMAFEYNMVNLITLSAMVRFLGFIVVPLAVIQFYRGKTAEPVLDAQRNVWTDIVVPILSIVLVIFLLVEYNWKAQFGVVNAQGQVTGINWYAIAMMIFGFILLPLIMFIISRKDRKASK

SEQ ID NO: 26702 - protein, 465 aa, Lactobacillus johnsonii NCC 533
MKNFFKKVPVNTFLKADSRLTRHLNARDLVALGIGAVIGTGIFILPGHEAAQHAGPAVAISFLLAAIVSGMVGMAYAEFSSAMPVAGSAYSFGSVIYGEVVGWIIGWGLLLEYFLAVSAEATGFASYFNNNILAPIGIHLPKALEAGPMEGGVINISAVLIVLIVALILYQGANLSKRVENIAVIIKVAIIILFIVIGMFYIKADNYVPFYPKKFQTPPLGIGGISTAAATVFFAFIGFDALAANSAETKDPEKNVVKGIMGTVIIAVLLYVSFSLVLTGMVNYKQLNVDDPAAYALKVVGLTAWNKLITVGALVGIFTAMITMLLGGSRLLYALGRDGLLPDSMGSVHAKKMIPDHAVIVSTIVAAVFAGLVPLMELASLINAGTLIAFALISFGIIPLRHRKDIVNDGFKMPLYPVLPVIAGLLSVYFIWMLPNTTKIMVGIWLIVGIIVYATYGIKHSKLQN

SEQ ID NO: 26703 - protein, 291 aa, Lactobacillus johnsonii NCC 533
MRNHLSKKNWKLILLALGMLALTLVVTGCASTNGTSVAPISHTSGNWWDRYIVYYISQFILWIASLVHDSYGWAIIIFTIIVRIILLPLNAISIRSMAKQQKVQPQMDALRKKYPGKDVESRQKLQEETSKLYKEAGINPYTGCLPMLIQLPVMYALYQAIWRTPQLQNGRFLWMDLGRPDPYYIMPILAAVFTFMSTYISQMSTPQSSQNGMTKGMTYLMPLIIGVSAIGIQSAISLYWVISNLFQVVQTFILQNPFKYQRELEEQKKEERERQRKVRRAYKRLGRKQQK

SEQ ID NO: 26704 - protein, 308 aa, Wolbachia endosymbiont of Drosophila melanogaster
MKIIIGNASKELGESVVNRLDVQPSSAWISKFTDGEVNVEVANDLYNQEVYIIQSLSPPVNDNLMELLLIIDAVNRLGAKRIVVIIPYYGYSRQDRIIKNNNVQSALSAKLVANLIQTAGASSVAVIDLHSSQIEGFFDVPITNLNCFEAFVDSIHTENLAIVAPDVGAIGRARAFAKTLEEKYKIGLNDKIIVVDKYREKAGTSQVMNIIGEVANKNCVIVDDIVDSGGTLCNAALALKGHGAKSVISCITHGVLSGSAVEKISSSSLDKLVITDTILHKFEKTGKIEVVSVVDILTHFIQGGKDAS

SEQ ID NO: 26705 - protein, 100 aa, Wolbachia endosymbiont of Drosophila melanogaster
MFAVIETGGKQYLVKEGSIIKVEKLEAEEKKEVEINKVICISNSGLSYSSNATVKAEVLEQCRGEKIIIFKKKRRKNYRRKTGHRQYITVLRINEISLQK

SEQ ID NO: 26706 - protein, 853 aa, Wolbachia endosymbiont of Drosophila melanogaster
MDLNKFTEKAKSLIQSAQMKALGAGHQIFMPEHLLKVMLEDESGLVQDLINACGGNVQSISDAVDSAIKKLPVIEGPGSGGLQLSREIAKVFEDSIGIAKRNKDSFVAVERLLQGLTAQKDDTVGKILAENGVTPQKLNSVVAEMRKGSSADSPNSEEKLNAAKKYTKDVTELAMQGKLDPVIGRDEEIRRTMQVSLRRTKNNPVLIGEPGVGKTAIVEGLANRIVANDVPLGLHDAKVLALDLGALIAGTKFRGEFEERLKAVINELSRAEGKVILFIDELHTLVGAGATSGAMDASNLLKPALARGEVRCIGATTLDEYRQHIEKDPALARRFQPVFISQPTETDTISILRGLKERYEVHHGIRITDGAIIAAATLSNRYITDRFLPDKAIDLIDEAASRVRIEMDSKPEVIDELERKVIQLKIEAEALKKESDENSKQRLKKINEEIENLNSKFADLNSKWQMEKNKIARIQETAEKLDNARKELELVQRSGNLGRAGELMYGVIPQLENELKNQEKVTDSFLKKEVTGDDIANIVSKWTGIPVDNMMHSEKEKLLNMENEIGRRVIGQKDAIEAISNAVRRSRSGVQDTNKPFGSFLFLGPTGVGKTELAKALAEFLFDDQSALLRFDMSEYMEKHSVSKLIGAPPGYVGYEQGGRLTEAVRRRPYQVILFDEIEKANPDIFNLLLQILDEGRLTDSHGKLIDFRNTILILTSNLGAEIMLKGNVDSVRNEVMQIVKSAFRPEFLNRLDEIIIFHSLTRDDIYKIIDVQFSYLQKTLAKRKLSISLLQEAKELIAQTGYDPEYGARPLKRVIQECIQNNLAKLVLSGEVVENDELIVYALDNEILVKKV

SEQ ID NO: 26707 - protein, 569 aa, Wolbachia endosymbiont of Drosophila melanogaster
MSEAKSLILAAILSMLIMVSWRIIYDNFFSTSQNQPLIENIEHIESFNDLAPIIYQNRSEIINSTREQRVSLTNNMIKGSISLKGARFDDLILTNYHLEPSSSSPQVVLLSPAESKDVYFAEFGWLDPSNKIKVPDSKAVWRADKLNQKEVNLSWDNENGILFRMKINLDDNYMFKVEQVVENNTKDNVVLVPYGKINRKRDNINESYWISHEGVLGAFDNKLEEWTYKDISKKHLIKASTSEKNWFGFADKYWLTAIIPEKSDKINVSIKHTNVNNTDKFQVDFVKPYKSILPGASVSNVNYFFAGAKKLNLLDSYKDTLNIPLFDKAVDFGVLYFITKPVFLLLEYFNFVLKNFGLAILLLTLVIKLLMLSLFNRSYISMFKVKSLQPELTRIKELYKNDSLKQHKETIALFKRNNVNPMSSIFPMLIQIPVFFALYKVLFVTIEMRHAPFFLWIKDLSAPDPTNIFTLFGLFNYNFPISIGILPIIFGATMIIQQKLSEKDQTSKDDIQVNVMKFLPYISVFIFSSFPAGLVIYWIFSNIITLIQQSLIKLFLTKKVVVNVENTNS

SEQ ID NO: 26708 - protein, 542 aa, Wolbachia endosymbiont of Drosophila melanogaster
MSSSQSRNNFFKAVERGDIDAVNRLISEGADVKVENDKGETPLHIAAVWGHKEVVEALLDKGANVNAEDEEGNTPLVLTTDEEIKTLLQSTAKLLEVAKSGNIQEVNSLISEGAKVNVKDQDNKTPLHWAAEKGHKEVVEALLDKGANVDAEDENGDTPLDLATTQDIRTLLQNTDELLKAAGRGDIDTVNDLINQGASVNATDQDGKTPLHCAAKNSHEEVVEALLGKDGIDVNLADKNKDTPLHSVLKKGNIDINVLNALLRKEGIDVNLADKNKDTPLHSVLKKDNIDINVLNALLGAKEINVNAQDKDDRTPLHLAAKKDNIDINVLNALLGAEGIDVNIKDKLAEQTPLHWAVVKGHKEAVEALLGKDGIDVNIEDKHGNTPFKLATDEGIKTLLQPAEKSDDGSAGGSSTDSEGGQEEEKRVGDDTELQSDNSKEGEKTSTTSAEQGTDVQDNDVGPVASTEPAQTEEQPSSFFGSLFSILMKPFSLIASFFGGFFHGCLGLTKKSLTHNLMMILLHLGSINQLNKIMVIIMTRAM

SEQ ID NO: 26709 - protein, 568 aa, Wolbachia endosymbiont of Drosophila melanogaster
MRSNIRQLFYYIKPNLSYFVIAFIAVLFSALTILLFGRGLSNIIDSGTEHDFTTKLLVAILIVLAISLTAFTRLYFIGIGSEKVIARIRYDLYSSITNLQPSFFENTGVQDVISALITDTSVLQSIINSSLLTILRNFVILIGSVAMLLYTNIQLTAYAAAIIPILLIIMTSLGKKVRSYARFAQDKLSELASFSEENFRSIVTIKSFVLEENEKTRFKEYLNSVSKSYVKLVLLRAILVTLVITCVIGSLVVLLFFGIKEVLSNNITIGELSSFVFYSALAAGAINNLSDNISDLQRGLGIVERLFEFKNMKSSIVDADDPIKIYSVQKGISFNGVTFFYADKPALDNVSFSIEAGQAVSIVGPSGSGKSTILKLLLRFHDPNKGSITIDGHNIKSIALNDLRSLFGLVPQDHMIFSCSIMENILYGKPGAEYEEVKQAAISAYAMEFIDKLPDKFDTFVGKRGLKLSEGQKQRIVIARAILNNPQVLILDEATSALDYKSENLVQKALSKLMQNRTTIVITHRLSTALKTDKIIVINHGKVEEVGTHDFLMSKDGLYAKLAKIQWN

SEQ ID NO: 26710 - protein, 107 aa, Wolbachia endosymbiont of Drosophila melanogaster
MSNFEQIKKDITENDVVLYMKGTSDFPQCGFSGLVVSILKKLNVKFKYINVLENDEIRESIKKFSDWPTIPQLYIKEEFIGGCDITREMYEKGELQSLLKEKKIIAE

SEQ ID NO: 26711 - protein, 340 aa, Wolbachia endosymbiont of Drosophila melanogaster
MGFIDEVKLCLKAGDGGDGCASFRREKFVEFGGPNGGNGGKGGNIVFISDANLNTLLHFRYRRHIKADSGKNGAGRDRSGTAGKDVILKVPVGAQIIDEESEEIIVDLDKPGMEFQVAQGGKGGLGNTNFKSSTNKAPRHFTYGQPGEEKHVLLKLKVLSDVGIIGMPNAGKSKFLTRCSNSDTKVGDYPFTTVRPHLGMVKVDDSEVVIADIPGIITDAHLGVGLGHKFLKHIERCQILLHLIDVTHDDVVLAYSCIHNELELYNSDLVEKEEIVVLNKCDLLREAEILEKKNHLANYLNKEVLCLSINGDLQPILRLLSEKLKKSNSKEIDVYDPFKA

SEQ ID NO: 26712 - protein, 213 aa, Wolbachia endosymbiont of Drosophila melanogaster
MEIFLDSVDLNEIKGLKEFIDGITTNPSLIAKSGRKDKYEDLVREICSIIKGPVSVEVVADSHEEMITEGLNLAKIADNVVIKLPLTHEGLISCKKLWTEHKIPVNITLCFSPGQALLAAKVGACFISPFVGRLDDISYDGLSLIEDICTIYSNYGFDTKVLVASVRSPAHVIEAARLGADSITVPAKVLRQLVNHPLTDQGLAIFEKDWGVK

SEQ ID NO: 26713 - protein, 378 aa, Wolbachia endosymbiont of Drosophila melanogaster
MSPFSLENSGCVYADYNATAPISENVKKSIFEVLLKQTLNPSSLHKRGQEARKILQDARDNVRGAIGVSSDKEIVFTSGATEANNLVMRGIAGYLHIISAIEHPSILNSACNPYIIPVNQEGIVDFLELEKILSELKGNKAIVSVMMANNETGVIQPIEEIAEIAHKFGAICHTDTAQSVGKIKVNMEDLGVDLLTLSAHKFGGVAGSGVLIFNKELAIEPIIIGGGQEKGFRGGTENIVAIAGLSAALQNIPDLLSKMDEVKELRDQLECELLNLASDIRIFGKNSKRLPNTSFIYMPGVKSDVQLMHFDLNHIAVSNGSACSSGKVEPSHVLLAMGATKEQAECSIRISIGPETKPQDIKKIVDCWYNIYKQNTLV

SEQ ID NO: 26714 - protein, 640 aa, Wolbachia endosymbiont of Drosophila melanogaster
MGRAIGIDLGTTNSCVAIMQGKDTKVIENKEGARTTPSIVALTSSGERLIGAPAKRQATTNASNTFFATKRLIGRQYSDPEMKNLSVPYKVFAAKSGDAWVKTTDNKEYSPSQIGAFILQNMKEAAEAYLGEEVKDAVITVPAYFNDSQRQATKDAGKIAGLNVLRIVNEPTAAALAYGLDKKHGHTIVVYDLGGGTFDVSILEIGDGVFEVKATNGDTHLGGEDFDNGVVSYLLDEFKKSNGIDLKNDPMAMQRIKEAAEKAKIELSSAMETEINLPFITADASGPKHLNMKLTRAKLESLVNDLIERTMAPCKKALEDAGLSASQIGEVVLVGGMTRMPKVIEKVKEFFGKDPHRGVNPDEVVAIGAAIQAGIIQGDVRDVLLLDVTPLSLGIETLGGVFTPLIERNTTIPTKKSQVFSTAEDNQTAVTIKVHQGERKLAVDNKLLGQFSLEGIPPAPRGRPQIEVTFDIDANGIAHVSAKDKATGKEQKIRIQSSGGLSDNEINRMVKEAEEKAQEDEKRKKFIEVKNQADSLVHSTEKSLTEYGDKVSPEDRSAIENAVNELKEVSKSDNIDDADSIQQKVTNLSQLSMKLGEAMYQTSQQNSAENGFSSEGNPNDKEEKVVDSDYQDIDNKEENK

SEQ ID NO: 26715 - protein, 388 aa, Wolbachia endosymbiont of Drosophila melanogaster
MDKIIIKKFGGTSLTDLNRVANLIKNDIEKGCNVIVVVSAVAGFTDQMVFQARQISNLSYRQELSEYDVMLSAGEQISCGLLAITLQSIGVNAKSWLAWQLPIVTDDFYSESKIKTIKIERVKRSFAEGYTAAIIAGFQGINDDRITTFGRGGSDISAVAFAVAFGVRTCEIFTDIDGIYTADPRIVPKARKLKFISYDEMLEMSSSGAKILHNRSVQLAMKHNIKVQVLSTFKEVEGTTVLHKRDVLERYLITGITYSTNEALVTFTNLANNLRTLRDIAGANVKIDMIHGSSFVISKFDIDLMEKLLNKNENYAINDNVAKISIIGIGVMSNTEVMHRTLKVLSEKKIEILAITTSEIKISIIVQKECAVALVKDLHTEYELDMQH

SEQ ID NO: 26716 - protein, 415 aa, Wolbachia endosymbiont of Drosophila melanogaster
MNVESKKIHDAKIKLPIFLDYQSTTKVDPRVLEVMIPYFGEFSNAHSRSHSFGWTAEEAVEKARKHIADLVNADSKEIIFTSGATESNNTAIKGVAHFYKNKGNHIITVCTEHKCVLDSCRHLENEGFKVTYLPVKQNGIIDLSKLEEAITDKTILISVMMVNNEIGVIQPVKEIGKICRKHNIFFHTDAAQSFGKVPIDVNEMCIDLMSLSSHKIYGPMGIGALYVRRKNPRVRLIPLISGGGQERGMRSGTVPTPLAVGFGEAARIAREEMKKETTGVEELRDILYNKIKEAFPDIVLNGDYENRIPGNLNLSFPYVEGESLIMAIKDLAVSSGSACTSASLEPSYVVRSLNNGHDLEHSSIRFGLGRFTTREEVLYAADLVAKNVGRLREMSPLWEMVQEGVDLNTVKWDSH

SEQ ID NO: 26717 - protein, 397 aa, Wolbachia endosymbiont of Drosophila melanogaster
MSDLAKRMSLIKPSPTIAVTDKANKLKNEGKKICVLAAGEPDFDTPDHIKKAAIQAISEGKTKYTAVDGTRELKEAIINKLRKDNNLEYTLNQICVGTGAKQVLFNLFMATINSGDEVIIPAPYWVSYVDMVSLFGGLPVVVECKQNFKLTVELLKSRITKKTKWLILNSPNNPAGAVYTCDELKDIAQILLEYPHMNVVTDDIYEHIIYDEKFFTIAQVEPKLYDRVFVVNGVSKAYAMTGWRIGYIAGRSDVVKAISTLQSQSTSNPNSIAQAAAAAALNGDHSFLKERTRIFKSRRDFMVKELNSAPGLSASVPQGAFYLFVSCEGLLSKSTKSGKIINNDLDFTEYLLGDHLVAVVPGIAFGLENFIRISYATSQEQLEIGCDSITKACQELK

SEQ ID NO: 26718 - protein, 460 aa, Bdellovibrio bacteriovorus HD100
MAKLVVSKFGGTSMGDADCMLRSAEVSFRQGSGLVVVSATSGTTNDLIALGKTAESQAWSESEKILSKIQDKHNKIAQDLKLPADAKAKLETLFEEMSSLAKGMHLLKDCSVKAMDTLMSLGERMSSVLFTEAMSQVLKKHGSAKSAELLDVRTVLRTDDQFGKAKPLTNDVANLCQKNLSFLREGKKVMCTQGYIGMTEEGITTTLGRGGSDYSAAILAEGVSADVLEIWTDVAGIATTDPRLCPKAQPISEISFKEASELATFGAKVLHPATLLPAIRKNIPVFVGSSFDVEARGTWVRMDVEDHPLIRAMALRKKQVLVTLSTPEMLYAHGFLFQIFKIFNDHKVSIDAITTSEISVSVTLDDSTLLNKNLIKDLSQIADVQVEENLALISLIGNNINHTPGLGKRIFETIPDINVRMICLGASKHNFCFLVADEQGPEVIKRLHACFIEAGIEEMA

SEQ ID NO: 26719 - protein, 573 aa, Bdellovibrio bacteriovorus HD100
MMSPEIKKLLGELKQYKSTLYIVAATGILNALATTQLAYMIKGLFDGLSANQQQAMATLVPMALGLALVQATSRYFHIYLMNYTAERVVQGLRQKLQQKFMRLNLSFHNNYAAGSGGLISRILNDIRIIQDGLRVVADIFLYPLMLVGLLINLIRIDWKLTLATFLIAPVIAVILKNIARSMRKYIPQERDVMEYMTSTIKESLDGVRIIQSFNLEKDMGERLIKESDKYLGIRKTIYKRQEASGPVTEFLATAIVLCVFMYVSYEIAAGRSTPGTFVGFVASLLMINQPIKRVQEAYVRIQEVTISLRRIFEIIENESEVPQVANPVPFPKDWKKITYKNVSFSYGKEMILKNLNLEINRGEVVALVGASGSGKSTIVNLLERFFDPTSGEILIDGVNIHDIGLKDLRRNVALVTQDVFLFSDTIEKNIWAGDYNRTREDIPAMAKLANAHDFIMKTPHGYQSRVGDRGNLLSGGEKQRISIARAMFKDAPVLILDEATSALDTASEIEVQKGIDHLMEGRTALVIAHRLSTIQKADKIVVMKSGEIAEIGTHKDLMSKEGEYFRFHSLQHT

SEQ ID NO: 26720 - protein, 252 aa, Bdellovibrio bacteriovorus HD100
MNLLEIKNLHARVEEKEILKGLNLTVKPGEVHAIMGPNGSGKSTLSKVLAGHPAYEVTSGEVKYEVNFNMTNLLDLEPDERAKEGIFLAFQYPIEVPGVSNFTFLHTAFNSVLQHQGSEPMPEGEFREFLYQKMKLVSMKPEYLDRPVNTGFSGGEKKKNEILQMAVLSPRLALLDETDSGLDIDALRVVSEGVNKLRRKDNAIILVTHYQRLLDYIKPDFVHVLANGKIIETGDSSLALKLEEKGYDWLTV

SEQ ID NO: 26721 - protein, 351 aa, Bdellovibrio bacteriovorus HD100
MSEKTVKFDPTTTISAEFGIFGIPMTEEESKVVLVPVPWEVTTSYGEGASRGPQIIRQASEQIDLFDIEVGKAYEVGYHMRDFPQDLCNMNDKFKAVAQELIGMRTNMSEDEAKMNKLASQVNEACEEMTQWVYDQCSDVLKKGKLLGLVGGDHSTPLGAIRAVSDKFKGEFGVLHIDAHADLRTAYQGFKQSHASIMYNVMTDAKKPQKLVQVGIRDFCEEEYDFSNSREDIKTFYDLELKRRMLKGETWEQVCKDIIKELPQNVYISFDIDGLDPAFCPHTGTPVPGGLSVDQVFFLFREVHASGRKIVAFDLNEVSTGGLPEGEVEWDGNVGARILYKMCGWLVKSNA

SEQ ID NO: 26722 - protein, 393 aa, Bdellovibrio bacteriovorus HD100
MEKIVFISGKRTPFGAFGGSLKDVSATDLGVAAAKATLEQAGLSADKIDHVVFGNVVQSGADAAYLPRHIGLKTGVPVAVGAFAVNRLCGSGFQSWVNAVQMIQCGEATAVLAGGVEQMSQIPYVARKVRFDGMRMGNFELEDLMTSALTDAYAKMPMAITAENLAVKYGITREESDKYSIQSQQRFQAAVEKGFMKQEICLVTVEGRKGTVVIEKDEHPKPDSTLEKLATLKPVFKKDGIVTAAAASGIVDGAACSLLMSESKAKELGMKPMARIVSYASVGCDPTIMGIGPAGAARLALQKAGLTLDQMDLVEVNEAFAAQYLAVEKELKLDPAKTNVNGGAIAVGHPLGASGTRIMNHLVYELHRRNAKYALGSACIGGGQGIAIIIERI

SEQ ID NO: 26723 - protein, 400 aa, Bdellovibrio bacteriovorus HD100
MIQLSKRAQNLKPSPTLFLVAKAKELAAQGHDVISLTVGEPDWPTFKGASDAGIEAIQKGITKYTPANGTVELRKSISEKLKSELGFEYSPKEITVASGAKYIIFSALQMICSPGDEVVIATPYWVSYPAMVELADGVPHIVECGEMENFKITPEKLEAAINAKTKGFLFCSPSNPTGLQYSADELKALAEVLRKHPQVVIISDDIYNRLVFDGTKVAPHILTVAPDLKDRTVLVNGGSKAYSMTGWRIGWASGPERLITAMADYQSQSTGSPSSISQHALLAAIKTSEADIKGVVDKLVARKNSGLKELETVPGFKTAEPQGAFYFWVDIRAHLGKSYQDRVIRTSKDFCDVLLEKFFVATVPGAECGTEGFMRLSFAVSEETMKRGVARMKDLVSQLV

SEQ ID NO: 26724 - protein, 326 aa, Bdellovibrio bacteriovorus HD100
MSKVIQQGLKVLEVEAQAILALKERLGDSFEQVVKMITACDGKIVLTGMGKSGQIARKLASTFSSTGTPAVFLHPAESSHGDLGLVENNDVVIALSYGGESPEFAGILRFVSRKGIPLIAITGKPESSLAKAAQVTLNVHVSEEACPLGLAPTASSTATLAMGDAVAMAVMAEKGFSSEDFAEFHPGGSLGYRLLTRVRDVMHGGDALPTVTLDTPIRQVFSIMTHKDVRGAAGIVDEKGDLVGVITDGDIRRRLEKSNDPLTGLAKDLMTTNPRTIDANELAEKALFVMEQFQIQMVFVLDKESSNPRKPVGILHIQDLLRAKVR

SEQ ID NO: 26725 - protein, 397 aa, Bdellovibrio bacteriovorus HD100
METSTERPMGKTLQQDTGIYLDYNATTPVDPRVYSTMEPYFKEFFGNPASAGHHWGWIAENAVAKARTQVASFIGCKSMEVTFTGGATESNNWVIFGLISKLREENPEAPIHFITSNIEHSSIMKGMAAAQKMGVEVDFLPVNKFGVVELEAVKAAIKPHTKLMSFIWVNNEIGSINPIPEIAALCKEKQIYLHTDATQAVGKIPVNVTEMGIDLMSFSGHKIYGPKGVGALYIRGKDPKVQLNPLIYGGGQERGLRSGTVNVPAVVGFGTACELCQQNFTAEVQHMKDLRDFLWSELQQNIPGVKLNGHPTDRSPANLNITLPGIKTEQILPRLQKLGVSTGSACGTGAMVVSHVLKGLGLSTEEVQCSLRLSLGRWTTQDELSRAAQILKQAIQK

SEQ ID NO: 26726 - protein, 637 aa, Bdellovibrio bacteriovorus HD100
MGKIIGIDLGTTNSCVAIMEGGEPKVLVNEEGARTTPSVVAYTKDGDRLVGQIAKRQAVTNPENTIYSAKRFIGRRFEEIQEEIKLVPYTVVAKGNDCAFKVQGKTASPEEIGAAVLAKLKKVAEDYLGEPVTEAVVTVPAYFNDAQRQATKDAGRIAGLEVKRIINEPTAAALAYGMDKKKDEKIVIYDFGGGTFDVSILEVGDGVVEVRATNGDTHLGGDNFDTVILEWLITEFKKDQAIDLKNDKMALQRLKEAAEKAKIELSSAQETEINLPFITADQSGPKHLQTRLSRAKFDQMTEDLVKRSMEPCRKALADSGLKASEIDEVVLVGGSTRIPAIQKAVKDFFGKEPNRSVNPDEVVAIGAAVQGGVLAGDVKDVLLLDVTPLSLGIETLGGVMTTLIERNTAIPSKKSQVFSTAADNQPAVDIHVLQGERKMAGDNKTLGRFELVGIPPAPRGVPQVEVTFDIDANGILHVSAKDMSSGKSQQIKITAQSGMSEDEIKRAVADAEGHAEEDKRKAEAATQRNNLDNLVYQTEKLIKDSGAQLPESEVKSANEAVAEAKKILENKSASGDELKGAFERLQNLTHKLTSELYKKQGAQPGAEGQQADAAEGGEASANKGGDDVIDADYKDVN

SEQ ID NO: 26727 - protein, 564 aa, Bdellovibrio bacteriovorus HD100
MYWYAMSKPNKTPVDAPNFLKQIIEKDLETGKVKGEVVTRFPPEPNGYLHLGHAKSICLNFGLAQEYQGRCHLRFDDTNPETEETEYVESIQEDVKWLGYDWGQHLYYASDYFEQIYQWAEQLIKDGKAYVDSQNEEEVRKNRGDFTTPGKDSPYRNRTVEENLDLFRRMRAGEFDEGQHILRAKIDMQSPNMNMRDPLLYRIRKAHHHRTGDKWCIYPMYDYAHPLSDAMEHITHSICTLEFQDHRPFYDWCVQNVPVPAEPHQYEFARMNMTYLVMSKRKLLQLVKEKLVSGWDDPRMPTISGVRRRGYTPESIRRFAKRIGVAKSESIIEYDILESCVREHLDETAHRAMAVLDPIKVVIENLPDGHKELIETSVHPKNTELGNRSLPFTKEVYIDAADFMENPPDDYFRLSPGKEVRLRNAYVIKCKDVVKDASGKVTELRCEYDPVTLGGKPTADGRKVKGIVHWVSATDCVDAEVRVYGRLFKVADPENVPDGQDFKVNLNPDSLKVIKNAKLEKGLKDAKLENRYQFERVGYFCLDSKDSKPGALVFNRVVELPSSH

SEQ ID NO: 26728 - protein, 468 aa, Bdellovibrio bacteriovorus HD100
MKSRILVVDDEESIREFLEIMLKKEGYEITLAEDGQKAKDLLAKKTFDMIISDLQMPHVTGIELLKHVKESYPDTVFMLITAFGTTETAVEAMKMGAYDYLTKPFKIDEVRLNIQNALRSRNLEVENRSLKKELVKEYSFQNMVGNSPVMHAIYDMVKRVSQTPTNVLITGESGTGKEVVAKAIHYNGPLKDRPFVTVNCGAIPENLMESEMFGHKKGSFTGAVADKAGLFEVADGGTLFLDEVGELPLTIQVKLLRAIQERVIRRVGATEDMKVDVRIIAATNRNLEEMVQKGGFRQDLFYRLNVINIKTPGLRERRDDIPLLANHFLKKYNERLNKNIGAISADAMEILKKYDYPGNVRELENMIERTVALEGGATILPESLPPMVNTSSGRKMASSNEIEIGDDGVDLDKVMGQIEKELLIKAIHSAGGVKKRAAKLLHISFRSMRYRIEKYNLGVVGDDELDDE

SEQ ID NO: 26729 - protein, 657 aa, Bdellovibrio bacteriovorus HD100
MAATDVDVFCNAVRVLEPTFGGINLEDIKAPECFEIEERLKKEMNIPVFHDDQHGTAIVSGAALLNACSITNRKMETVRIVVNGAGASANSCAKIFIALGARRENIIMCDSQGVIYKGRTAGMNKYKEYFASETEARTLTEALRGADVFVGLSVAGALTPEMLKDMAKDPIIFAMANPEPEITPDKARAARPDAIIATGRSDYPNQVNNVLGFPSIFRGALDTRSTQINEEMKLAAVHALAKLAREDVPDKVSATYGGKSFKFGRDYLIPKPFDTRVLLWVAPEVAKAAMKSGVATRAIEDWDQYRESLEALQGPSKVFIRSAINRVHQNSAANGGELPRIVFPEGTSTKVLKALATLVEEKICQPILLGYPERVKEKIKALDIPLLNDVSIVHPSSHPKYFSFVEKLYSLRQRKGINLGEAERLMADPNYFAAMMVNQGEADGMVSGSSINYADAVRPILQTIGVYKEGIPAGLNFVLLEDKFLVLADTTVNLNPTAEQCAQIALQAAKIVEYFGIEPRVAMLSYSNFSGAEGTPRKMKKAAEIARSLRPDLMIEGDMQADTAVNPEIMERLFPFSGLKGGANVLVFPNLESSNIAYKLIQQIGKAEVIGPFLTGVRRSANVLQRTTTVDGIVNSVVFTALEAQYIKEVLKSRGKK

SEQ ID NO: 26730 - protein, 447 aa, Bdellovibrio bacteriovorus HD100
MKSPRDVVLVEGVRTPFAKAGTKLKKVHPAELGKVALKQVIAQTNLDVNLVDEVIIGNTGNPPDSVNISRVVALNAGIPLKTSAYTVHRNCASALESISNGYEKIKSGTMDVILAGGTENMSQMPTLPPKKFQEIYEKLFAAKGPKQALPLLWSLFKADVKQIKALLSGNMRDEYFPVISVMMGLTDPFVGINMGQTAEILAKEWGLSRETQDKFALRSHQLASKAMKEGRMREEIAPVYLAPEYKEVISEDIGPRDTQTMEALAKLKPFFDKATGSITAGNSCPITDGAAMVLMMSREKAEALGYKPLATIRSYGFAGLEPERMGLGPVYSTPVALKRAGLSMKDIGLVELNEAFAAQVLSCQKAFDSDKFGQEKLGLSSKIGEIRDDILNVNGGAIALGHPVGATGTRIVLTLAKEMKRRNTQFGLATLCIGGGQGGSMILENEG

SEQ ID NO: 26731 - protein, 412 aa, Bdellovibrio bacteriovorus HD100
MLVFYATGMILGAGVYSVIGKAAGVAQEGLWLSFILAALAAVLTALSYAELATLFPKAGAEYVYMKEIFPQRKILSFLCGCLMIFAAIITASTVSLSFAAYTQDFFKAPEMLVAIVLLGFFTLVNIWGVRESGWVNIVFTLVELSGLVIFIFVGLRQPDFGKVLSVPVSWGVVTGASLIFFAYLGFESMVNLAEEAKKPDKNIPRAILLSLSLTTVVYVAVSLAALAMMSPGDLQKSDAVLSAALQKHSPEAARALAGIALFATANTVMIALLGASRISLGMARGRDLPKVFSKILPQRQSPWLSSLLVFLLALLFLPLKKIEVLASVSSFVTIVVFIIINGAVVYLRRKEPQRKRPFRVPGAVAGWPVLPILAAGMALFFLFNFEEQVYYVGVGIVIFVLVVYQALHFRRA

SEQ ID NO: 26732 - protein, 645 aa, Bdellovibrio bacteriovorus HD100
MRSTQKTLALWFFLIIMAVFLFQAYESKQQKAIADFNFSKFTEAVKAGEVATVTFRQDTSEVVGEMKPEFEKKYNGTHFSIVGNTQDEGYKFLQQHGITPNYERADNGGFFQSLLVNWLPLILIVAMFLFIMRQIQAGGGKAMSFGKSRARLLTEHKNRVTFKEVAGVDEAKEDLQEIVSFLKDPKKYTKLGGRIPKGVLLVGSPGTGKTLLARAVAGEAGVPFFTISGSDFVEMFVGVGASRVRDLFEQGKKNAPCLIFIDEIDAVGRHRGAGMGGGHDEREQTLNQLLVEMDGFESSEGVIMIAATNRPDVLDPALLRPGRFDRRVIVNKPDLKGREQILAVHMRKTPLGPDVDASKIARGTPGFSGADLENLVNEAALVAARSDKKYLEMEDFEKAKDKVTMGAERRSMVISDEDKKVTAYHEAGHTLVGKKLVGLDPIHKVTIIPRGMALGVTQTLPEKESVSLSKSKAENMIAFLFGGRAAEELIFKDITTGAGNDIERATEIARRMVCEWGMSKLGPLAYETRDNPVFMGMGYGNKSKEYSDAKAQEIDTEVEKIIKHGYDISIQILRDHQDALERLTQALLEYETIDGHEVDMLVNGAAVAEIEKYRNAKKDSNAAIMNAAEKKGSGDPVGNTGPVTI

SEQ ID NO: 26733 - protein, 401 aa, Bdellovibrio bacteriovorus HD100
MIQTKVLHYFDHNATTPACKEVLESLPEFAQAWGNPSSIHWGGRQPKNILRDARKAVAEMVNASPLEIIFTSGGSEANNTVLKGLLEYYQTAQFLTPEQRKRTHFMSSEVEHPSIMKTMQHLKDLGARVDFIPVNRQGQIDLKFYEEHLSEETALVSVMFANNETGTLFPIKEMAEMAHKKGALFHTDAVQAFGKVPVNLKELNVDFASFSGHKFYSVKGTGVLYAKKGNNVTPLIHGGAQERHRRGGTENTLGIGALGVVAKRAPMIAEKAKALAVLRDHMEARILSEISEVTVTAGETPRLPNTSSLVLKGADGETMLMSLDIKGYAVSTGAACSSGNPEPSPVLLAMGLTRDEAQNSLRVSLGWDSTLEQVDSFVDTLKTVVDRLRSLNDDKGETCHV

SEQ ID NO: 26734 - protein, 303 aa, Bdellovibrio bacteriovorus HD100
MSYKAGFLGLIGQPNAGKSTLMNFLVDEKVSIVSSKPQTTRRRILGIWSTEKGQVIFVDAPGLIKADEGLNGFLAQEAHDVINSSDALLAIIAVDEEKPENAEKVIDLVSKSGKPWIAVITKTDIEEKAHRVMILRKMVEDKGGKAFSVSVKDSKNDQEEREALLIEFMELLPESPAPLYDTELFTNENVREMAAEIVREQCFEALHHEIPYSIAVRIVKFEEDAKPVPKIYAEIVVSKDSHKAIVIGKGASVIKQIGMEARKEIEKLMGEKIFLDLNVASKPEWFSNKRMMKELGYVVDSKD

SEQ ID NO: 26735 - protein, 391 aa, Bdellovibrio bacteriovorus HD100
MENVVIVSSVRTPVASFQGGFASVPAPKLGAAAIKEAITRAGVSADEIDECIMGEVLTAGVGQAPARQAALGAGLKNSTPCMTINKVCGSGLKSVMLAADSIALGHTKIAVAGGQENMTLAPHLLENSRSGYRMGPTQMTDSMIKDGLWDPYNNFHMGNAAEICVKEHNFTREEQDAFAIDSYKKAQDAWAKNVFKNEIAPVVVEGRKGAVTVDKDEEPFNTNFDKIPGLKPAFDKAGTITAANASKINDGAAAHVLMSESEAKKRGIKPLAKIVAHATFAHEPKYFTTAPVGAIKAALNKANLKVGDVDLWEINEAFAVVTQVAMKELEIPASKVNIHGGAVAIGHPIGASGARILATLVHALHTHNKRYGLATLCIGGGEAVALIIEKA

SEQ ID NO: 26736 - protein, 514 aa, Bdellovibrio bacteriovorus HD100
MSASTQFIRREGLEAEMRREFYIAFAVAVGLNVLFYLYWTPGLYSLFLFVPFFLLGFRDLHQNRHAIKANFPVFGHFRYILESIRPEINQYFIESNTDGKPFNREQRSVVYQRAKKVLDTVPFGTQHNVYAQGYEFVTHSMYPKHVDRKDLRVTIGTDLCKQPYSMSLLNISAMSFGSLSTASILALNGGAKDGGFAHNTGEGGISPYHLEPGGDLIWQIGTGYFGCRTHDGDFDPELFKKNAAHPQVKMIEIKLSQGAKPGHGGMLSGKKVTQEIANIRNVPMGKDVISPPGHKAFSDSRGMLAFITKLRELSGGKPIGIKLCLGHRNEFEELVSLMSVEKIYPDFIVVDGAEGGTGAAPLEFTNYIGMPGMDALVIVVDTLKKAGLKDKIKVIATGKITTAFDIIKLLCLGADATYAARSMLLALGCIQALRCNNNKCPTGVATQDPNLVRGLHIPTKRVRVKNFHQETLESVAHVIGAMGVARHQDLNRSHLYKRVEDDTIKTYAEIHPGV

SEQ ID NO: 26737 - protein, 240 aa, Bdellovibrio bacteriovorus HD100
MSAARTIYHMRVEEIIDHTPTVRELVLKTETPNEFGFKAGQFVMLHVPQGEAKPALRAYSIASDDRTKNGFRLLFKFVENGLASTFVWQLKGGELLNFTGPFGKVFFQEPPTEQIVFLNTGTGLSQHLCYLLSKKDQYPNLRYRMLFGVRTEKDMYYQKEIEELQKALPDFKFEFVLSRPQDDWKGKKGYVQNFISEFDYKNIPTTFYLCGNGGMIKDVKHQLLEVDGFDKTRIWAEAFD

SEQ ID NO: 26738 - protein, 368 aa, Bdellovibrio bacteriovorus HD100
MIIGVPKEIKISENRVGLTEAGVRQYVSEGHTVIVEKDAGVGSGISNEQYEKAGAKIIDTKKEVYAKADMIQKVKEPLPDEYELMKENQILYTYLHLAAEAKLTKVLCERKVKAIAYETIQLDNGSLPLLTPMSEVAGRMATQIGAFYLQKDHGGKGILMGGVTGVKPAKVTIIGGGVVGTNAAKMAVGLGASVTILDVNTARLEYLDDIFQGRCMTLFSNAKNIEDSVKESDLVVGGVLITGHKAPTLVSKEMISSMAKGSVVVDVAVDQGGCIETCRPTSHTSPTYEVDGVIHYCVPNMPGVVPRTSTYALTNVTLRYGSMIAAMGVEDAVAKSPALLKGLNVYGGHVVYEPVARDLHMEYKPYKI

SEQ ID NO: 26739 - protein, 257 aa, Bdellovibrio bacteriovorus HD100
MTNISNSPWVENFHITSLLVNPLGRLGLYGLLNLLQETAWIHAEKMGFGLLDMEKQGLFWVLTRQSLQMKTWPRFGENIQIQTWLRAPEGAFVAREFAILNQSGEEIGLCSTSWLALDRQSKKILPADNLRPWDQIAHARSTGINPEKIPVTGTYEKIAKYRVRNSDLDINQHVNNTKYAQWILDAIPYDLHKSLKLNTYSVNFLAETHLGDEVEVHRNCSSPDVQLASHGASAYKGLRVGDEKVLFTAVLGWEKRK

SEQ ID NO: 26740 - protein, 394 aa, Bdellovibrio bacteriovorus HD100
MTLTAFQTVALAALVVYFGRYIKSKIHVLDKYNLPSPVIGGFLVAVVISVLKAQGLFVLQFNKAFEEALMITFFTSVGYSASVRLLKEGGRAVVFFLLLTIGGLLVQIVAGIGLAKMMGEHPLMGVLTGAVSLTGGPGTALAFGPVFEAAGVEGASVIGVTTAMGGIVLGGLIGTPLATYLINKKKLKHPVDHDRGAQHESMMLKSFAGRDLLMHLLALTLIMGIGTTISSWISSLQITLPIYIGSMVVAALFRNIEDIKPVFKISPEWIEEIGSVALTLFIAMAIMSLRLEELKNAALPILVFLTVQAILVAVTALGPVFWVGGKDYEASVMSAGYVGFMMGTTANAMANMHSLSQRYGHAYKAFLVVPLVGSCFIDFINAALVTFCINMFGN

SEQ ID NO: 26741 - protein, 315 aa, Bdellovibrio bacteriovorus HD100
MMKGLKIFSANANPTLAKKVAEAAGVELGYCEVSSFADGEIQVEIHESVRGQHVFVVQSTCPPVNQNYMELFVMLDALRRASAASITAVIPYYGYARQDRKVAPRAPISAKLMADLLTTAGADRVVSVDLHAAQIQGFFNVPVDHLFAIPTLARAWRDAYGQGSEFVAVSPDAGGVERTRAFAKRIESSMAIIDKRRSGPNEAKALHLIGDVTGKTAVIVDDMIDTAGTLTQAVDSLYKNGAKRVFAVATHPVLSGPAINRLKESPIEKVWVTDTIPLSEAAKNCGKIEVVSVAPVLAEAMKRIHGNDSVSSLFD

SEQ ID NO: 26742 - protein, 101 aa, Bdellovibrio bacteriovorus HD100
MATTHERIDQIVKGNKIVLFMKGTQQFPMCGFSARACAILQDMGVQFHDVNVLDDDEIRQGIKEYGNWPTIPQLYINHQLVGGSDIMMEMYQSGELQELLK

SEQ ID NO: 26743 - protein, 319 aa, Bdellovibrio bacteriovorus HD100
MKNTLLFSFLPPASVLERALSQFKATISAKELSVEEMLDQVHKIQPAAIVVVPRQKITAEVIKALPDSVKIIATSSVGFDHLDIAAAKERGILLSNTPDVLTECTADLGMMLLLNACRRGREYLSIMQEGWRKTYSQTDMLGLQVSGRTLGILGMGRIGRALADRARGFGMKIIYCNNKRLPPELEKDAVYFKNFHDMLPHCQIISLNAPNTPETKGIMNSKSFSLLPKNAVLVNVARGTLVDEDALIKALESGHLFAAGLDVFCHEPDYNLRLRDFPNVFLTPHMGSATVETRSAMGHRALDNVTAALEGQRPGDFLY

SEQ ID NO: 26744 - protein, 323 aa, Bdellovibrio bacteriovorus HD100
MKALKNPALTLLCLAVLGLGLDFGVNAYIKLILLFATVNCLLSMSLNLVNGYTGQFSLGHAGFMAIGAYFSAYASTKWGFLPESLQLLQSFVFVIGAGLAAAVAGFLVGLPSLRLKGDYLAIVTLGFGEIIRVALLNMDFLGGPRGLSGIPSFGSFPFAFMFASVWLVICFFTIWRVMHSSHGRGFLSVREDEIAAEAMGINTTRMKVKAFVLSSFFAGVAGALFAHFTNFINPSSFTFLQSVNAVIMVVLGGMGSMTGSIVAAVIITVLPEALRPLQELTGVDLRMVIYSLALILMMILRPKGLFGDMEFSDVWRKYVRRSA

SEQ ID NO: 26745 - protein, 315 aa, Bdellovibrio bacteriovorus HD100
MRSTMEYKPLSGREFPRFSAIKTFFRLPYVTIEADYEVGIFGIPYDGGVSYRPGGRFAPAKVREVSSLGRGFHMTRMENFFENLKVADIGDCPTVPIDQKQTYEKIEKFVGEVLSHNKRFLAVGGDHSTTLPVLRALRKKYGKPLAFIHFDAHLDTYPAAWGQEYHHGAFARHAVEEGLVDPKKMVQIGIRGPLAGGDDLNFVNKHGIRVITVDEIRNQPITEFLKTLPTFDETPTYISYDIDNLDPSCAPGTGTPVPGGLTTYEVQRIFRALKIPNLVGGDVVEISPPFDHADITALAGMDALFEMLHLFPTKK

SEQ ID NO: 26746 - protein, 229 aa, Bdellovibrio bacteriovorus HD100
MAKILIVDDQKSVLLTLEALLIKDNHLVTACTNSIDALDKLTNEHFDLMITDAIMPGGATGYALIRTVRSNPQLAQLPVILLTGKREKADIERGIESGANDYVVKPVDPELLSAKIQNLLAKSEKDTAHFVEAPVHVKAEWETKTDIMAVSELGMTIKSNIPMPLGMVTRISSSLYDDIGISKLPLRITACEEAKTATETFYRIQVHFVGLTEKELTPLRLWIRSKKTF

SEQ ID NO: 26747 - protein, 124 aa, Bdellovibrio bacteriovorus HD100
MNISLLRTKIHRATVTGADLNYEGSVSICPDLIKASGLLMNERVDIYNCNNGARFSTYVIKGKKGEICLNGAAARHVQKGDLVIICSYCGLSMDEAKKHEPTVVFVNAKNKVTEKRKEDRKNNK

SEQ ID NO: 26748 - protein, 204 aa, Bdellovibrio bacteriovorus HD100
MQSGIYHWLNSGSWRYYMYAIIRTGGKQYKVQAGDVVQVDKLEQALGAEFEINEVLMVGGESTAVGQPLVKGAKVTVVVTKQAKTRKEIVFKKKRRQGYRKFATHKQEFTELFVKAISFDGKTAKSDEAATVVDVKAVRAEKAQARVAARKERAANKGPAEVVKKAAKKVAKKKVAKKAVKKTVKKATKTGAKKKAAKKTSKKA

SEQ ID NO: 26749 - protein, 539 aa, Bdellovibrio bacteriovorus HD100
MQQKNNNPSFFDPKTLIAVAAVAIVYYGWNTYLGKKYPDYNKPKTQTEQSSKPATAATTSETPAATANTVDTKSEIMETPTTAKEFHFENDKVSFVMTSFGMGLKGYTINNYQDKEKNNIKLGVSNTDGLFEMRWAGDSKPLTFDVAEQAPGHYVGTAQVGETVIKRELKFNSETSSFTNTISVTNPTEDFKKGFSLLIPESIHTHASTSFLFPSYEHQDFFVTHNGGKHDTVNFSGATEDVVKDFPATSLVSVSSQYFAAAILDKSEIMPEVKLNAQINAKTAMAELVYKPASVKPEMTFSEVFYAGPKSIDALKAVDPEMASLIDFGFFGFIARPLLYVMKAAHSVVGNWGFAIIILTLLVRLCVLPFNIMSFKSMKAMQKVQPIIQGLREKYKEDPMRLNQEMMAVMKQNGANPLGGCLPMLLQIPVFFALYRVIGSSIELYNSPFILWITDLSSHDKFYVLPVSMAVFMYIQQKITPSTMDPTQAKIMAFLPVVFSLFMLQLPAGLTLYMVVSTLFGIIQQWLIMREPKTKAVTA

SEQ ID NO: 26750 - protein, 335 aa, Treponema denticola ATCC 35405
MSFVDEMKRKAKMYANRLVLPEGTEERTLKAARSIVDEKLVSELFLIGSDDAVYAAASKAGVKLGGIKIIDPKKSEWLDSFAESYYEKRKAKGMTLEQAKIEMSAELGFAAMMLVQDKADAMVAGALNTTADVLRAGLKVIGTLPGMKTASSCFLMDTKNPKLGANGVFIFSDCAVIPTPSSEQLADIACSAAISCRTFAGVEPIVAMLSFSTKGSGGDKDENILRVREAVKILQERKPDFVFDGEIQLDCAIVPSVMQKKAADSPVKGQANTLIFPDLGAGNIGYKLVQRIAGAEALGPFLQGFAKPISDLSRGCSVDDIITTSAVTLVQAGRK

SEQ ID NO: 26751 - protein, 447 aa, Treponema denticola ATCC 35405
MKIKENEKLGLGSCVTILVGGCIGSAIFSLSGMTMYYAGPAALITWFVAALILGLYGIQVAELSIRYPKSGGVFVFPAKAMGKNEREGKVWGFISAWGYVISNIIAVAFSAIYVAVYLGVGFQALAGFRIPLAIISIVICTALNLIKVTSAGKYNNVLVALLVITMLTFVSIAMFAGRWNPQNMVPFFTQGAKGVAGFIQAIPNAMVGYGSVVAIAFMVGEVENPNRTVPKSLAISLILVVLLYQLMILGTMGNITTEFLIKNPGMRFIPMFAAAFTSLNMFPWLSKLISISALLALLTTMLVVGFLNARAVCSMANAKMLPAFFGKVNKNGVPSTACLTLSACTIVLSCFPSITELLVNLGSISAAITIVIVCFSLIASRKKLPHVEGNYAAPGGNIVSILTIILILVCYIPAIFNGSVYMWLFTFILYGIGGIIMFIMMKKNKAD

SEQ ID NO: 26752 - protein, 380 aa, Treponema denticola ATCC 35405
MIYLDWAATALPQEDIITEALKKAFKYFANPSSKHFLGKDARKILEDTRLEIAELLNTAPDHIIFTSGGTEGDYIPMLSLLALPSPCSIAVSSIEHSAVREQAAVMKARGYKILQIPSDKNGFISADAVLKTIDSNTAFVSVMAVNNETGAIQPIAEIGKALEEYSKGKRKIHFHTDAVQAIGKIPFELSKLSIHSASFSGHKIGAPRGIGFLYLAKNMEAFIRGGGQENGLRPGTENLAGILALSGCLKKYYENLDGYVFHAKELMDFLIEELAGIEGLSFIPESRPQLKDKYSPWILQFSVKELTGEVLVRCLSEKGICISTGSACSSKKRTRPVLEAMKIDAKVQQNSVRVSIGPLTQRGELEVFVKTLKEILIEFR

SEQ ID NO: 26753 - protein, 299 aa, Treponema denticola ATCC 35405
MMNKIIECVPNFSNGRDPEVLEKIIAPFRGKENVKLLDYESDKDHNRSVVTVIGEPEELKKTVVEAIGIAASLIDLRKHEGAHPRMGATDVVPFIPIKNSTMEECIELSKEVGKLIWEQHKIPVFLYEKSASSPARENLSNIRKGQFEGMAEKVKQPEWKPDFGGTEIHPSAGVTAVGCRMPLVAFNVNLATNDLSIADKIAKKVRFIGGGLRFVKAMGVDLTERGIVQVSMNMTDYTKTSLYQSYEMVKMEAKRYGVNVVGTEIVGLTPMAALMDVASYYLQIENFEFSQIIEARLLE

SEQ ID NO: 26754 - protein, 457 aa, Treponema denticola ATCC 35405
MVIHMNMYQSLGFAIAWLLVGRFIKAKFEFFQKYCIPAPIVGGFLFALISLALHVTRVLDFEFDTTLQTYWMVMFFTSVGYNAGFSILRDGGKKVFVFLAVAIVFAILQNVVAQGAARLINFSPMLAVMLGSTSFTGGFGTAASFAPIVDPENTLGALSLAVAVPTFGSLISSILGGPVGNRLIKKYGLQPSNADESVRIDESGNIIKTKKVVKKVEAVHPSFIKRLFFNPTKGREEGQEVVTVQEEVIHEASAKGEVDNSTTSSEKHLSSEKLLMSFMLLVLASGFGLFVTNHLNSLSPKFKFPIYIGAMICAAIIRNIADTSKKFKVNMDEIDALGNISLNMFLALALVSLKLWQLVSLAIPLMIILSAQIVLLYLYTRFVTFKVMGGDYDAAVITAGHIGFGFAATPNAMANMGSICEKYGYSKIAFFVVPIVGSLFIDFFNIMIIGITIGLVD

SEQ ID NO: 26755 - protein, 426 aa, Treponema denticola ATCC 35405
MENKGKLGLLSICLLGVNAIVGTGIFLLPGKAAKLVGVSSIGVILFDAVLVILIALCFAEAGGLFKKNGGPYVYAKEAFGEFVGFEVGFMKWAIMVIAWAAMAVGFPTALGSVFPLAATPFWRSVIAVAILLFLGLMNIAGVRISKIVNNVITIGKLVPLIFFILLGIFFIKGDNFQPMQSVGALTTTSFGAAALLIFYAFTGFESIAVAAEDMDKPEKNVPLAIVLVISGVSVFYILIQVVAIGILGDGLTASEAPVADAAAKFLGPVAKAVVTTGTLVSIGGINVASSFLAPRSAVALADDGFLPKFVTKRNKKDVPYISVILTTALTALVCLTGSFSKLAAISVVSRFAQYIPTCLAILVFRKRGMKGSFRIPGVYVVSFLAVGISLWLLYNSSWDKILFGLGGLVVGAVFYVIMKLTQKKAN

SEQ ID NO: 26756 - protein, 658 aa, Treponema denticola ATCC 35405
MSKDNDDKNQNDPFNFFNFGPDSDGDDKKSPKKPFFSLWLLAPLVVIIFILINQLMVLNSSALIPFSEFKDRITTGQIKKVVLGPVYFTGYTSIQDDDSSNTSLFSFLSVQKNTNEYVTVGIYTSEFLQLLDDHHVVYHVKPKERSYIVELLLQWVLPFLLIFLVWRAIMRRMTKGMGGLGGSIFSPGQARSAAIDEGKVETRFKDVAGVDEAKEELMEVVDFLKYPQKYTEIGGKIPRGVLLVGPPGTGKTLLARAVAGEAGVPFFRISGSDFVEMFVGVGASRVRDLFRQAREKAPCIIFIDELDAIGKSRHNSYSSNDEREQTLNQLLVEMDGFDNKTGLILLAATNRPDVLDPALLRPGRFDRQVVVDRPDVKGREQILKLHAENVKLDASADLASIARITAGCSGADLANIINEAALLAVRSKRKTVIMTDLDEAVEKAMIGLQKKSRVIREEERKVIAYHETGHAIVGSFTDGADKVHKVTIVPRGTSTLGYTFHIPEDDKHIVTEKQLLAEIDVLLGGRAAEQVKFNMVSTGAANDLTRATDIARSLITDYGMSSKFKNVALSKRGAGYLGDNEPRLVREYAETTQQYIDEEIAKIINTRYEGVIKMLNEKKHLLEKIATTLLEKETIENEEFDAIIAEEKAPKLFEKESE

SEQ ID NO: 26757 - protein, 646 aa, Treponema denticola ATCC 35405
MGKIIGIDLGTTNSCVSVMEGGEPVVIPNSEGGRTTPSIVGFTSKDERVVGQPAKNQMITNPERTVYSVKRFIGHRYSELTDELKRVPYKIVPQGEDVRIDIDGKLYSTQEISAFILQKMKKTAEDYLGETVTEAVITVPAYFNDAQRQATKDAGKIAGLEVKRIINEPTAASLAFGFNKDSKKEKTIAVYDLGGGTFDISILELGDGVFEVKSTNGDTHLGGDDFDNRIVNWLVDEFKKDTGIDLSKDRMALQRLREAAEKAKIELSSVANTEVNLPFITADANGPKHLQKSLSRAKFEQMTEDLFERTKEPCRKALKDAGITPDKIDDILLVGGSTRMPKVLQIIKEIFGKEGSKSVNPDEAVAMGAAIQGGILGGDVKDVLLLDVTPLSLGIETMGGVFTPLINRNTTIPTRKSQVFSTAADGQTAVSIHVLQGERGMASQNRTLGNFDLVGIPPAPRGVPQIEVTFDIDANGIVHVSAKDLGTGKEQHIRIESSSGLSESEIDRMVKEAEANAENDKLEKEKVEAKNNADSLIYQTEKTLKEMGDKIGAADKQKIEAAIADLRQALNSDNTADIKAKTENLQQAAYKIAEEMYKQQGAQAGADPNAGSSQGAQAGTDYGTSGPKTGTADDVDYEVVNDDNDK

SEQ ID NO: 26758 - protein, 246 aa, Treponema denticola ATCC 35405
MKLLDIQGLQMSVDEKQILKNLNLSINKGEVHVVMGPNGAGKSTLAAAIVGNPRYNIDKGKIYFEDELINEVPVYERARKGIFLSFQIPEEVPGLKVEEFLRASKEAVTGEKTPAIKFHKLLSDTMKQLKINPAYANRSLNVGFSGGEKKKNEILQLAILNPKLAILDETDSGLDIDATKIVFEGVSKIRTPDMGILIITHHNKVLDYIKPDFVHILVDGTIVKTGRLELVEYIEKNGYENIKESL

SEQ ID NO: 26759 - protein, 397 aa, Treponema denticola ATCC 35405
MKILVINCGSSSLKYQLIDMTNEDVLVKGLVERIGIEGSRIKHEKKGMDAVLIEEKMNDHKRAIQLVLEALIDKNHGVVKSMDEITAVGHRVVHGGEEFNKSVLLDDRVMAGIKECIDLAPLHNPANIMGIEACKALMPKTPMVAVFDTAFHQTMPAENYIYALPYEYYEKYKIRRYGFHGTSHRFVSEKASETLKNNSADFKVITCHLGNGSSLAAIKGGKCVDTSMGLTPLEGLVMGTRSGDLDPAILPFIMNKEKLSADEMSNVLNKKSGVFGISGVSSDFRDIETAAKEGNKRAQLALDVFCNRVRKYIASYAAQLGGVDALVFTAGIGENSIELREKICHGLEFLGVELDSEKNKVRGKLTDASKASSKVKVLIIPTNEELMIAKDTMALVK

SEQ ID NO: 26760 - protein, 278 aa, Treponema denticola ATCC 35405
MSEKMYCDPAEILEVTVQKGIAKASTSVWKLLCLGFLAGVFIAFASEGSNMAAFGLFAKPETYGLGKFVAGLIFPVGLILVLLAGAELFTGNNLIIAAVLEKKVSFSAMLKNWIAVYIGNLIGSVFIAFLIVQSGQLSSGANLLGGITIKIAYGKVSLSFVQAVFLGIMCNWLVCLAVWLCYGAKDMTGKMLAAFFPIWLFITSGFEHSVANMYYIPAGIFSKSVPAYAAASGLSAEALSNINWAAFFIKNLMPVTLGNIIGGAFFVGMFYWICYKKK

SEQ ID NO: 26761 - protein, 292 aa, Treponema denticola ATCC 35405
MKVENCDVGFIGLGVMGKSMAERLRAAGAKMHVFTRTKKSAEEILSKGAIWYDDPASLAPNCKIIFTIVGYPQDVEETYFGEKGLLKTAKPGTIFADMTTSSPILAKKIYDEAKKKECFSVDAPVSGGDIGAKNGTLSIMAGGDESAFKELEPFFACMGKTWALQGGAGAGQHTKMANQIAVAANLFGTVEAVCYAEAAGLDPHKMLSAIGGGAAGSWQILNNGPKMLQKDFAPGFYIKHFLKDLNITLNVAKELKLHIPVLELAQNFFNKMNEEGYAEKGTQAIYEYYKTL

SEQ ID NO: 26762 - protein, 146 aa, Treponema denticola ATCC 35405
MNSLSLFSPSFTDSVFDALDRSLGPNFGVFAPIKNASCGMPSVDIRETEKAYVMEVDLPGYSEKDVEISLKDRLMTISSSKKEEKEDKGAEYIIKERSSRHFMRRFTLPEDINSDEVSAKFENGVLVVNIPRKPDTQPKQIEIKTA

SEQ ID NO: 26763 - protein, 522 aa, Treponema denticola ATCC 35405
MMNTGDELGVKELELKDKNEIDWLITVLPLAVIICLTGLVLFFPVESMKVVDALWSVFVNKLGFFYILLGLGLVFTAIGLAFSRFGTVKLGNLEKPRYGNFTWGAMIFTSTMAADILYWSLIEWAYYFGESPFGLSSLSLAERQDWAAAYPLFHWGITPWAFHIVPAVAFAYMLHVKGRTKQKLSESCRPIFGDRIDGPIGKMIDVFSVIGLLAGTATTFSLATPLLSLAVSTIFGIPQGKILTLVILLIIAAVYTAAVLLGLKGISQLAKISVVSFCVLLGLVFIASPKIYIIETSITGIGKVIQNFFGMSTWMDPLRISGEGGAGFPQNWTIFYWAYWIAWFVATPFFIGKISEGRTIKNTIIGGLICGIAGTYCSFIILGNYGLHLQAHGIFDAASAIKETDASQVILQILNTLPYAKIVLGILIITMIAFYSSTFDAITLVIASYSQKNLEKHTEPKKGLRAFWAVVFVMLPAALILVGTNLNQLQSLSIIAAFPLGIIIILIVISLFKELKHNGGYR

SEQ ID NO: 26764 - protein, 322 aa, Treponema denticola ATCC 35405
MSEKLNLVILDGFTSNPGDLSWDELKSVSNLTIYDKTSAEELLERCKEADAVLTNKVVFSKEIMDSLPRLKYIGVLATGYNVVDIEAARAKNICVTNIPSYSTDSVAQLVFALIFHFYWHVKEHSDEVMGGKWSASPHFCYHSFDIRELSDKTMGIVGFGNIGQAVAKIALAMNMKVIYFNRSKKNIKGLEEAKQVSLDELFSSSDIISLNCPLTPETKEIINAESLKKIKKTSIVINTGRGPLINEKDAAEALKEKRLAGLACDVLSVEPPAKDNPLLKAPNCIITPHMAWQTFEARERLIKTAAANAKAFIAGKEINRIN

SEQ ID NO: 26765 - protein, 458 aa, Treponema denticola ATCC 35405
MEAKKEKRNLNLFNIFSLGFGGAVGSGIFVLTGLGIAATGKSIVVSIMAGCIFMLLAYFYNVLLSSMFMFEGGDYSQKALVFNPFFTGINGYITFINGFSVAMYSLAMVNYAGIVFPQILPYTKLIAIIIITLFFAATIRGSKFVSTINNIMTVVLILAIIFYIVFGVPKVKPGYFTDPNFFTDGFKGIIAGIAIMGWACQGTTMGPVSVSAVTIKPKKNIPYGIFLVTIAIAIVYGLMGYVSAGVLPISEVAGQNLSLVAAEIFPRSIFILFIMGGAVFAIATSMITGIIMVRYPILKVAQAGWLPKFFTQTTQTGYPWAVYGIYYILSILPVLLGLKLDAIVSLVMIPAMLTNLYTNIKCIKVIRDYPEQWKKSVLHMPRILMDIICILSALCAAIVCYNLFMMLSTKEKLLMIGIMVIISILSIYNLKSKHVKIEELEANKRQIIEDALLAETEE

SEQ ID NO: 26766 - protein, 382 aa, Treponema denticola ATCC 35405
MVKFADESKIRVSSGKGGNGCIAFRREKYVPMGGPSGGDGGRGGDLIFEIRRNMRTLVHLRHKRVYKAKNGGGGEGSQRFGKKGDDCIIPLPPGCVIKDPETGKTILDFGDAEEGRFVFLKGGNGGWGNCHFKTSTNQAPKTALPGQEGETREIIVELNIIADIGLVGFPNAGKSSLLDYFTNARPKIAPYPFTTKIPNLGVLRVDEERDVIIADIPGILEGASEGIGLGIRFLKHIARSAGLAFLIDLSDDNYLRAYDILCKELESYSKELAQKKRIIIATKLDLPDTKERFTELKNAIPDQEILGISLYNEWGLEEVKKAFIRLADEMQKTKPQKESLDPYGQNKNFMTAELDDVSYEEKNDDEHFGATVSLSRKRKPKK

SEQ ID NO: 26767 - protein, 103 aa, Treponema denticola ATCC 35405
MYALIEYKGKQYKAEKGAKLVVDKLSAESGSKIDIDTVLLISDGDKVTVGTPYVSGAKVSATVGDSFRERKIIVYKHKAKKNYHRTQGHRQAHTCITVDNIVG

SEQ ID NO: 26768 - protein, 294 aa, Treponema denticola ATCC 35405
MNSGVVTIIGRPSAGKSTFLNTASGEKVSIVSAIPQTTRNAIRGIVNTTKGQIVFIDTPGYHKSEKKLNLKLQEIAKTRLEEGDAVLYLIDLSREFGEEEKNICSLLIPLQNKTVIGLNKADLKSSKADLVKKELLSLLPDIPQERIFEISALKDEGINEILSLLIELLPEGEALYPEDIYTDQDVVFRITEIIREQAILHTREEIPHALYAGVEDAEMHKNGKELWVRAFLYVEKESQKAMLIGKGAAVIKSIRIKSMAELRKIFPYKVQLDLQVRVNKNWRQKDNIIKKISY

SEQ ID NO: 26769 - protein, 596 aa, Treponema denticola ATCC 35405
MHKKSTFLKFAAYYKPYKFLFFFDLFCALIVSAVDLVFPQVIRYLTRVIPKIRSGEVLLFSDKTIFSFDVQASAIIYLGLIISAILLGLYIIRYFTQYFITSWGHIMGARMERDMRNDLFNHMQRLSFSYYDKNKTGDMISRIVSDLFDISELAHHGPENLFISFLKIIGSFSLLCFINVRLTLILASVTSLMFIFTFFQNKKMRKIFMLNRKTIAGINSQVQDTLSGIRVVQSFANEELESKKFDIANEAFVHSKYINYRQMGQFVGINGLLQGLFFIVTVLAGSFFVAKNELTIPDLTIYVLYINIYIAPINVLINFTEMFQKGAAGFKRFLQIIETAPDITEKEDAVELKDVKGNIKYENVDFSYNETTTILKNISIDIPAGKTLALVGPSGGGKTTICSLLPRFYDVVNGKISIDGKDIRDLTLKSLRANIGIVQQDVYLFGGTIKENIAYGKPKASDEEIIEAAKNAHIHDFIMSLEDGYDSYVGERGVMLSGGQKQRISIARVFLKNPPILILDEATSALDTENEILIQKAIEELSEERTTIVIAHRLSTIRNADRILVVTDEGIMESGTHEELLSLNGIYANLRKLDEF

SEQ ID NO: 26770 - protein, 859 aa, Treponema denticola ATCC 35405
MNIDKYTVKASEAVQEASSLAQRDDHSQVESEHLLYVLLEQEDGIVPPLVEKIGVSPESLLDDLDKMLDRKPRVTGQSAQTYISPLLAKVFANAEGYADKLKDEYVSTEHLLLALSESKDETGELLRSRGINLKNLLSALKEIRGNNRVTSENPESTFRSLEKFCRDLTQLAKNEKIDPVIGRDEEIRRVMQVLSRRTKNNPVLIGEPGVGKTAIVEGLARRIVSGDVPDSLKGKRLLSLDLGALVAGAKFRGEFEERLKAVISEVQKSEGRVILFIDELHTLVGAGASEGSMDASNLLKPALARGELRAIGATTLNEYRKYIEKDAALERRFQQVYCPEPTVEDTIAILRGLQEKYEVHHGVRIRDEALIAAAVLSNRYITNRFLPDKAIDLVDEAASRLKMEIESQPVELDQVERKILQLNIEKVSIGKENDTASKERLLKLEEELAELSSKRNAMQAQWQNEKARINESRKYKEELEQLRIEETKYSREGNLNKAAELKYGKIPELEKKIAAVTAELEKKAGQQGQLLREEVCEEDIARIVSMWTGIPVAKMLASEMQKFLQLEKVLQARVVGQDEAVRVVSDAIRRNKAGLSDMNRPLGSFLCIGPTGVGKTELARTLADFLFNDEKALTRIDMSEYMEKHSVSRLIGAPPGYVGYDEGGQLTEAVRRRPYSVILFDEIEKAHQDVFNVFLQILDDGRLTDGQGRVVDFKNTIIIMTSNIGSEYILTAKDMGSIKEEINQILRDNFRPEFLNRIDEILTFNRLEKEHIRKIVDIQLRSVAERLQARRLGLKVSDKAKDFLADIGYDPMFGARPLKRAIQAELENKLAREVLEGKFPEGSTILVDKGENSLIFKKG

SEQ ID NO: 26771 - protein, 582 aa, Treponema denticola ATCC 35405
MKKNTVLAVVLSMLVFGGWLYIQQKYFPTEYNVPQKPVAQAQGQNPTSSEIAVQTSSNQISNSMIEAVADSDYPSREQTYVIETDIIRAVFTNKGGDIISYKLKEHASAGSDERVEMIENVTERNRALSLALGGHDAQAVDLLFNVKEESLSDGRKQIGFYRDIKLKNTDGSETVFTLAKRYTFIPGDYMFTLEVTIDGKEGMRGLSFGDSAYTLRSAPQIGPEWDKVNDKYEYRALSYFANEKKKEDRSITDGKTKAVNDLASWVSVSGKYFSFIIIPKDPIQKMFFSGIKEEGAKLHNSQFFISRQPIVGNAAYDQYRVYIGPSSEKILNSYNSAAANNYGYENLRIDSLAASSGFLAPLERVLKFVMEIFYKIIPNWGVALLLLTLLMRIIFFPLTKKSSEATKRMQELQPQINELQQKYKNNPQKLNAEMVKFYKEAGYNPASGCLPLLIQLPFLFAMFGLFNNYFEFRGASFIPGWIPDLSVGDSILKFGFTIPFLNWTDLRLLPIIYTASQLLHGKLTQTPGQSQQNPSMKIMIYFMPLFFFFLFYNAPSGLLLFWTFSNILMLLQQLIINKSMKK

SEQ ID NO: 26772 - protein, 933 aa, Treponema denticola ATCC 35405
MQNIILTTKKIFRLAFILILIAATFMSCKTAPAKEETLIDLIKAGKSEELQERLNSSAINMKDEEGNSLLHIAAVKNDPIIVRLLINMDADIEAKNNTGATPLAAALNNSAYDAVKVLVEYNANIFAKDNEGEKPFDTACKNNVPNLILTAQTIKQKDENQDTVLHLAVKAMDKQLTKQILAIAPPETVYNKENLSPLAIAYKHNNAEDSAEIASILLLAGIQPMGKDFAEFETASLARNYSMRFADGETLLHIFARKGYTGFLKFLIKNKVPIDVKDISSSTAMQEAVYNGNTEAAILLLQAGADPNSRNSSGNTALHLVMPEASRSKLFNELITAGANPNLKDNYGETPLHVAARIGMNDDILDQLLKAGADINERNKKGQTPLILAIDRNQTQQVDFLINHGADIHAEDKSGESAFIHSLSMGLPMVEHVVTEKNSTERDSNGSTPLHLAVSHRASSDIIYYLVEKKSLINTRNKLGNTPLHIAAEKNYREAGEILIANNADIFYANLNGDSPLKFALTLREGREDWMINSHTIGAGDGAGNTPLHLAAEWQILPMIPYLIDKGADINARNTNNETPLFNAVRTDSPEAIKALLGEGVSKKADLDARDFLGNTILHAAVRWSAYKAADFILSKDTEEYVRLINAKNLAGKTVLHEAAKQGEIKFINIFLKAKVDVNAADETGRSPLSEAVLANQTQAIDLLLKNGASPVQQDMYGRTALHEAVEISEESIILVRNAGGNPLTKDAYGKTPFSLALNKNIRTVDLVLGNDSLLADTDGDTPLHIAVKERVSLDYFQRIMKKKYPVNKRNKNGETALLLAIQNSQKEITRALLAGGADPFIVNNKGVSAITEIFMHHPDFTPIAAEFSLKQTDTLGEGMLHYAAKFADVQTLKDILALPGIKLDVKNTAGETPYQVALRWNRSEIAELLKTE

SEQ ID NO: 26773 - protein, 418 aa, Treponema denticola ATCC 35405
MNYLESNNLAIIACPGGEEFANLTIKNLKHIYARKLYQQSEKLAKRYNTSSEDMIQKFNFYSDLFAGRMSVNKDTNKIHVPKFKVDARFTYFMNGEFKTELLETVRGKDVYIFQDVENKQEITINEGKNKEVFSVNDHLMSLIVTIDAVRHAGAGRISLVLPVYPYSRQHKKKGREGLTASLLGHIYEDLDVEQIITLDIHSREIENSFHSARLQNLHASYQIIRELTRILDLSADSEEQFVVVSPDSGAVDRNKFYSSGLQKPLAMIYKERDYSVVTQNAKQSNIISIKLLGDVEGKNAFIADDMLGTGGTLLKAMEFLKSKGAKKVIAAVSLPFFTGDAIQQFDEAYSKGLFYRVIGTNAVYHTELKQKEWYIETDVSGLFAQVITRLHENLSLSSLLDNRDIIEKLLKNAAIPKK

SEQ ID NO: 26774 - protein, 258 aa, Triticum aestivum
MSATCAADLAPLLGAAAMNATDYLCNRFADTTSAVDSTYLLFSAYLVFAMQLGFAMLCAGSVRAKNTMNIMLTNVLDAAAGALFYYLFGFAFAFGTPSNGFIGKHFFGLKDMPQTGFDYSFFLFQWAFAIAAAGITSGSIAERTQFVAYLIYSAFLTGFVYPVVSHWIWSVDGWASAARTSGPLLFKSGVIDFAGSGVVHMVGGIAGFWGALIEGPRIGRFDHAGRSVALKGHSASLVVLGTSCSGSAGTVQPGSFVT

SEQ ID NO: 26775 - protein, 270 aa, Tradescantia fluminensis
MGRSPCCEKAHTNKGAWTKEEDQRLIAYIKVHGEGCWRSLPKSAGLLRCGKSCRLRWINYLRPDLKRGNFTEEEDEVIIKLHALLGNKWSLIAGRLPGRTDNEIKNYWNTHIKRKLISRGIDPQTHRPVNSGAQFTISSANNQANSTKIPVNEALKQSTDSSSSQDMQSSNSVLDVVERCPDLNLDLSINIAYSTDRKPFSSSTEMQITPAATEATTPTSVSPYFQPICLCYRLGFSRTEACSCKAISNSNSQNVFRYYRPLKEEGHQTN

SEQ ID NO: 26776 - protein, 276 aa, Tradescantia fluminensis
MGRSPCCEKAHTNKGAWTKEEDQRLIAHIKAHGEGCWRSLPKAAGLLRCGKSCRLRWINYLRPDLKRGNFSEEEDELIIKLHAMLGNKWSLIAGQLPGRTDNEIKNYWNTHIKRKLVSRGIDPQTHRRMNNTEHCEVSSPQHDTKSVVLDETRKLQSTDQSSETSGVTIADNFEHQLPDLNLELTISLNNSSYHYSSSSKKSSTALQGVLKPSNSVVSASAEEAVREKSSCAQVICLCYQLGFQSAEGCNCKSISANYQQVFKYHNPLFKEEQQIN

SEQ ID NO: 26777 - protein, 268 aa, Tradescantia fluminensis
MGRSPCCEKAHTNKGAWTKEEDQRLIAYIKVHGEGCWRSLPKAAGLLRCGKSCRLRWINYLRPDLKRGNFTEEEDELIIKLHALLGNKWSLIAGRLPGRTDNEIKNYWNTHIKRKLISRGIDPQTHRPINAGSQFTISSANHQGSLKNIRDNEALKQSPNSSSQDMQSNSSVIDVVERCPDLNLDIAINIAYSTDQKPFSSSTEVQKAPAVTQATTPTSVSPYFQPICLCYNLGFSKSEACSCRASSNDNQHVLRYYRPLIEEGHQTN

SEQ ID NO: 26778 - protein, 340 aa, Mycobacterium sp. M156
MAVIKVAPFSHEFSCEDGETLLEGALRNGLLLKYGCKHGGCGTCKIRLLDGDIAEQGPTFALSAEDQADDLVLACASIPVEPCLIDVDPSGLTEEEFYSGDTSRDYVAVVDEVEVVAGDIARVRFDLGLDDIDFTAGQFVNVEVPGSGLLRTFSLANGPANRHFIELICKLYPDGLFSRFLRDAVPGTPIRIFGPYGSLKVHLSHRPVIMIAGGSGLAPLLSMLRDLAAKGADRSVELYFGARTEEHLYALDDIAELGKELGDFEFIPVLSHSWSPSWSGETGLVIDAILRRHQRLSHDVYLCGPPPMIDGAVPQLVQRGVRPRNIYYDAFTPAVQTASP

SEQ ID NO: 26779 - protein, 384 aa, Rhodospirillum rubrum
MKIAIPKERRPGEDRVAISPEVVKKLVGLGFEVIVEQGAGVGASITDDALTAAGATIASTAAQALSQADVVWKVQRPMTAEEGTDEVALIKEGAVLMCHLGALTNRPVVEALTKRKITAYAMELMPRISRANSMDILSSQSNLAGYRAVIDGAYEFARAFPMMMTAAGTVPPARVLVFGVGVAGLQAIATAKRLGAVVMATDVRAATKEQVESLGGKFITVDDEAMKTAETAGGYAKEMGEEFRKKQAEAVLKELVKTDIAITTALIPGKPAPVLITEEMVTKMKPGSVIIDLAVEAGGNCPLSEPGKIVVKHGVKIVGHTNVPSRVAADASPLFAKNLLNFLTPHVDKDTKTLVMKLEDETVSGTCVTRDGAIVHPALTGQGA

SEQ ID NO: 26780 - protein, 295 aa, Listeria seeligeri
EIAKEVGIELGKSSVTHFSDGEIQINIEESIRGCHVYVIQSTSNPVNQNLMELLIMIDALKRASAATINIVMPYYGYARQDRKARSREPITAKLVANLIETAGATRMITLDMHAPQIQGFFDIPIDHLNAVRLLSDYFGERHLGDDLVVVSPDHGGVTRARKMADRLKAPIAIIDKRRPRPNVAEVMNIVGNVEGKVCIIIDDIIDTAGTITLAAKALREAGATKVYACCSHPVLSGPAMKRIEESPIEKLVVTNSIALPEDKWIDKMEQLSVAPLLGEAIVRVHENASVSSLFE

SEQ ID NO: 26781 - protein, 380 aa, uncultured crenarchaeote
MNKVSILPHGGKLVNNLITAKDLVGIKTFDVSRDIRTEVENIAQGIFSPLDGFLNEDDLQQVLREGRLTDGTAWTIPIVFDVDDHTARNLKDLGDVVLTCEGESFGIIHVKDIYRFDKVYLSTSVYGTTDRNHPGVNKVLTMKDILVSGKTEIFAVQDRLGMRQFRMSPLETRNEIIRRKWNTVVGFQTRNVPHIAHEMVQKAALNIYDGLFINPLIGKKKRGDFTDEMIVRSYDLLIRNYYPQEKVLFATLHTEMRYAGPREAIHHAIMRKNFGCTHFIVGRDHAGVGEYYPPYAAHDIFKNYPDLGIEPVFFPSFYYCRKCLAYANAKTCPHGHEFREELSGTMIRKMVNTGEIPDKHLMRPEVSQLIISSDDPFVKE

SEQ ID NO: 26782 - protein, 359 aa, Moorella thermoacetica
MQEQKFRILTINPGSTSTKIGVFENERPLLEKTIRHEAEVLRQYKTIADQYEFRKQTILQALDEEGINLSKLNAVCGRGGLLRPIEGGTYRVNEAMLEDLRRGYSGQHASNLGGISAHELASALNIPAFIVDPVVVDELEPIARISGFPLIERGRIFHALNQKAVARRVAKQLGKRYDELNLIVAHMGGGITVGAHKQGRVVDVNNGLDGEGPFSPERAGTVPAGDLVALCFSGDYYREEVMRMLVGQGGLVGYLGTNDAAKVYNMIEAGDEKAKLVYEAMAYQMAKEIGAASAVLAGKVDAIILTGGLAYGKSFVERITPRVQWIAEVIFIRRKRIAALAEGALRVLRGEEEEKTYSG

SEQ ID NO: 26783 - protein, 370 aa, Geobacillus thermocatenulatus
MEEQKFRILTINPGSTSTKIGVFENERPLLEKTIRHEADVLRQYKTIADQYEFRKQTILQALDEEGINLSKLSAVCGRGGLLRPIEGGTYRVNEAMLEDLRRGYSGQHASNLGGILAHEIASALNIPAFIVDPVVVDELDPIARISGFPLIERRSIFHALNQKAVARRVARQLGKRYDELNLIVAHMGGGITVGAHKQGRVVDVNNGLDGEGPFSPERAGTVPAGDLVALCFSGDYYREEVMRMLVGQGGLVGYLGTNDAVKVENMIEAGDEKAKLVYEAMAYQVAKEIGAASAVLAGKVDAIILTGGLAYGKSFVEQITRRVQWIADVIVHPGENELQALAEGALRVLRGEEEEKVYPGEAVSPVPARR

SEQ ID NO: 26784 - protein, 69 aa, Mycoplasma mycoides subsp. mycoides SC str. PG1
MNTGIVKWFNDEKGFGFITNDSDNKDVFVYYSNINVNGYKALEQGQKVTYELNKGIKGLEAFNVSITNK

SEQ ID NO: 26785 - protein, 376 aa, Mycoplasma mycoides subsp. mycoides SC str. PG1
MIKENNMKIGLPKEIKQNENRVGITPMGVVELVRNNHEVLVESGAGLGSGFSDLEYEKAGAKITKNVEDVWKQEMIVKVKEPLKSEYKYENQIIFTYFHLAGLKDLTEELIKNKVIAIAYETVQTPDKALPLLRPMSEVAGRMAVIIASNLLLKNTDKDALGVLVSGTPGTPKANITIIDGGVAGSSALRLAIAMEANVTIIEFNENRIRQLYETYGHKANILKSNYANIAKAVKESDVVISTVLIPGKLAPRLVTTEMVKTMKPNSVIIDVAIDQGGSVETVNHISSHADPTFIRHNVIHYSVPNIPGAVPRTSTIALTNATLTYVVEIASKGWKKAIQDNSALKLGVQTVNGKLVYKKIADSLNIQYTKIDNAI

SEQ ID NO: 26786 - protein, 322 aa, Mycoplasma mycoides subsp. mycoides SC str. PG1
MYTLEEIKNQLVLKSEKKSIVFPEGESEIIQSVAKTLVDEKLGLPILLFKSSKEVPSEIKNNSSIKTICLDEFDTKEFSEEFVKLRKGKATIEVAHQVMQLPNYVGAMLVKLNQADCMLSGLNNTTADTIRPALQIIGTKPGYNIASSIFIMSKGDENYIFTDCALNIRPTSEQLVEITQMAVDFAKTLNVKNVEAALLSYSTKGSGKGEDVDRVHKAVEILKSSQNDYVCEGEIQFDAAFDKKTRDKKFKNCLLTKQTPDIFVFPDINAGNIGYKIAQRMGGFEAIGPFVLGLNQPINDLSRGATFIDVLNTAIMTLHLSY

SEQ ID NO: 26787 - protein, 393 aa, Mycoplasma mycoides subsp. mycoides SC str. PG1
MILVINSGSSSIKFKLFDTSKTIEPILDGLAERIGIDGFLKFEHNNQKYKFEDPLPDHEHAIQLILNKLLELKIISNIDEINGVGFRVVHGGEISHSSIITDEILSKIQDSVKLAPLHNPAAIIAIKAVKKLMPNTSMVACFDTAFHQTMPEVNYLYTVPYKWYEEFGVRKYGFHGISYEYIVNKSSEILNKKKENLNLIVCHLGNGASISCIKDGKSYDTSMGLTPLAGLMMGTRSGDIDVSICEYIAKQTNTDIFSITQTLNKQSGLLGLSQVSADMRDVLEQYDRNDKKAVVAVEKYVQIVADFIVKYANYLDNIDAVVFTAGIGENADVIRDLICKKVKLLNLQIDQDKNQAKYSDYKLISSEKSKIPVYAIRTNEEKMICLDTLNLIK

SEQ ID NO: 26788 - protein, 433 aa, Mycoplasma mycoides subsp. mycoides SC str. PG1
MKFVDSADLIIKAGKGGDGAVSFLHALFVPNGGPNGGDGGDGGSVYFQGDEGKHSLLDLKLQKKYSAQDGFKGDIKNMHGAKGEDKIIKVPVGTILYDKKTNNILADINENNKLVLIAKGGKGGKGNARFANSRNKAPTIFEAGELGQEFEIRAELKVLADVGFVGLPNAGKSTLLRAISNSKPVVADYPFTTITPQLGVARTKNNDTFIVADLPGLIQGASLGKGLGHQFLKHIERCLVICHIIDASGNFGSEDIIKNYELIRNELKTYNLNLEKRAEIIVLNKMDLDEAQLNLLDEKIINYFKNKKVIQISGLKKENIDQLLFMIYEELKVAKKQSLWELDKNNNQDEMVIYKFEEQKEDIQAYNKGNNRWEIAGETIFKIYQKFPIWTEDNLLMFNEKLKETGVYETLVKKGIKKGDFVKVFDYELEWTD

SEQ ID NO: 26789 - protein, 301 aa, Mycoplasma mycoides subsp. mycoides SC str. PG1
MSNFKSGFVSIIGRPNVGKSTLLNKLIGEKISIVTNKPQTTRNNIRGILTKKDQYQIVFIDTPGVHTSKKQLDKFLNTSALKSTKDVDVILFLAPSDEVIGKNDLFLLKQIKNLDVFKILVITKADNVTKEQLILKANEWSSYQDQFDEIIITSSITNLNIEKLLELIVNNLSDNDYQFYDDDILTDQSDRFMIKEIIRENILLKTGQEVPHSVAVLVEHLEQNENEINISCAIIVERQSQKSIIIGKNGVKISDIRYKSKKQIQALFKKRINLELFVKVQENWRNSPSLIKKMGYNKDQY

SEQ ID NO: 26790 - protein, 367 aa, Mycoplasma mycoides subsp. mycoides SC str. PG1
MKSCLGCGSLLQTINKFEQGYVNDTEHAYCLRCFKIKNYNQLVDSEINDQQFINKISTLVNENKNNGLVFYYVLDIFDLFGSRILEIENLIKDFKVILVVNKIDLLPKSIKLEKIRNYINNVFKTGCLKNLEIFLTSADRINLVEPLLNKVIKNNKNQQYFIGASNVGKSSLINKMLEINQLIPSIVVSKYFNTTLDFIEIQLDTNTTIFDSAGVSRKNSIANLMNKRFQSYCYFKKEIQQFTYQLTPNNSIFFSGVCWFDYLSSSNQKTNFHIYTNKEINLHRTNTKNVIRYWNNNRKNLIPYINNSEKIQVYEFKFTKEHLNNWYDISISGLGWINFKVETEMIIKINIPSDQKTVLVSLNEPLI

SEQ ID NO: 26791 - protein, 713 aa, Mycoplasma mycoides subsp. mycoides SC str. PG1
MEFQEKGKVTDALKKYTRDLTKDAKDNKLDPVIGREEEISRVIQILSRKTKNNPVLIGEPGVGKTAIVEGLAQRIVKGDVPTLLKNKRILELDMGSLMAGAMYMGDYESRVKAVVNEIQKSNGEIILFIDELHLIVGAGRTGNNSGMDVSNLLKPALARGELKAIGSTTLNEYRQYIEKDAALERRFQRVLVSEPTIDQTISILRGLKDRFETYHGVRIHDNALVSAVKLSSRYITDRYLPDKAIDLVDEACASIRTELASVPIELDQVNRKVMQLEIETSALEKEKDDKSKERWQEAKKELDSLKIEQASLNEKWEKEKEELSRINSVKSSIESLKQELETAQNDGNYKRAGEIQYSLLPSLEKSLALFEKQTGSKMISEEVTEHEIAKVVSKSTGILVDRLISSEKEKLLNLEDLLKKYVKGQDQAIKAVTSAIMRSRSGIKNPDKPIGSFLFLGPTGVGKTEVARSLADILFNSPKKMIRLDMSEYMEKHSVAKLIGAPPGYVGYEEGGRLTEAVRRNPYSIVLFDEIEKAHTDVFNILLQILDDGRLTDSLGKTIDFKNTIIVMTSNIASQYLLTSDELVQVDDQKIQEELNKVFRPEFLNRIDNIVYFNALSVQTIGEIVDKVLEELSTRLQDEQNYFINFSEEARNKIINEGYDRLFGARPIKRYIEKNIETLIAHYIISGEVVENTRYLIDVKNNQFTLEEFKQFN

SEQ ID NO: 26792 - protein, 357 aa, Mycoplasma mycoides subsp. mycoides SC str. PG1
MLFCYYYYWNEVIMDNKDIYVFGLSASQQLAKEVCHFLGVEQKVVKTTRFADGEILVESIDSVRGKEIYVIQSTSMPVNENLMELLIAIDAFKRGSAEKINVVIPYYGYARQDRKAKGRQPITAKLVADLLTKAGADRVIVFDIHSTQTMGFFDIPMDNFHTSQSLANEIVDTIIKEKFDPEKCILVSPDYGGLNRVHKVDSYTANMTNGIAVIGKRRPEPNKAEVEFVLGDIEGRTCFIIDDMIDTGGTIISGAKALKANGAKDVYIFACHGLFNGPAKERMTQAIKEGIVKNVVVTNTVEIPQERQFEGLKIVSVVPLLANMIKESQEHHSLTEVYNKNEDEIQLKIQDFMNHKN

SEQ ID NO: 26793 - protein, 326 aa, Mycoplasma mycoides subsp. mycoides SC str. PG1
MYKSKLSIKQTQQAIQDIKFGLTKQLKQNLNLTRVSAPLFVTSESKINDGLNGDIPVVFTPNQWKEDLEIVHSLAKWKRYALDKYNFNFGEGIWADMNAIRKDDVVDYKHSLYVDQWDWELIISKEQRNLEFLKQIATKIYDSIRYVEHKINFKYPDLVDKLPKQLTFIDSLDLYNKYPNLTAEQREDEVAREYKAVFIYKIGYDLPDKKPHSKRAFDYDDWNLNGDLIFYDLVNDKALEISSMGIRVDAKSLSEQTKILNKTDSDLGLYHDQVLNDKLPLTIGGGIGQSRLSMFLLEKAHIGEVQVSVWEKQYKEDLKKQGIVLL

SEQ ID NO: 26794 - protein, 322 aa, Sphingobium sp. UG30
MTSPASTIDMLVTQITRVAKDINSYELRPEPGVILPEFTAGAHIGVSLPNGILRSYSLVNPQGERDRYVITVNLDRNSRGGSRYLHEQLRVGQRLSIVPPANNFNLVETARHSVLFAGGIGITPIWSMIQRLRELGSSWELHYACRGKEFVAFRQELEQAASEAGATFNLHLDEEANGGFLDLSGPVARAGEDSIFYCCGPEAMLQAYKAASADLPSERVRFEHFGAAPSSAPADDVFTVLARSGQEFTVEPGMTILETLLQNGISHNYSCTQGVCGTCESKVLEGEPDHRDWVLSDEKKASNSTMLICCSLSKSPRLVLDI

SEQ ID NO: 26795 - protein, 864 aa, Arabidopsis thaliana
MDTCTRLLFAACATLSILHLVQSQNQQGFISLDCGLASNESPYNEANSNLTYISDADFIQGGKTGNVQKDLLMKLRKPYTVLRYFPDGIRNCYSLNVKQDTNYLIRVMFRYGNYDGLNNSPRFDLYLGPNIWTTIDMGKSGDGVLEEIIHITRSNILDICLVKTGTSTPMISSIELRPLLYDTYIAQTGSLRNYNRFYFTDSNNYIRYPQDVHDRIWVPLILPEWTHINTSHHVIDSIDGYDPPQDVLRTGAMPANASDPMTITWNLKTATDQVYGYIYIAEIMEVQANETREFEVVVNNKVHFDPFRPTRFEAQVMFNNVPLTCEGGFCRLQLIKTPKSTLPPLMNAFEIFTGIEFPQSETNQNDVIAVKNIQASYGLNRISWQGDPCVPKQFLWTGLSCNVIDVSTPPRIVKLDLSSSGLNGVIPPSIQNLTQLQELDLSQNNLTGKVPEFLAKMKYLLVINLSGNKLSGLVPQALLDRKKEGLKLLVDENMICVSCGTRFPTAAVAASVSAVAIIILVLVLIFVLRRRKPSAGKVTRSSFKSENRRFTYSDVNKMTNNFQVVIGKGGFGVVYQGCLNNEQAAIKVLSHSSAQGYKEFKTEVELLLRVHHEKLVSLIGYCDDDNGLALIYELMGKGNLKEHLSGKPGCSVLSWPIRLKIALESAIGIEYLHTGCKPKIVHRDVKSTNILLSEEFEAKIADFGLSRSFLIGNEAQPTVVAGTFGYLDPEYHKTSLLSMKSDVYSFGVVLLEIISGQDVIDLSRENCNIVEWTSFILENGDIESIVDPNLHQDYDTSSAWKVVELAMSCVNRTSKERPNMSQVVHVLNECLETCEKWRKSQEVDLSSPLELSIVVDTEINPKAR

SEQ ID NO: 26796 - protein, 447 aa, Solanum lycopersicum
MGSNYHFKNFGNEPPGEGGSGGGGKQPGNFGLPRQPSIYSLTFDEFLSSTGGSGKDFGSMNMDELLKNIWNAEENQTIGGPGINGQEVGVPGGHLQRQGSLTLPRTLSHKTVDEVWRDMSKEHGGGKDGNSVGVPPNIPQTQRQQNLGEITLEEFLVRAGVVREDAQFAAKSNNAGGIFGDLSYAGNNTGLAFGYHQANSRNTGLMAGSIPNKNGETVIQSANLPLNVNGVRSTQQQLRPQQLQQNQQSQPQQQPIFPKQPALPYGAPMAIPNSGQLGSPGMRAGMVGIPDPALNSNFIQGASLMGGGMNMVGLGASGVTVATASPGVSSSDGLGKSNGDTPSVSPVPYVFNGGLRGRKYSTVEKVVERRQRRMIKNRESAARSRARKQAYTMELEAEVAKLKEENDELQKKQEEMLEMQKNQVIEMMNLQKGAKRRCLRRTQTGPW

SEQ ID NO: 26797 - protein, 588 aa, Arabidopsis thaliana
MATSLNLSSIFSSSSRLVTTPSSVFPIRQRRRIILVTSSSSGGGGKPTILVTEKLGQAGIDLLKKYANVDCSYDLSLEELCTKISLCDALIVRSGTKVGRDVFESSRGRLKVVGRAGVGIDNVDLAAATEYGCLVVNAPTANTVAAAEHGIALLTAMARNIAQADASIKAGKWTRNKYVGVSLVGKTLAVLGFGKVGSEVARRARGLGMHVITHDPYAPADRARAIGVELVSFEVAISTADFISLHLPLTAATSKMMNDVTFAMMKKGVRIVNVARGGVIDEEALLRALDSGIVAQAALDVFTVEPPVKDNKLVLHESVTATPHLGASTMEAQEGVSIEVAEAVIGALRGELAATAVNAPMVPLEVLRELKPYVVLAEKLGRLAVQLVTGGSGVNAVKVTYASSRAPDDLDTRLLRAMVIKGIIEPISSVFINLVNSDYIAKQRGVKISEERMVLDGSPENPIEYITVRIANVESRFASALSESGEIKVEGRVKQGVPSLTKVGLFGVDVSLEGSVILCRQVDQPGMIGKVASILGDENVNVSFMSVGRIAPGKQAVMAIGVDEQPSKETLKKIGDIPAIEEFVFLKL

SEQ ID NO: 26798 - protein, 159 aa, Hyacinthus orientalis
MSDEGASLRVEADAGASKTYPQQAGTIRKNGYIVIKNRPCKVVEVSTSKTGKHGHAKCHFVAIDIFTAKKLEDIVPSSHNCDVPHVTRTDYQLIDISEDGFVSLLTENGGTKDDLRLPTDDSLLTQIKDGFAEGKELVVSVMSAMGEEQINALKDVGPK

SEQ ID NO: 26799 - protein, 254 aa, Hyacinthus orientalis
MGEEADRSGYDRLASDGDGDGSGGDGDDGRVLEWEIGLPSADDLTPLSQPLVPPELASAFSITPDPARTILDVHRASHSTMSSLRRHNLASSSSAMKSFSPFPSGDPTVLESDDQKDESRVRRSEAENSEDDQSARSLKRPRLVWTPQLHTRLLTWVAHLGIKTAVPKTIMQLRMSRGLTRENVASHLQKYRLYFEEDAGRCRTNGHRPAIRCSHRRRCLIVCTKICCQLLLRRWPMPYAVPTMIPRARVWECR

SEQ ID NO: 26800 - protein, 878 aa, Arabidopsis thaliana
MKNLCWVFLSLFWFGVFLIIRFAEGQNQEGFISLDCGLPLNEPPYIESETGIQFSSDENFIQSGKTGRIPKNLESENLKQYATLRYFPDGIRNCYDLRVEEGRNYLIRATFFYGNFDGLNVSPEFDMHIGPNKWTTIDLQIVPDGTVKEIIHIPRSNSLQICLVKTGATIPMISALELRPLANDTYIAKSGSLKYYFRMYLSNATVLLRYPKDVYDRSWVPYIQPEWNQISTTSNVSNKNHYDPPQVALKMAATPTNLDAALTMVWRLENPDDQIYLYMHFSEIQVLKANDTREFDIILNGETINTRGVTPKYLEIMTWLTTNPRQCNGGICRMQLTKTQKSTLPPLLNAFEVYSVLQLPQSQTNEIEVVAIKNIRTTYGLSRISWQGDPCVPKQFLWDGLNCNITDISAPPRIISLNLSSSGLSGTIVSNFQNLAHLESLDLSNNSLSGIVPEFLATMKSLLVINLSGNKLSGAIPQALRDREREGLKLNVLGNKELCLSSTCIDKPKKKVAVKVVAPVASIAAIVVVILLFVFKKKMSSRNKPEPWIKTKKKRFTYSEVMEMTKNLQRPLGEGGFGVVYHGDLNGSEQVAVKLLSQTSAQGYKEFKAEVELLLRVHHINLVNLVGYCDEQDHFALIYEYMSNGDLHQHLSGKHGGSVLNWGTRLQIAIEAALGLEYLHTGCKPAMVHRDVKSTNILLDEEFKAKIADFGLSRSFQVGGDQSQVSTVVAGTLGYLDPEYYLTSELSEKSDVYSFGILLLEIITNQRVIDQTRENPNIAEWVTFVIKKGDTSQIVDPKLHGNYDTHSVWRALEVAMSCANPSSVKRPNMSQVIINLKECLASENTRISRNNQNMDSGHSSDQLNVTVTFDTDVKPKAR

SEQ ID NO: 26801 - protein, 552 aa, Arabidopsis thaliana
MVSHKVLEFGDDGYKLPAQARAPRSLRKRIYEKKIPGDDKMCAIDLLATVAGSLLLESKSPVNACLVVQNTVKNEYPADENPVKAVPYSESPSLFDNGKCGFSSVITNPNHLLVGDKVGKEVEGFSSLGVSGDVKPDVVASIGSNSSTEVGACGNGSPNESRDDVNLFSRNDDDENFSGYIRTRMTRPVPRIGDRRIRKILASRHWKGGSKNNTDAKPWYCSKRSYYLHHHQRSYPIKKRKYFDSVYDSNSDDYRLQGKTHKGSRTISSMKSRNASFVSRDHHVKLRIKSFRVPELFVEIPETATVGSLKRMVMEAVTTILGDGLRVGLMVQGKKVRDDGKTLLQTGISEENNHLDSLGFSLEPSLETTPQPLLSSYLSDHACDDVTLCHDNALDSSHEPEPSPADSFGKLGTSDHSRALIPVASAAMLAPRPPNRKFKRTEQQLAAQRRIRRPFSVTEVEALVQAVEKLGTGRWRDVKVRAFEDADHRTYVDLKDKWKTLVHTARISPQQRRGEPVPQELLDRVLKAHAYWSQHLMHQLQTEPPSTQVEAL

SEQ ID NO: 26802 - protein, 561 aa, Arabidopsis thaliana
MALRTLSTFPSLPRRHTTTRREPNLTVIYRNPTTSIVCKSIANSEPPVSLSERDGFAAAAPTPGERFLENQRAHEAQKVVKKEIKKEKKKKKEEIIARKVVDTSVSCCYGCGAPLQTSDVDSPGFVDLVTYELKKKHHQLRTMICGRCQLLSHGHMITAVGGNGGYPGGKQFVSADELREKLSHLRHEKALIVKLVDIVDFNGSFLARVRDLVGANPIILVITKIDLLPKGTDMNCIGDWVVEVTMRKKLNVLSVHLTSSKSLDGVSGVASEIQKEKKGRDVYILGAANVGKSAFINALLKTMAERDPVAAAAQKYKPIQSAVPGTTLGPIQINAFVGGEKLYDTPGVHLHHRQAAVVHSDDLPALAPQNRLRGQSFDISTLPTQSSSSPKGESLNGYTFFWGGLVRIDILKALPETCFTFYGPKALEIHAVPTKTATAFYEAKLGVLLTPPSGKNQMQEWKGLQSHRLLQIEINDAKRPASDVAISGLGWISIEPIRKTRGTEPRDLNEAEHEIHICVSVPKPVEVFLRPTLPIGTSGTEWYQYRELTDKEEEVRPKWYF

SEQ ID NO: 26803 - protein, 911 aa, Arabidopsis thaliana
MGAHSVFLILFSVIAIAIVVHGQGQAGFISIDCGSPPNINYVDTDTGISYTWDAPFINAGVNLNVSEEYGYPKNPVLPFPLADVRSFPQGNRNCYTLTPSDGKGNLYLIRASFMYGNYDGKNALPEFDLYVNVNFWTSVKLRNASENVIKEILSFAESDTIYVCLVNKGKGTPFISALELRPMNSSIYGTEFGRNVSLVLYQRWDTGYLNGTGRYQKDTYDRIWSPYSPVSWNTTMTTGYIDIFQSGYRPPDEVIKTAASPKSDDEPLELSWTSSDPDTRFYAYLYFAELENLKRNESREIKIFWNGSPVSGAFNPSPEYSMTVSNSRAFTGKDHWISVQKTAESTRPPILNAIEIFSAQSLDEFYTRIDDVQAIESIKSTYKVNKIWTGDPCSPRLFPWEVLLMSLFLYFAARRNLSSSGLHGPIAFAFRNLSLLESLDLSNNNLKGIVPEFLADLKYLKSLNLKGNNLTGFIPRSLRKRATANGLALSVDEQNICHSRSCRDGNRIMVPIVVSTLVIILIAALAIICIMRRESKIMYSGAYSGPLLPSGKRRFTYSEVSSITNNFNKVIGKGGFGIVYLGSLEDGTEIAVKMINDSSFGKSKGSSSSSSSSQVSKEFQVEAELLLTVHHRNLASFVGYCDDGRSMALIYEYMANGNLQDYLSSENAEDLSWEKRLHIAIDSAQGLEYLHHGCRPPIVHRDVKTANILLNDNLEAKIADFGLSKVFPEDDLSHVVTAVMGTPGYVDPEYYNTFKLNEKSDVYSFGIVLLELITGKRSIMKTDDGEKMNVVHYVEPFLKMGDIDGVVDPRLHGDFSSNSAWKFVEVAMSCVRDRGTNRPNTNQIVSDLKQCLAAELAREPKSNHEKKEVVKEKYTKTKSTVQNYSSNEYNSSSGSVSLSFGDYSTFGPMAR

SEQ ID NO: 26804 - protein, 187 aa, Arabidopsis thaliana
MDSSTSTKKNTKLFVRNQTCFKKSSLSSSNAKKTTNLSMREQTMFKKALELSTLCDIEVCVIYYGRDGKLIKTWPEDQSKVRDMAERFSRLHERERCKKRTNLSLFLRKQILHDKKLSEKVLEMEDSLESGLRVLQDKLLLLQPEKNQTELGQSCAVYSTTYPLSSPSLIEDHQHQQQWTEPLSNTE

SEQ ID NO: 26805 - protein, 324 aa, Arabidopsis thaliana
MTMRSSLPSSSSAYSLASTSLSNRLETIFKKASELCTLCDIEACVIYYGPDGELKTWPPEREKVRDIALRYSQLNEALRRKKSVNLHGFLNKKKKNKGLKNTDKKRKTSLKKVNVLKYPLADHYPPDQVSPLIQSLELHVSKFHERLEFLESRKQNETQPDHHSLASSSLNHQTQSLNPSQFSLFMYNHGDNTLSQIPVSASNFNQDYFSALLEQSELKNQLMKQEICGNDQNQNMWMGNITNNNFQLPCVSVQESVNNFGLMHKEFYGCDHNMSVGNINSNSCEHPCVSSTQHYSAVEESVNNPWLNQLMQNELYGYGYADFC

SEQ ID NO: 26806 - protein, 567 aa, Arabidopsis thaliana
MINSVGVVRKEAENCNCLQVFFVSGSFKVDSVEAKKKEENFRETLRDMANSKYEYVKSFELEDEVMLPNLMVVRIDGRDFSRFSQVHEFEKPNDETALNLMNSCSAAVLEEFPDIIFAYGYSDEYSFVFKKTSRFYQRRASKILSLVASFFAAVYVTKWKEFFPQRKLLYAPSFSSKVVSCASAEVLQAYLAWRQQDCHANNQYDTCFWMLVKSGKSVSETQEILKDTQKQQKNELLFQKFGINYKTLPELFRQGSCLFKKKVEETVKHDENGNPVKRLRRKAVFVHSENIAGRSFWNEQPSLYNDLGHFTKDIGKIEPDFIRSFQFENKLLPLTWVVVRIDGCHFHRFSDVHEFEKPNDEQALKLMNSCAVAVLEEFEDIHFAYGVSDEYSFVLKKESELYKRQSSKIISAVASFFTSTYVLQWGEFFPHKELKYPPSFDGRAVCYPTYNILLDYLAWRQVDCHINNQYNTCFWMLVKSGKNKTQSQDYLKGTQTREKNELLSRQFGIEYNSLPVIFRMGSSVFRLKEAENGVVSGKKLEGEVVVDHCNIIERCFWEEHLHILSYS

SEQ ID NO: 26807 - protein, 416 aa, Arabidopsis thaliana
MEAKPLASSSSEPNMISPSSNIKPKLKDEDYMELVCENGQILAKIRRPKNNGSFQKQRRQSLLDLYETEYSEGFKKNIKILGDTQVVPVSQSKPQQDKETNEQMNNNKKKLKSSKIEFERNVSKSNKCVESSTLIDVSAKGPKNVEVTTAPPDEQSAAVGRSTELYFASSSKFSRGTSRDLSCCSLKRKYGDIEEEESTYLSNNSDDESDDAKTQVHARTRKPVTKRKRSTEVHKLYERKRRDEFNKKMRALQDLLPNCYKDDKASLLDEAIKYMRTLQLQVQMMSMGNGLIRPPTMLPMGHYSPMGLGMHMGAAATPTSIPQFLPMNVQATGFPGMNNAPPQMLSFLNHPSGLIPNTPIFSPLENCSQPFVVPSCVSQTQATSFTQFPKSASASNLEDAMQYRGSNGFSYYRSPN

SEQ ID NO: 26808 - protein, 460 aa, Arabidopsis thaliana
MGGGGDTTDTNMMQRVNSSSGTSSSSIPKHNLHLNPALIRSHHHFRHPFTGAPPPPIPPISPYSQIPATLQPRHSRSMSQPSSFFSFDSLPPLNPSAPSVSVSVEEKTGAGFSPSLPPSPFTMCHSSSSRNAGDGENLPPRKSHRRSNSDVTFGFSSMMSQNQKSPPLSSLERSISGEDTSDWSNLVKKEPREGFYKGRKPEVEAAMDDVFTAYMNLDNIDVLNSFGGEDGKNGNENVEEMESSRGSGTKKTNGGSSSDSEGDSSASGNVKVALSSSSSGVKRRAGGDIAPTGRHYRSVSMDSCFMGKLNFGDESSLKLPPSSSAKVSPTNSGEGNSSAYSVEFGNSEFTAAEMKKIAADEKLAEIVMADPKRVKRILANRVSAARSKERKTRYMAELEHKVQTLQTEATTLSAQLTHLQRDSMGLTNQNSELKFRLQAMEQQAQLRDGMHIIKSIHSQN

SEQ ID NO: 26809 - protein, 401 aa, Arabidopsis thaliana
MGTSTTESVVACEFCGERTAVLFCRADTAKLCLPCDQHVHSANLLSRKHVRSQICDNCSKEPVSVRCFTDNLVLCQECDWDVHGSCSSSATHERSAVEGFSGCPSVLELAAVWGIDLKGKKKEDDEDELTKNFGMGLDSWGSGSNIVQELIVPYDVSCKKQSFSFGRSKQVVFEQLELLKRGFVEGEGEIMVPEGINGGGSISQPSPTTSFTSLLMSQSLCGNGMQWNATNHSTGQNTQIWDFNLGQSRNPDEPSPVETKGSTFTFNNVTHLKNDTRTTNMNAFKESYQEDSVHSTSTKGQETSKSNNIPAAIHSHKSSNDSCGLHCTEHIAITSNRATRLVAVTNADLEQMAQNRDNAMQRYKEKKKTRRYDKTIRYETRKARAETRLRVKGRFVKATDP

SEQ ID NO: 26810 - protein, 359 aa, Arabidopsis thaliana
MATLVYFQFTFAAITTILVAGSVLGRMNIKAWMAFVPLWLIFSYTVGAYSIWGGGFLYQWGVIDYSGGYVIHLSSGVAGFVAAYWVGPRPKADRERFPPNNVLLMLAGAGLLWMGWSGFNGGAPYAANLTSSIAVLNTNLSAATSLLVWTTLDVIFFGKPSVIGAIQGMVTGLAGVTPGAGLIQTWAAIIIGVVSGTAPWASMMIIHKKSALLQKVDDTLAVFYTHAVAGLLGGIMTGLFAHPDLCVLVLPLPATRGAFYGGNGGKQLLKQLAGAAFIAVWNVVSTTIILLAIRVFIPLRMAEEELGIGDDAAHGEEAYALWGDGEKFDATRHVQQFERDQEAAHPSYVHGARGVTIVL

SEQ ID NO: 26811 - protein, 341 aa, Arabidopsis thaliana
MMHQMLNKKDSATHSTLPYLNTSISWGVVPTDSVANRRGSAESLSLKVDSRPGHIQTTKQISFQDQDSSSTQSTGQSYTEVASSGDDNPSRQISFSAKSGSEITQRKGFASNPKQGSMTGFPNIHFAPAQANFSFHYADPHYGGLLAATYLPQAPTCNPQMVSMIPGRVPLPAELTETDPVFVNAKQYHAIMRRRQQRAKLEAQNKLIRARKVPYLHESRHVHALKRPRGSGGRFLNTKKLLQESEQAAAREQEQDKLGQQVNRKTNMSRFEAHMLQNNKDRSSTTSGSDITSVSDGADIFGHTEFQFSGFPTPINRAMLVHGQSNDMHGGGDMHHFSVHI

SEQ ID NO: 26812 - protein, 196 aa, Arabidopsis thaliana
MKQSSFSSSSSSRNSTSLTNRLKTIFKKAEELSILCAIDVCVIYYGPDGELRTWPKERNTVKDMASRYKEATKRKKKRTLSTLQERLRIVESQKQQNKNLVHQSLTPSYLNQIQHLNPSNFSPYMYNHGDAATLSQLPLSASLSNQLQLPESLDAAWFWSEHVFGQHHQQQQLSTSWRVKHTRILTVSFGTSICSE

SEQ ID NO: 26813 - protein, 453 aa, Arabidopsis thaliana
MEESSNQQILNSETRPDPIQKPPESPATKLSFPRLFLWFDQSNRIKTLLSWSIFFLLAVIVPMISHFVLICADCDFKHRRPYDGLVQLSLSIFAGISFVSLSDWSKKYGIRRFLFFDKLKDVSDKVRIGYEAKIQRSMKLLAIFVLPSTTLQAIYRIWWYASGFNQIPYIINPTLSHVLACTLQLSSWLYRTSLFIIACILYQNICHLQVLRLDEFARCFASEIKDFSSILAEHLKIRRELKIVSHRFRRFILLSLFFVTATQFMALLTTIRASVPFNIYEVGELALCSTSLVSGLFICLKSATQMTHKAQSVTSIATKWNVCASLDTFDVLYDGETPKCPTTTQHSQILSRRRNVVQSSDDDEEGEGDDNDLEIHPIFARAISSQKRQALVTYLENNRAGITVYGFLVDKTWLRMIFSIELALLLWLLKKTISNFICFYSESIFSFFITFLL

SEQ ID NO: 26814 - protein, 401 aa, Haemophilus influenzae R2846
MSKLVLILNCGSSSLKFAILDPATGEEKLSGLAEAFFLPEARIKWKLNGEKGNADLGAGAAHTEALNFIASNILNDELKNSIAAIGHRIVHGGEKYTQSVIVTDEVVKGIEDAAQFAPLHNPAHLIGIREAFKAFPHLKDKNVVVFDTAFHQTMPEEAFLYALPYSLYKEHGVRRYGAHGTSHYFVSREVAKYVGKPADQVNAIICHLGNGGSVSVVRNGQCIDTSMGLTPLEGLVMGTRCGDIDPAIVFYLYKTLGMSMDQIEETLVKKSGLLGLTEVTSDCRYAEDNYDDESKPETRRALNVYSYRLAKYIGAYMAVLGDDHLDAIAFTGGIGENSAHVRELALNHLKLFGIKIDHERNLATRFGKDGVITTDDSAFKAIVLPTNEELVIAQDTAKICF

SEQ ID NO: 26815 - protein, 711 aa, Haemophilus influenzae R2846
MSRTIILIPVSTGVGLTSISLGLIHSLEQKGTKVAFMKPVSQPSTGEDKLDRTTSIIRTSTSLETAEPFMLSVAESLIGQNQSDVLLEKIVANHQQLTKNNDIVVVEGLIPTRKHGYANSINYEIAQALDAEIVLVAAPATETPTELKDRVEAAASLFGGKNNPNLLGVVVNKFNAPVDESDRTRPDLAEIFDSFQHNHISETEVNKLFAGSAIKLLACVPWNANLIATRAIDLVKHLGASIINEGEINRRIRGITFCARSLSNMIEHFRAGSLLVASADRPDVIVAASLAAANGIEIGGILLTGGYKIDAQINKLCRPTFEKAKLPIFRIEGNTWQTALSLQSFNLEVPVDDKERIENIKQYISQHFNADFINNLVADSSRLPRLSPPAFRFQLTELARAAKKRIVLPEGDEPRTIKAAVLCAERGIAECVLLADPASVQRVAEAQGVKLGKGITIINPADVRENYVDRLVELRKAKGMTETAAREQLEDTVVLGTMMLEANEVDGLVSGAVHTTANTIRPPMQIIKTAPGSSIVSSIFFMLLPDQVLVYGDCAVNPDPTAEQLAEIAIQSADSAKAFGIDPKVAMISYSTGTSGSGADVEKVKEATRIAKEKRPDLLIDGPLQYDAAVMEDVARSKAPNSPVAGKATVFVFPDLNTGNTTYKAVQRSADLVSIGPMLQGMRKPVNDLSRGALVDDIVYTIALTAIQATQ

SEQ ID NO: 26816 - protein, 444 aa, Haemophilus influenzae R2846
MSNTILQNLPKGQKVGIAFSGGLDTSAALLWMRQKGAVPYAYTANLGQPDEDDYNAIPKKAMAYGAENARLIDCRAQLAHEGIAAIQCGAFHISTGGIPYFNTTPLGRAVTGTMLVAAMKEDDVNIWGDGSTFKGNDIERFYRYGLLTNPNLKIYKPWLDAQFIEELGGRLEMSQFLIENGFDYKMSVEKAYSTDSNMLGATHEAKDLEQLSTGMKIVKPIMGVAFWDEKVEIKPETVTVTFEEGVPVALNGKRFDNAVDIILEANRIGGRHGLGMSDQIENRIIEAKSRGIYEAPGMALLHIAYERLVTGIHNEDTIEQYRINGIRLGRLLYQGRWFDPQALMLRETAQRWVAKAITGTVTLELRRGNDFTILNTESPNLTYEAERLSMEKVEDAPFDPIDRIGQLTMRNLDVSDTRGKLSIYAQTGLLSAIKDSVLPQLGKK

SEQ ID NO: 26817 - protein, 184 aa, Haemophilus influenzae R2846
MNKAIFLDRDGTLNIDYGYVHEIDNFKFIDGAIDALRELKKMGYMLVLVTNQSGIARGYFSEEQFLQLTEWMDWSLAEQDVDLDGIYYCPHHPEGKGEYKEDCDCRKPKSGMLLQAIKELKIDPTQSIMVGDKVEDLKAGIGAKVKMNVLVRTGKPVTGEGEGIADYVLDSIVDLPRILKRLKK

SEQ ID NO: 26818 - protein, 286 aa, Haemophilus influenzae R2846
MLRPKKQSLKPKLKHRPFLKWAGGKFRLTDEINKAFPNKKNCLIEPFVGAGAVFLNSNFERYILADINPDLINLFNIVKENVDGYIEDCKPIFFADDANTPDYYYAKRRQFNASTDPFERSIIFLYLNRFGFNGLCRYNSKNEFNVPFGAYKTHYFPEDELRYFAHKAQSAVFLCCDFQKTFEFADKDSVIYCDPPYAPLQQETNFTGYAGNEFGLAQQRALADLAKSIQKEKQISILISNHDTKFTREIYNGAKFKRVKVQRSISQNPEKRVKVKELIAIFGARK

SEQ ID NO: 26819 - protein, 284 aa, Haemophilus influenzae R2846
MASENQKLSSVALTPVEATDYAENTATYKANKRPFLSFMSGISAGACIALAFVFYTTTQTASAGAPWGLTKLVGGLVFSLGVIMVVILGSELFTSSTLTLVARVGGRITTTQMIRNWIVVYLGNFVGGLFIAVVIWFSGQTMAANGQWGLTILATAQHKIHHTWFEAFNLGILCNIMVCVAVWMSYSGKTVTDKAFIMIMPIGLFVASGFEHCVANMFMIPMGIITAHFSTPEFWQQIGVDPMKYADLDLYHFIVKNLIPVTLGNIVGGAICIGVFQRYLTKTH

SEQ ID NO: 26820 - protein, 404 aa, Haemophilus influenzae R2846
MSYTFSTYETLALASLVLLLGYFLVKRINVLKTFNIPEPVVGGFIVAIGLLIWHKIDGTSFNFDKNLQTTMMLVFFTSIGLSANFSRLIKGGKPLVVFLFIAALLIFGQNVIGIASSMALGIHPAYGLLAGSVTLTGGHGTGAAWADTFAHQFNLQGATEIAIACATFGLVFGGIIGGPVARFLLNRQKQGENPENDEVDDIQEAFEHPTYKRKITARSLIETIAMISVCLLIGQYLDVQTKGTALQLPTFVWCLFTGVIVRNILTNIFRFQVAESAIDVLGSVGLSIFLAIALMSLRLWELAGLAIDVLIVLAIQVAFMAAFAIFITYRAMGKDYDAIVLSAGHCGFGLGATPTAIANMQAVTSRFGPSHKAFLIVPMVGAFFIDLINAALLKVSFAVVNMLA

SEQ ID NO: 26821 - protein, 315 aa, Haemophilus influenzae R2846
MPDIKLFAGNATPELAKRISERLYISLGDATVARFSDGEIQVQINENVRGADVFIIQSTCAPTNDNLMELVVMVDALRRASAGRITAVIPYFGYARQDRRVRSARVPITAKVVADLLSIVGIDRVLTCDLHAEQIQGFFDVPVDNVFGSPVLIHDILKKSDLENPIVVSPDIGGVVRARAVAKLLNDTDMAIIDKRRPRANVAQVMHIIGDVADRDCILVDDMIDTGGTLCKAAEALKERGAKRVFAYATHAVFSGAAAKNLASDAIDEVVVTDTIPLSEEIKAIGKVRVLTLSSMLAEAIRRISNEESISAMFN

SEQ ID NO: 26822 - protein, 613 aa, Haemophilus influenzae R2846
MTDKITFNDLGLPEFILKAVSDLGFETPSPIQQSCIPHLLNGNDVLGMAQTGSGKTAAFALPLLAQIDPSEKHPQMLVMAPTRELAIQVADACEQFVKYAQGTRIVTLYGGQRYDIQLRALKQGAQVIVGTPGRILDHIRRGTLNLSELRFIVLDEADEMLRMGFIDDVETVMAELPENHQTALFSATMPEPIRRITKRFMNDPQEVKIKVNNENAPDIEQSCWYVHGVRKNEALLRFLEVEDFDAAIIFARTKTGTLDITELLEKNGFRSAALNGDMTQQLREQTLDRLRNGSLDIVVATDVAARGIDIERISLVVNYDIPLDAESYVHRIGRTGRAGRSGRALLFVEPRERRLLRNIEHLMKKGINEVELPNHLVLQECRRKKFVAKITKQLEHHDLEQYRSLLEDLFTADQDQENIAAAMLMLLQGKQKLILPPDPPMEKRRRERNDRGDRRENPRSAERRGECKGYGNPQPMDLYRIEVGRADGVEVRHIVGAIANEGDINSRYIGHIKLYDDYTTVELPQGMPKELLQQFGKTRVLNKQMQMSFLGAVKSDNSRGSDDFNGKRKGRGGDFRGERGRERGNDNRGNRKFNEKSNRTFSDKPRRDRRSSF

SEQ ID NO: 26823 - protein, 404 aa, Haemophilus influenzae R2846
MRLFPKSDKLEHVCYDIRGPVHKEALRLEEEGNKILKLNIGNPAPFGFEAPDEILVDVLRNLPSAQGYCDSKGLYSARKAIVQYYQSKGILGATVNDVYIGNGVSELITMAMQALLNDGDEVLVPMPDYPLWTAAVTLSGGKAVHYLCDEEANWFPAIDDIKAKVNAKTKAIVIINPNNPTGAVYSKELLQEIVEIARQNNLIIFADEIYDKILYDGAVHHHIAALAPDLLTVTLNGLSKAYRVAGFRQGWMILNGPKHNAKGYIEGLDMLASMRLCANVPMQHAIQTALGGYQSINEFILPGGRLLEQRNKAYDLITQIPGITCVKPMGAMYMFPKIDVKKFNIRSDEKMVLDLLRQEKVLLVHGKGFNWHSPDHFRVVTLPYVNQLEEAITKLARFLSDYRQ

SEQ ID NO: 26824 - protein, 390 aa, Haemophilus influenzae R2846
MKFIDESLIRIEAGDGGNGCVSFRREKFIPKGGPDGGDGGDGGDVYLQADENLNTLIDYRFNKRFAAERGENGRSSDCTGRRGKDIILPVPVGTRAIDNDTKETLGDLTQHGQKMLVAKGGYHGLGNTRFKSSVNRAPRQKTMGTPGEKRDLLLELMLLADVGMLGFPNAGKSTFIRAVSAAKPKVADYPFTTLVPSLGVVKVDDSHSFVVADIPGLIEGAADGAGLGIRFLKHLERCRVLIHLVDIAPIDGSNPADNVAIIESELFQYSEKLSEKPRWLVFNKIDTMSDEEAEERVREITEQLGWEEDYYLISAATGKNVPPLCRDIMDFIIANPREAETQQVAPEEVKFKWEDYHQEQLAEYQFDDDEDWDDDWTEEDDEGIEFIYKP

SEQ ID NO: 26825 - protein, 286 aa, Haemophilus influenzae R2866
MLRPKKQSLKPKLKHRPFLKWAGGKFRLTDEINKAFPNKKNCLIEPFVGAGAIFLNSNFERYILADINPDLINLFNIVKENVEGYIEDCKPIFFADDANTPDYYYAKRRQFNASTDPFERSIIFLYLNRFGFNGLCRYNSKNEFNVPFGAYKTHYFPEDELRYFAYKAQSAVFLCCDFQKTFEFADKDSVIYCDPPYAPLQQETNFTGYAGNEFGLAQQRALADLAKSIQKEKQISILISNHDTKFTREIYNGAKFKRVKVQRSISQNPEKRVKVKELIAIFGARK

SEQ ID NO: 26826 - protein, 613 aa, Haemophilus influenzae R2866
MTDKITFNDLGLPEFILKAVSDLGFETPSPIQQSCIPHLLSGNDVLGMAQTGSGKTAAFALPLLAQIDPSEKHPQMLVMAPTRELAIQVADACELFVKYAQGTRIVTLYGGQRYDIQLRALKQGAQVVVGTPGRILDHIRRGTLNLSELRFIVLDEADEMLRMGFIDDVETVMAELPENHQTALFSATMPEPIRRITKRFMNDPQEVKIKVNNENAPDIDQSCWYVHGVRKNEALLRFLEVEDFDAAIIFARTKTGTLDITELLEKNGFRSAALNGDMTQQLREQTLDRLRNGSLDIVVATDVAARGIDIERISLVVNYDIPLDAESYVHRIGRTGRAGRSGRALLFVEPRERRLLRNIEHLMKKGINEVELPNHLVLQECRRKKFVAKITKQLEHHDLEQYRSLLEDLFTADQDQEDIAAAMLMLLQGKQKLILPPDPPMEKRRREHNERGDRRENPRSAERRGERKGYGNPRPMDLYRIEVGRADGVEVRHIVGAIANEGDINSRYIGHIKLYDDYTTVELPQGMPKELLQQFGKTRVLNKQMQMSFLGAVKSDNSRGGDDFNGKRKGRGGDFRGERGRERGNDNRGNRKFNEKSNRTFSDKPRRDRRSSF

SEQ ID NO: 26827 - protein, 184 aa, Haemophilus influenzae R2866
MNKAIFLDRDGTLNIDYGYVHEIDNFKFIDGAIDALRELKKMGYMLVLVTNQSGIARGYFSEDQFLQLTEWMDWSLAEQDVDLDGIYYCPHHPEGKGEYKEDCDCRKPKSGMLLQAIKELKIDPTQSIMVGDKVEDLKAGIGAKVKMNVLVRTGKPVTGEGEGISDYVLDSIVDLPRILKRLKK

SEQ ID NO: 26828 - protein, 573 aa, Haemophilus influenzae R2866
MKKLSGAEMVVQSLRDEGVEYVFGYPGGAVLDIYDAIHTLGGIEHILVRHEQAAVHMADGYARSTGKVGCVLVTSGPGATNAITGILTAYTDSVPMVIISGQVMSNLIGSDAFQECDMLGISRPVVKHSFIVKKAEDIPSTLKKAFYIASTGRPGPVVVDIPKDTVNPNFKYPYEYPEYVELRSYNPTVNGHKGQIKKALKALLVAKKPILFVGGGAITAECSEQLIQFAQRLNLPVTSSLMGLGAYPSTDKQFLGMLGMHGTLEANTAMHESDLILGVGVRFDDRTTNNLEKYCPNAKVIHIDIDPTSISKNVPVAIPIVGNAKNVLEEFLGLLNEEGLKSQTDLESWWQEINQWKAKKCLEFDRTSGVIKPQQVVEAVYRLTKGQAYVASDVGQHQMFAALHYPFDEPRHWINSGGAGTMGFGFPAALGVKLAHPEGTVVCVTGDGSIQMNIQELSTATQYGIPVVIICLNNHFLGMVKQWQDLIYSGRHSQTYMNSLPDFAKLAESYGHVGIKIATPDELESKLQEAFSIKNKLVFVDINVDESEHVYPMQIRGGAMNEMILSKPQEETN

SEQ ID NO: 26829 - protein, 557 aa, Haemophilus influenzae R2866
MMSHTEISLGAENTRTHNFITQIIDEDLASGKHKSVHTRFPPEPNGYLHIGHAKSICLNFGLAKEYQGLCNLRFDDTNPVKEDVEYVDSIKADVEWLGFKWEGEPRYASDYFDVLYGYAIELIKKGLAYVDELSPDEMREYRGTLTEPGKNSPYRDRTIEENLALFEKMKNGEFAEGKASLRAKIDMASPFMVMRDPVIYRIKFASHHQTGDKWCIYPMYDFTHCISDAIERITHSICTLEFQDNRRLYDWVLENISIERPLPHQYEFSRLNLEGTLTSKRKLLKLVNDEIVDGWNDPRMPTISGLRRRGYTPASLREFCRRIGVTKQDNVVEYSALEACIREDLNENAPRAMAVIDPVRVVIENFESEAVLTAPNHPNRPELGERQLPFTKELYIDRADFREEANKQYKRLVLGKEVRLRNAYVIKAERVEKDASGEITTIFCTYDPETLGKNPADGRKVKGVIHWVSAVNNHPAEFRLYDRLFTVPNPGAEDDIESVLNPNSLVIKQGFVEQSLANAEAEKGYQFEREGYFCADSKDSRPEHLVFNLTVSLKEGF

SEQ ID NO: 26830 - protein, 512 aa, Haemophilus influenzae R2866
MLIGVPRELLENESRVAATPKTVQQILKLGFDVIVEHDAGFKASFEDQAFLEAGAKIGTSAEIWQSDIIFKVNAPTDEEIAQMKEGATLVSFIWRMQNPELMKKLTAKKINVLAMDAVPRISRAQALDALSSMANISGYRAVIEAAHEFGSFFTGQITAAGKVPPAKVLVIGAGVAGLAAIGAANSLGAIVRAFDSRPEVKEQVQSMGASFLEIDFKEEGGSGDGYAKVMSEEFNRRAMELYAEQAKEVDIIITTAAIPGKPAPRLITKEMVDSMKPGSVIVDLAAATGGNCEYTQAGKVVTTENQVKVIGYTDFPSRLPTQSSQLYGTNLVNLLKLLCKEKDGNINIDFEDVVLRGVTVVRDGEEIPPAQIQVSAQPKQETKAAPVAEKKESKPTDPRVKYGVMAGVGVLFLWLASVAPAAFLSHFTVFVLACVVGYYVVWNVSHALHTPLMAVTNAISGIIIVGALLQIRQPTGNLFIDALAFVAILVASINIFGGFRVTQRMLAMFRKG

SEQ ID NO: 26831 - protein, 311 aa, Haemophilus influenzae R2866
MNYLKIAQDSLSVESNALLQLSQRLGEDFNQVIDLILACEGRLVIGGIGKSGLIGKKMVATFASTGTPSFFLHPTEAFHGDLGMLKPIDIVMLISYSGETDDVNKLIPSLKNFGNKIIAVTSNKNSTLARHADYVLDITVEREVCPNNLAPTTSALVTLALGDALAVSLITARNFQPADFAKFHPGGSLGRRLLCKVKDQMQTRLPTILPTTNFTDCLTVMNEGRMGVALVMENEQLKGIITDGDIRRALTANGVETLNKTAKDFMTSSPKTIHQEEFLSKAEDFMKAKKIHSLVVVNDENHVVGLVEFSS

SEQ ID NO: 26832 - protein, 444 aa, Haemophilus influenzae R2866
MSNTILQNLPKGQKVGIAFSGGLDTSAALLWMRQKGAVPYAYTANLGQPDEDDYNAIPKKAMAYGAENARLIDCRSQLAHEGIAAIQCGAFHISTGGIPYFNTTPLGRAVTGTMLVAAMKEDDVNIWGDGSTFKGNDIERFYRYGLLTNPNLKIYKPWLDVQFIEELGGRLEMSQFLIENGFDYKMSVEKAYSTDSNMLGATHEAKDLEQLSTGMKIVKPIMGVAFWDEKVEIKPETVTVTFEDGVPVALNGKHFDNAVDLILEANRIGGRHGLGMSDQIENRIIEAKSRGIYEAPGMALLHIAYERLVTGIHNEDTIEQYRINGIRLGRLLYQGRWFDPQALMLRETAQRWVAKAITGTVTLELRRGNDFTILNTESPNLTYEAERLSMEKVEDAPFDPIDRIGQLTMRNLDVSDTRGKLGIYAQTGLLSAIKDSVLPQLGKK

SEQ ID NO: 26833 - protein, 356 aa, Camellia sinensis
MSLLSDLCNLNLSESTEKIIAEYIWIGGSGMDLRSKARTLNAPVSDPSKLPQWNYDGSSTGQAPGEDSEVILYPQAIYKDPFRRGNNILVMCDAYTPGGEPIPTNKRFDAAKIFSHPDVVAEEPWYGIEQEYTLLQKEVKWPIGWPVGGYPGPQGPYYCGIGADKAFGRDIVDAHYKACLYAGINISGINGEVMPGQWEFQVGPSVGISSGDQLWMARYILERITEIAGVVVSFDPKPIEGDWNGAGAHTNYSTKSMRSDGGFEVIKKAIEKLGLKHKEHIAAYGEGNERRLTGKHETADINTFLWGVANRGASIRVGRDTEKAGKGYFEDRRPASNMDPYVVTSMIANTTILWKP

SEQ ID NO: 26834 - protein, 473 aa, Bacillus cereus ATCC 10987
MNQNRIPLYEALIEFKERRPLSFHVPGHKNGLNFPQGAVEEFKDILSIDVTELSGLDDLHSPFECIDEAQQLLADVYEVEKSYFLINGSTVGNLAMILSCCREHDIVLVQRNCHKSIINGLKLAGANPIFLDSWIDEAYNVPVGIHDEIIKEAIEKYPNAKALILTHPNYYGMGMDLEASIAYAHAHKIPVLVDEAHGAHFCLGGAFPKSALAYGADIVVHSAHKTLPAMTMGSYLHINSRLVKEERVSTYLSMLQSSSPSYPIMASLDIARFTIARIKEKGHDEIVEFLREFKEELSSIPQIAILQYPLQDELKVTVQTRCQLSGYELQSVLEKVGIYTEMADPYNVLFILPLQVNKTYMKAVEMIRAALQSYEVKDKTESIRYTYKGEISPLPYTYKQLEGYETKVVSVEEAVGMIAAEMVIPYPPGIPLIMYGERITSEHKEQIMHLERAGARFQGSTKYMKVYDIESRF

SEQ ID NO: 26835 - protein, 633 aa, Bacillus cereus ATCC 10987
MNRIFRNTIFYLLIFLVVIGIVSYFNGSTQKTTSVSYDKFITKLEKGEVRNVQLQPKNGVFEVKGQFNNSSQGEQFVTYAPNTEELQKKINDKAQGAEVKYQPAEETSAWVTFFTSIIPFVIIFILFFFLLNQAQGGGSRVMNFGKSKAKLYNDEKKKVRFRDVAGADEEKQELVEVVEFLKDPRKFAEVGARIPKGVLLVGPPGTGKTLLARAVAGEAGVPFFSISGSDFVEMFVGVGASRVRDLFENAKKNAPCIIFIDEIDAVGRQRGAGLGGGHDEREQTLNQLLVEMDGFGANEGIIIIAATNRPDILDPALLRPGRFDRQITVDRPDVNGREAVLKVHARNKPLDENINLRAIATRTPGFSGADLENLLNEAALVAARQDKKKIDMSDIDEATDRVIAGPAKKSRVISEKERNIVAFHEAGHTVIGVVLDEADVVHKVTIVPRGQAGGYAVMLPKEDRYFMTKPELLDKITGLLGGRVAEEIVFGEVSTGAHNDFQRATGIARRMVTEFGMSDKLGPMQFGSSQGGQVFLGRDFHSEQNYSDAIAHDIDVEMQTIMKECYARAKDILTENRDKLDLIAKTLLEVETLDAEQINHLCDYGRLPERPTSSADVKVNINMKKDDEESEDK

SEQ ID NO: 26836 - protein, 468 aa, Bacillus cereus ATCC 10987
MAYTVLLVTSVNTYKEQLNHPIMSDVGKLLPTKIKRVESATDEHSLIKLVQDANVSGEKISIAGMQHSQGGQTYYPHGTMLDMKGYNKILEFDPEKKRITVQSGATWNDIQKKVNPYGLAVQVMQSQNIFTVGGSLSVNVHGRDIRHEALIDTVESFRLLMADGTVRNVSREENADLFPYVIGGYGLFGVILDVTLKLTNDELYETHTKMLDYKEYTSYFKEKVKKDENVRMHLARISVAPNSFFREMYVTDYTLAKNQNMREEYSKLKEETIIAAPKFLLGLSRYSDWGKDTFWDIQRSYFERTDGKYETRNNVMRSDSAFMEYENPNRTEVLQEYFVPIDFFTEYIDDLRNVLNEEEFNLLNITVRYVEKNENAVLSYAKDDMFALVLLINQGRSEHEIKKTENVIQKMIDVTLKHNGSYYLPYYSYPSKEQLRRAYPRIEEFLQKKKEADPKERFVNLFYREYTK

SEQ ID NO: 26837 - protein, 471 aa, Bacillus cereus ATCC 10987
  misc_feature (25)..(25): Xaa can be any naturally occurring amino acid
  unsure (1)..(471): unsure at all Xaa locations
MKQIFQKKPIAKLMQESKQKTLARXLGALDLTMLGIGAIVGTGIFVLTGVVAAKHSGPAIILSFAIAALACAFAAFCYAEFASSVPVSGSVYTYTYATMGEVFAFLIGWDLMLEYLLATSAVANGWSAYFQSLLKGFGIHIPTILSSAPGTGKGGIIDLPAVLIILVMTVLLSRGVRESARVNNIMVFIKLAVVLIFIFAGFNYVKPENWTPFMPFGLDGVMAGAATVFFAFIGFDAVSTAAEEVKRPQRDLPIGIIASLLICTALYIIVSLILTGIVPYGQLNISDPVAFALQFIGQDSLAGVISVGAITGITTVMLVMMYGQVRVSYAMSRDGLLPKRLAKVHPKFKTPFLNTWTTGIIAALISGLIDLNVLAHLVNMGTLSAFALVAVAVIVMRRTHPDLPRAFKAPLVPFLPALTVIFCLYLMLQLSGTAWISFGVWMIIGIAVYFLYSRKHSALNNSKEEDDAANL

SEQ ID NO: 26838 - protein, 229 aa, Bacillus cereus ATCC 10987
MNRRNVVKDLKQFELFAHLTEKKLKGLTEFVYWRTYKKGQFLFLEGDSRERIYFMLDGFVKLERVNQSGNLLYDDYVKRYSIFPYGGMFTDRGYNYTAEAMTDVEVYYIPTVIFEDMVKSSRTQLMYVVQQLSSILKLNENRVQNITIPNAQDRVIQTLNYLMQDLGEQSGETIVISCPLTTIEISKISGTSRETVSSVLKQLKNDSIVTILDKKITIHNPTYFEEISM

SEQ ID NO: 26839 - protein, 586 aa, Bacillus cereus ATCC 10987
MQGIKRYLQFVKPYRWLIAITIMIGLVKFGIPLIMPWLLKYIIDDVIQGGGSFQDKTSQLVTAIGIAFFIFAVLRPPIEYYRQYFAQRIANTILYDLRKHIFGHLQKLSLRYYSNTKTGEIISRVIHDVEQTKDFVITGLMNVWLDTATIAIAIIVMFSMNIKLTFVALLILPIYVVAVKYFFGRLRKLTKERSQALATMQGYLHERIQGMQVTRSFALEEYEGKQFEKRNNEFLTKALTHTSWTARTFSAVNTLTDLGPLLVIGFAAYEVIQGQLTLGTMVAFVGYMDSLYSPLRRLVNSSTTLTQSFASMDRVFELLDEKYDIVNVPGAVQTKKLNGEVIFDNVSFRYNSDEKEVLHNLSLTMLPGEKVALVGASGGGKSSLASLIPRFYDVSSGAVYVDGIDVRKYDMRNLRSHIGIVLQDNLLFSDTIGANILYGNPKATEEEVIAAAKAAQIHDFIIELPDGYDTVVGERGVKLSGGQRQRVAIARVFLKNPSLLILDEATSALDLENERYIQEALQTLAADRTTIIIAHRLATITHVDTIIYIEDGEIKETGSHEELMKKRGFYYNLYQLQHITETAPLA

SEQ ID NO: 26840 - protein, 1478 aa, Bacillus cereus ATCC 10987
MLNKTNTWTPSLFRDYKNAEHDACGIVSVMEKRKIPTKENIDLCIQSLVKMNHRAGFINGEGDGIGIHIDVPKALWNEKLKSSGYNPTIVDHPHFIVGHFFLNKNENIVNLKNHIRTQLNNENFAILFESDDVINSDALGPLGKQEEPLFWQVALIAENEVTNIEQTLFTVTIKIEENEAIHVASLSRDHVVYKVLGAGDTLVAYYNDLQHPLIASTMTLGHNRYSTNTLSNFFRVQPFSILGHNGEINTIAKLRDQAEMIHVPLTAGGSDSQDLNRTLETLLVQYNYSLFEAMDILFPPIINEIKLYEPHLQDLYTYIREAWGHFAQGPAGIISRYKDEAVFSVDSLGLRPVWKVETESSYIFSSEPGVVSPTEYVAEPKPLAPGEKVGLKWNEQDELVLYAYDKYQAQVYDRFKKRVDTKDYHLNLSTPETKEIQGLCDSMQVETKQYVAFGWDREHIQLLEQMATKGVEPIRSLGHDSPLAALDTDRRNIADFIKESVAVVTNPAIDRDREVEHFSTRTILGKRPSLLAGAKQPFVVEMLSPIILEGSVAQSIVEELHTITYEQLIQLFNTHSSIATISATFSQAETLQCALSRISSEAITAVNDGASLLLIDDADAHLNGRLWIDPHLVTAKVHQVLSENKLRRNCSLVIRSGALRSLHDIVTLYGLGADSINPYLLFATVNDGTKTPITNLYHALNKGLEKVISTIGIHELRGYGRLYSSIGLHEEIANILQITNFLGSNDLAFSLESLAEDAQMRANDYNNPKVRMRKSFHIFPRIWKAIGDVAKGNSYDDYREKLSELEENNPIAIRHLVQTKETKHVVPAEEVSISIQNHDLPFIISSMSFGSQNEIAFRAYAEAADQLNMISLNGEGGEIKDMIGKYPHTRGQQIASGRFGVNAELLNSSNLIEIKIGQGAKPGEGGHLPGSKVTAKIAEARNATIGSDLISPSNNHDIYSIEDLAQMITEIKTANQLAKVAVKVPVVPNIGTIAVGIAKAGADFINISGFDGGTGAARIHALQHVGLPVEIGVKAAHNALLEANMRHKVEIWADGGIRSVNDALKIMLLGANRIGFGTLSMIAIGCTTCRGCHLDTCHVGIATQIESEAQAKEHGLRRFVPRELESAVAGLLHLFTTFGEELKRLTGNLGYTNLQEIVGRSDLLKQVRGKNLLNLCNLLQTIEHPSSTKTEHVLEKQFETIHSPHSKELVGVGVEQRVMGGLESCYRVRSKLYEDTKLEPLTLKYTNGSIPGNGLGAYNSENLFIHVNGGAQDGIGKTSFGGGIYITKAKGKDGLYYNGSVGKGFGYGAQKGALYVQGNADARAGIRLSGADMIIGGRMIKPLREKEQGNIGAYSNIKGFAFEYMTNGRALVLGDPGPWICAGMTGGVVYLRHDSSLGLTEQALKRRIAKGANVTLQPLSKNGVQDVTELLLDYIRVLNEHEQYEEVALLTPLLDDMPQQFFEIIPKKEQADPSISTE

SEQ ID NO: 26841 - protein, 286 aa, Bacillus cereus ATCC 10987
MKKFLTFIIIGLLSILVVACGSNEKKTEKTSAKPSGKIEEIKERGELVVAVFTDKPPFGYVDKDGKNVGFEIDMAKRFAKDLLGDESKVKFVPVEAASRIPYLQSDKVDFVLANMTATDERKKVVDFTNPHLKVAVQVLVKDGSPIQSVKDLEGKKVIVTKGTTADIYLTKNMKNVELIKFDKNTEALQALKDGRADSYAQDNLVLLSWANKNPGFHLLKDKLGGDDLIAIAVKKGNKEVHDWVNKELEKLGKENFLHTLYDKHLKEEFGPQISPESVITEGGKVN

SEQ ID NO: 26842 - protein, 516 aa, Bacillus cereus ATCC 10987
MIKKENSVFYISILLTTLFIIWGITPASWIQGYDLQSVTSSLNSFILNKFGWFYSLLMTTMIILAAYLAFSKYGSIRLGKDGEKPKYSYPSWLSMLFGAGMGIGLLFYGIAEPISHFTDPLTGKAGTEESAKLAMQYSFFHWGLFPWSLYAMVALTIAYFTFRKQKGSTIGATVTPLFNRSKNSPIGKTVDILAVLATVFGIVPSVGIGAQQIAGGLSYLFPSIHNTLLTQLILIAIFAVLYLTSAQTGLDRGIKYLSNLNFSLAGILLVSFLLLGPTVFIMKYFTSTLGSYIGALPSMGLNLGAFNEKSSSWIENWTIFYWGWWISWSPFVGTFIARISKGRTIKEFIFGVVLVPTLICTFWFAVFGGTAIHMEMFQSLGIADEIAKNGTEIGLFAVISHLPFSTFLTIIGLILVATFFVTSADSATFVVSMQTSNGSLSPKNSLKLIWGLTIAIIAAILLQVGGLNALQIAAIIAALPFSIVVVLMVTSLFKELRKEDVNLQTKEVPKKIKKVM

SEQ ID NO: 26843 - protein, 276 aa, Bacillus cereus ATCC 10987
MLKMKKLFTLIVFSCLFVLVVAGCGSKKDEAKETNTKQGGAVEQIKKRGKLVVGVKNDTNLFGLKNPSTGQVEGFDVDVAKALAKKILGDEKKLELKEVTSKTRIPLLKNGDIDAIIATMTITEERKKEVDFSDVYFKAGQSLLVKKGSDIKSIDDVKKGVKVLAVKGSTSTNNIRQKSPEATVLEFENYSEAFTALKAGKGDVLTTDNAILYGMAKQDSNYEVVGKIFTDEPYGIAVQKGADDLTKEINSLIKDMKASGEYDKLYEKWIGQKPEK

SEQ ID NO: 26844 - protein, 437 aa, Bacillus cereus ATCC 10987
MLSIKGQKWRNWTGNVEGTPHYTMYPESIQDVVEVVELARKEGKKIRVVGSGHSFTPLVQTEEILVSLDELKGIVNVDAEKMVAEVWAGTKLHELGKLLEEKGYAQENLGDIDSQSIAGAISTGTHGTGITFGSLSTQVIEITAVLSTGESIVCSQTENVQYWRAFQLSLGMLGIIVKIKLKVIPAYSLVYKSEKQSLSTVMNKLEEYKKNRHFEFFVFPYSDEVQVKITNETTGKKSDLKWHKLKVELLENKMFSLLSKGCKWFPSISKGVSRLSAKAVPNTKIIGPSYEVFATSRAVPFYEMEYSVPSKYMQVVVEEISNLIEKKKYKVHFPIECRYVKRDDIWLSPAYGRDSAYIAVHMYKGMKYAAYFGEVEKIFLKYEGRPHWGKMHTLTYEKLQNIYPELHSFLKVRKLLDEAEMFSNPYTEKLFTIMKKS

SEQ ID NO: 26845 - protein, 463 aa, Bacillus cereus ATCC 10987
  misc_feature (244)..(244): Xaa can be any naturally occurring amino acid
  misc_feature (260)..(260): Xaa can be any naturally occurring amino acid
  misc_feature (276)..(276): Xaa can be any naturally occurring amino acid
  unsure (1)..(463): unsure at all Xaa locations
MQHTNKSGTLNRGLKERHITLMSLGSAIGVGLFLGSASAIKLAGPSILLGYMIAGLVIFFIMRALGEMAIEQPVAGSFSKYAYDYLGPLAGYITGWNYWFLWVVTCMAEITAAGIYMQYWFPDIPRWTWALLALLLMSAFNFLSVKVFGELEFWFALIKIVTIICMIVVGAGIILFGFGNGGIATGISNLWSHGGWFPNGFSGLLLSMQMVLFAYLGVELIGVTAGEAQNPKKTLAKAIDNVFXRILLFYVGALFVMMAXYPWNELGEKGSPFVLXFQQIGIAKAAGIINFVVLTAALSSCNGGLFSTGRMLYTLAQQKKAPERFGRLNKNGIPSQGIVATAIVLLVGVILNYLVPAKVFTWLTSISTFGAIWTWGIILVAQIKFRKSLPTQNKQKLSYKMPLYPLSSYFSLAFLALVLCIMAYSEDTRIALIVGPIWLIGLAVVYYMKGFHKIDETPNSKIS

SEQ ID NO: 26846 - protein, 490 aa, Bacillus cereus ATCC 10987
MTALLIIILFLFLALFLGIRAQHGKDMNLEQWSVGGRGFGTIFVFLLMAGEIYTTFTFLGGSGWAYSKGAPTFYILGYGALAYILSYFLLPPVWKYAKEHNLVSQPDFFVKKYKSQALGLIVSIIGVISIIPYLVLQLKGLGIIVSEASYGRVSPVIAVWIGAIVITIYVMVSGIHGSAWTAALKDIMILFIVMFLGIYLPYHYYGGFQPMFEAVEAAKPGFLSLPDEGMSISWFVSTIVLTALGFYMWPHTFASAFSAKNEKVFRKNAAIMPLYSLVLLFVFFAGFAAILQVPGLKGGDVDLSLFRLALQTFDPWFIGIIGSAGVLTALVPGSMLVMAASTLLAKNIYRTMVPSASDRQVAKTAKLFVPVVTLVAVLFTFKGGETIGALLLMGYSIVTQLFPALVCSLFPRQVITKQGAIAGMGIGLLVVAYITLSGSTIATMFPSFPQYIKDLNVGIVALLMNMIVMFIVSGFTKNVSIKTDNIIVGK

SEQ ID NO: 26847 - protein, 467 aa, Bacillus cereus ATCC 10987
MKSLLRKKAITTESPRQLQRTLTALDLTFLGIGAVIGTGIFVLTGIVAAKHSGPGIMLSFLIAAFTCACVAFCYAEFASSIPVSGSVYTYAYMTVGEVVAFIVGWCLMLEYLLAVAAVAVGWSGYLQSLLQGFNIHLPAIIASAPGVGKGGLIDLPAVCILLIITGLLSFGIRESARINNIMVLIKLAVIIAFIVAGAKYVKPENWTPFIPFGYDGIITGAATVFFAFLGFDAIATAAEETKKPQRDLPIGIIGSLLICTVLYMIVSFVLTGMVPYTQLDVSDPVAFALHFVGEDTIAGLLAVGAMTGMTTVLLVVMYGQVRVSYAMSRDGLLPKALARVNKRVKIPLLNTWITGVVAALLAGLLDLHVLANLVNIGTLTAFTFVCCAVLILRKTHPDLKRGFRTPFVPVLPVVAILCCLYLMANLSKTTWISFIAWLIVGLCFYFFYSRKHSHLATEKANDEQKKA

SEQ ID NO: 26848 - protein, 247 aa, Bacillus cereus ATCC 10987
MSELLRVENVTGGYTKRPVLKDVSFSVNKGELVGLIGLNGAGKSTTIKHIIGLMEPKKGTVTINGKTIRDDMTAYRSSFSFIPETPVLYDELTLEEHLKLTAMAYGVDEKQYEERVGQLLQEFRMKNRLKWFPSHFSKGMKQKVMIMSAFLVEPSLYIVDEPFVGLDPLAIQSLLQMMDQMKKSGAGILMSTHILATAERYCDSFIILHQGEVRAKGTLSELQSQFHMPGATLDDIYIALTKEEDYE

SEQ ID NO: 26849 - protein, 67 aa, Bacillus cereus ATCC 10987
MAVTGQVKWFNNEKGFGFIEVPGENDVFVHFSAIETEGFKSLEEGQKVSFEIEEGNRGPQAKNVIKL

SEQ ID NO: 26850 - protein, 615 aa, Bacillus cereus ATCC 10987
MCGITGWVDYKRSLEGERDVVTKMAETLAKRGPDDNKVWIKGNVAFGHKRLIVVDPEGGKQPMTCLKGETNYAICYNGELYNTEDIRKELLRRGYTFKGHSDTEVLLASYMEWKEECVDHLNGIYAFAVWDEQKEQVFIARDRLGVKPLFYKYDSGRLLFGSELKAILAHPDVKAEVTLEGLSEIFGLGPSRTPGHGIYAGIKELRPGHAMTFSKNGLCIWRYWNVESKKHEDSFEETVEKTRFLLQDAITRQLVSDVPLCTFLSGGVDSSAITAIAAKEYERSGKGQLHTYSIDYEDNDKYFKANAFQPNSDAPFIHLMTETFQTIHHRCVISNEQLAQYLTEAVLVRDLPGMADIDSSLLWFCREIKQDFVVGLSGECADEIFGGYPWFYREDDLQSSAFPWMRSTEAREQLLKKEWRNKLNLQQYVQRRYEESIQEVPILEGESPIEAKRRQLFYLNMVWFMTTLLDRKDRMSMGASLEVRVPFADHRLVEYAWNIPWEMKMYKNREKGLLRKALEGLLPNDILYRKKSPYPKTHNPHYTKAVTVWLQDLLTDKGSILHELFDKEQLSGLIESGGSAFQTPWFGQLMTGPQLLAHLAQIHVWFKEYGVNIKE

SEQ ID NO: 26851 - protein, 492 aa, Bacillus cereus ATCC 10987
MSTQMLTLTSISIYMLGMLVIGYFAYKRTSNLTDYMLGGRTLGPAVTALSAGASDMSGWLLMGLPGAMFSVGLSSSWIAIGLTLGAYANWLYVAPRLRTYSEIANNSITIPEFLEHRFHDKSHMLRLVSGLVIMIFFTFYVASGLVSGAVLFENSFGMNYHVGLFIVAGVVVAYTLFGGFLAVSWTDFVQGIIMVIALILVPTVTIMNVNGLGPAFSTIKSIDPTLLDIFKGTSVLGIISLFAWGLGYVGQPHIIVRFMAISSVKEIKSARRIGMSWMIFSVVGAMFTGLIGIAYYSDKGLKLSNPETIFLELGKILFHPLITGFLLAAILAAIMSTISSQLLVTSSAVTEDLYRTFFKRSASDKELVFVGRMAVLVIALVGCALAFKQNDTILALVGYAWAGFGSSFGPAILLSLYWKRMTKWGALAGMISGAATVIIWTQFKFLKEFLYEMIPGFTISLLVIVIVSLLTQSSKDVEEHFETFEKQHSHNL

SEQ ID NO: 26852 - protein, 283 aa, Bacillus cereus ATCC 10987
MLEQGLDYVVKLAKSKKQMLDTNPMQYFIRAALAGIYIGFIIVLCFKLGNFFHIADSPATYLAASMFFGIALVLIIYGGAELFTGNTMYFTVATLRKETTISDTLRNWVTCYAGNLAGALFFALLFYATGIFETIDHSHFMNKVVEGKMNTPTMQLFFKAILCNWLVCLACFLPSQVKGDTAKIMIMMMLVFTFFLSGYEHSIANLSLFALSLVSPHPETISFAGAIHNLIPVTIGNIIGGSVFVGMVYHYLTKKVPDVKQEETELGAAQQEEIIPLQAHMKH

SEQ ID NO: 26853 - protein, 566 aa, Bacillus cereus ATCC 10987
MSSKTEEKLATGAQLLLEALEKEGVEVIFGYPGGAVLPLYDALYDCEIPHILTRHEQGAIHAAEGYARITGNPGVVIATSGPGATNVITGLADAMIDSLPLVVFTGQVATTLIGSDAFQEADIMGLTMPVTKHNYQVRKASDLPRIIKEAFHIARTGRPGPVVIDLPKDMVVEQGERCSDAQMDLPGYNPNYEPNLLQINKLLQAIRVANKPLILAGAGVLHAKASKELTSFARKYEIPVVHTLLGLGGFPPDEELFLGMGGMHGSYTANMALYECDLLINIGARFDDRLTGNLAYFAKEATVAHIDIDPAEIGKNVPTEIPIVASAKQALQVLLQSEGRTENHHEWISLLKNRKEKYPFSYKRNSESIKPQYAIDMLYEITKGEAIVTTDVGQHQMWAAQYYPLKNPDKWVTSGGLGTMGFGFPAAIGAQIAKPEELVIAIVGDAGFQMTLQELSVLKEHSLPVKVFILNNEALGMVRQWQDEFYNKRYSHSLLPCQPDFVALANAYGIKGVRIDDPLLAKKQLQHAIELQEPVVIDCRVLQSEKVMPMVAPGKGVHQMEGVEKR

SEQ ID NO: 26854 - protein, 323 aa, Bacillus cereus ATCC 10987
MAKILVAGKIPAIGLELLKDHDVEMYDKEELISLDELTERVKDKDALLSLLSTKVTKEVIDAAPNLKIVANYGAGYDNIDYSYAGEKGIAVTNTPKVSTEATAELTFALLLAAARRIPEGDTLCRTTGFNGWAPLFFLGREVHGKTIGIIGLGEIGKAVAKRAKAFGMNVLYTGPNRKPEAESELEATYVTLEELLQTADFITINCAYNPKLHHMIDEEQFKMMKKTAYIINASRGPIMHEAALAHALKTNEIEGAALDVFEFEPKITEELKGLKNVVLAPHVGNATFETRDAMAETAVRNILAVLNGEEPVTPVNQKVFVTK

SEQ ID NO: 26855 - protein, 540 aa, Bacillus cereus ATCC 10987
MSYEKVWANNEKLNQTEKNKLKKDGLEIFNDIPYYAENGFESIPKEEWDAFKWAGLYLQRPKEAGYFMMRVNIPSGIITNAQAEVLASIAEDYGRDVIDITTRQAIQFHWLEIHQIPDIFERLAKVGLSSAGACGDITRNITGNPLAGIDANELFDTTGIVKEVYDYFQHNEEFSNLPRKFKMSISSNIYNSANAEINCVAFTPATKEIDGEKKVGFHIKVGGGLSARPYLADELDVFVLPEEVKAVAIAIATIFRDFGYREKRHLARLKFLVADWGAEKFKEKLIEYTGPLQSKGESALKGWNAGYFYGVQDQKQDGLKYVGFNVPVGRLHAEEMFEIARIAKQYGNGQIRTCNSQNFIIPNVLPENVTGLLNEPLFEAISANPKSFIGHAVSCTGIEYCNLALVETKERLRKIAEYLDTQIALDVPVRIHMVGCPNSCGQRQIADIGLQGVKMKTKEKGIVEAFEIYVGGTLLDGGAYNQKLKGKIDGEDLPDVLASFISYFKENKLPAETFYDFVGRVGVETLQTALNNVLEEVIAS

SEQ ID NO: 26856 - protein, 402 aa, Bacillus cereus ATCC 10987
MLSEKTIEIVKSTVPLLQEKGVEITTRFYEILFSEHPELLNIFNHTNQKKGRQQQALANAVYAAATYIDNLEVIIPVVKQIGHKHRSLGIKAEHYPIVGTCLLRAIKEVAGAPDEVLNAWGEAYGVIADAFISIEAEMYEEAAHKEGGWKDFRNFVVVKKVKESDVITSFYLKPEDGGKVSSFIPGQYVTVQINIEGETYTHNRQYSLSDAPGKEYYRISVKKEKGVDTPDGKVSNYLHDHVKEGDMLPVSAPAGDFVLNMDSTLPVVLISGGVGITPMMSMLNTLIEQDSKRNVCFVHAALNSNTHAMKEHVEALDNEYEQVKAYTCYSAPTEKDLEMKNFDKEGLIEAEWLQTIIPTTEAEFYFCGPVAFMKHINATLTDLGVKQEHIHYEFFGPAASLQ

SEQ ID NO: 26857 - protein, 127 aa, Bacillus cereus ATCC 10987
MFRTMMRAKLHRATVTEANLNYVGSITIDEDLMDAVNIVENEKVQIVNNNNGARLETYVIKGERGSGVVCLNGAAARLVQPGDKVIIICYGLVAEENIHKQEPKIAVLDDNNQIIEMLGAEKAGTIL

SEQ ID NO: 26858 - protein, 395 aa, Bacillus cereus ATCC 10987
MKLAKRVAALTPSATLEITAKAQALKAEGHDVIGLGAGEPDFNTPEHIMDAAHKAMLEGHTKYTPTGGLQALKQEIVKKFTRDQGIAYDPSEIIVCNGAKHALYTLFQVLLDEGDEVIIPTPYWVSYPEQVKLAGGKPVYVEGLEDNEYKITAKQLREAITEKTKAVIINSPSNPTGMIYSKEELQQLGEVCLEHDILIVSDEIYEKLIYGGAEYTSVAQLSNALKEQTLIINGVSKSHSMTGWRIGYAAGNKQLIKAMTNLASHSTSNPTSIAQYGAIAAYAGSQEPVETMRQAFEERLNIIYDKLIQIPGFTCIKPQGAFYLFPNVKEAVALSGYETVDDWAKALLEEEKVALVPGTGFGAPNNVRLSYATSLEQVEKALERIHTFMKSKVQA

SEQ ID NO: 26859 - protein, 65 aa, Bacillus cereus ATCC 10987
MQGKVKWFNNEKGFGFIEIEGADDVFVHFSAIQGEGYKALEEGQEVSFDITEGNRGPQAANVVKL

SEQ ID NO: 26860 - protein, 607 aa, Bacillus cereus ATCC 10987
MCGITGWVNWNKDLSNEHVILEKMAHSIQHRGPDAEGFWFSPRAAFAHRRLIVIDPEGGAQPKTFRAGDYTYALTYNGEIYNFRELREQLRKCGHTFETHSDTEVLLHAYLEWKEDCVQHLNGIFAFALWDDQKQQLFLARDHLGVKPLFYTERNDSIIFGSEIKALLAHPSVPTEIDADGINEIFGLGLFRTPGCGVFKHIEEVRAGHSITFTRDKKVVTKYWNLESKAHTDSTEDTASHILSILQDTVKRQLIADVPLVCMLSGGLDSSGITALAGKEFAAENKTLHTYSIDFVNSAKDFELTFARTGLDAPWVKRVSEHVGTSHHDIIVNAEELANHLFVPLRAKDLPSAGEMETSLYLLFCEMKKDATVALSGESADEVFGGYPWFHQEELLYVDKFPWLTNWKNTSPLLLHEVSNQCNLEEYIDTRFQEAILEVPTLKGESKKSAKQRQMFYLFLTRFLPFLLDRKDRMSMAVGFEVRVPLCDYRLVEYLWNVPFNIKSIDNIEKGILRRALKPALPDDVRNRRKSAYPTSQDPHYLQTIRHLSLDMCSNKNNPIFSLINHSTLLAIADQSNKDINNFEARSAMEYMLQVNEWLKTYHIHIA

SEQ ID NO: 26861 - protein, 327 aa, Bacillus cereus ATCC 10987
MYQSLMTVRETQIAIKEVKTFFEDQLAKRLELFRVSAPLFVTKRSGLNDHLNGVERPIEFDMLHSGEELEIVHSLAKWKRFALHEYGYEAGEGLYTNMNAIRRDEELDATHSIYVDQWDWEKIVQKEWRTVDYLQKTVLTIYGIFKDLEDHLFEKYPFLGKYLPEEIVFVTSQELEDKYPELTPKDREHAIAKEHGAVFIIGIGDALRSGEKHDGRAADYDDWKLNGDILFWHPVLQSSFELSSMGIRVDSKSLDEQLTKTGEDFKREYDFHKGILEDVLPLTIGGGIGQSRMCMYFLRKAHIGEVQSSVWPDDLREACKKENIHLF

SEQ ID NO: 26862 - protein, 409 aa, Bacillus cereus ATCC 10987
METIVQKFGGTSVGSVERIQHVANLIIEEYERGHSIVSVVSAMGKSTDELVALANAITENPSKREMDMLLSTGEQVTISLLTMALQAKGYNAISLTGWQAGITTESVHSSARITEINTDRIQSYLTKGTIVIVAGFQGVSEDFEITTLGRGGSDTTAVALAAALNAKKCDIYTDVTGVYTTDPRVVKDAYKLDEISYDEMLELANLGAGVLHPRAVEFAKNHNVILEVRSSMEQENGTIVKGECNMEQQSIVKGIAFEDNITRITVKGLEQGSLSTVFSTLAAAHINVDIIIQSITNEGTVHLSFSIHSNDLRETLEVLEQNQEALHYEAVEYENHLAKVSIVGSGMVSNPGVAANMFTTLKEENIHIKMVSTSEIKVSVVIDRLHLVTGVEALHQSFMAKIVPLVQMS

SEQ ID NO: 26863 - protein, 571 aa, Bacillus cereus ATCC 10987
MKQQYTAYEKLQYEEMTGAGHVIQCLKKLGVTTVFGYPGGAILPVYDALYGSGLKHVLTRHEQAAIHAAEGYARASGKVGVVFATSGPGATNLVTGLADAYMDSIPLVVITGQVAKSLIGKDGFQEADVVGITVPVTKHNYQIRDVNHLSRIVQEAFYIAESGRPGPVLIDIPKDIQNENVTSFYNEVIEIPGYKLEPMPDSMKLKEVAKEISKAKRPLLYIGGGVIHSGGSDELIKFARENRIPVVSTLMGLGAYPPGDSLFLGMLGMHGTYAANMAVTECDLLLALGVRFDDRVTGKLELFSPYSKKVHIDIDPSEFHKNVTVEYPVVGDVKKALHMLLHMPICTQTDEWLTKTEEWKAEYPLSYNQKESDLKPQHVISLVSELTNGEAIVTTEVGQHQMWAAHFYKAKNPRTFLTSGGLGTMGFGFPAAIGAQLAKEEELVICIAGDASFQMNIQELQTIAENNIPVKVFIINNKFLGMVRQWQEMFYENRLSESKIGSPDFVKVAEAYGVKGLRATNSIEAKQVMLEAIAHEGPVVVDFCVEEGENVFPMVPPNKGNNEMIMKRWEE

SEQ ID NO: 26864 - protein, 257 aa, Bacillus cereus ATCC 10987
MTHLLETKNLSVSFGEHHVIKDVNLTVQKGKLISIIGPNGAGKTTLFNLLSGQISPTTGEVYFKGQDITKLSISDRTRLGIGRSFQLTNIFPELTVLENVRLSVQSFVQDYYSFFPSPAKLKQQVGEARRFLKTVLLQEKENVLAKDLAHGEKRKLELAMLLALKTDVLLLDEPTAGISVEEVPAILQVIENIKKHPESTIVLIEHKMDMVLDLSDHLIVLFHGELLAEGLPEEIMKDERVQSAYLGGLYSGTITSE

SEQ ID NO: 26865 - protein, 333 aa, Bacillus cereus ATCC 10987
MVNSTSNRIKVYFGVCMLICLSVFPFVNDSRSLLILFTQIFIFAIFAMSFDVLLGYTGIVSFGHCMFFGIGAYGVALLFDRQGVSITNFLIGIVAAIIISAIVSYIIGLLSLRLKSHFYAMLTLAISQLFFVLAEKWRGLTHGGDGFTFGVPEVFRDRFTFYYVTLICLLIIFVLLRLFTKSSIGKVLKAISQNEQRVEALGYKVLHYKIIASIVAGVVAAISGGLFVITLRFVNTTVFSIEMTLNALLMTMIGGVGTLIGAIAGAGIIESLKYYLSELATEYPIFERWTIILGVLYIIVLLVFPKGLVGTVKRLKNMKRNKKEKSAEVEQNV

SEQ ID NO: 26866 - protein, 586 aa, Bacillus cereus ATCC 10987
MEVRNEIKKKGSWRQFLRLIQDTNPSKGILVFALFMSLLSTGASLFIPMLTKGLVDNFSLSSISTGQIVGLVAFFIMQTIAAGLSIYLLNYIGQKIVAGLRERLWKKVLILPVSYYDQNRTGDTISRMTNDTGVVKTLISEHLSNLLTGGISIVGSLIVLFVLDWKMTLLLLTVIPLSVLILVPLGRKMYKISKALQDETASFTSVLTQVLSEIRLVKSSNTEKREYETGNKGIEKLLQFGLKEGKVQALISPVMSFVLMALLVIIVGYGGMRVSSGALTTGELVAFILYLVQIIMPMSQLSMFFTQFQKAIGATERINTILEYEVEDHETGVKVTNAKQPIVLENVYFEYNEEEQVLKNIDFTIESGKVTAIVGPSGSGKTTLFSLLERFYEPTSGAIKLGKDAITSYSLQSWRRQIGYVSQDSPLIDGTIRDNICYGVEGEVTDEEIEKVAAMAYVDAFIHDLPNGYATEVGERGVKLSGGQRQRIAIARALLRNPQILMLDEATSSLDSKSESVVQKALNNLMKGRTTLVIAHRLSTVVDADKIIFIEKGNLTGSGTHDELLRTHDMYREFATQQLKIKEGVL

SEQ ID NO: 26867 - protein, 490 aa, Bacillus cereus ATCC 10987
MQKDIMYNTEMDETLKIIDKGLKKTTSPKQIIVVGAGMAGLISASLLKAAGHEVKIFEANNRVGGRIETVRMEDTGLYLDVGAMRIPYSHTLTMAYIRKFGLQVSPFINRNETDIIYVNGRKTTLKQYEKDPSILKYPVEMNEVGKTSEELLLLAVQPIINFIKKNPEKNWDVVVKDFGRYSTGQFLKYHPYQYNTYFSPVTIEMIGVLLDLEGFLERSFVETLRFLYIMQEESGFCEIIGGNDRLPKSFLPQLEEDIIYNQKLMKLHQHDNGVTAFYRNEETFEYSSITGDLVIVTIPFSTMRFVEVDPFDSISHEKWKAIRELHYMPATKIGIQFKSRFWEEQGQLGGRIITDLPIRYAYYPSYGIGGKGPAMMLGSYTWSYDALLWDGLSKGDRIYYTLQNLATILGGQVYDEFLSGISKSWTLDPYALGGFALFQAGQESELQPAIVKPEGRIFFAGDHTTLYHGWIQGAIESGVRVAVDVNELNV

SEQ ID NO: 26868 - protein, 175 aa, Bacillus cereus ATCC 10987
MTTIKAIFIDRDGTIGGDTTIHYPGSFTLFPFTKASLQKLKANHIKIFSFTNQPGIADGIATIADFSQELKGFGFDDIYVCPHKHGDGCECRKPNTGMLLQAAEKHRLDLTQCAVIGDRWTDIVAEAKVNATTILVRTGAGYDALHTYRDKWAHIEPNYIAENFEDATNWILSQL

SEQ ID NO: 26869 - protein, 605 aa, Bacillus cereus ATCC 10987
MIFHRGPDDEGYFRDEHVQFGFRRLSIIDLEAGHQPLTYENDRYVIIFNGEIYNYVELREMLLEKGATFATQSDTEVIIALYAHMKEKCVDYLRGMFAFMIWDREEKKLFGARDHFGIKPLYIAQQGDTTFFASEKKSIMHVMEDKGVNPTSLQHYFTYQYGPEPETLTIDVNKIEPGHYFVKEIGKEMEIHRYWKPYFNASSATKEEHIQAIRDVLYDSVKVHMRSDVPVGSFLSGGIDSSIIASIAREMNPNLLTFSVGFEQRGFSEVDVAKETAEKLGVKNHNVFISAKEFMDEFPKIIWHMDDPLADPAAVPLYFVAKEARKHVTVVLSGEGADELFGGYNIYREPNSLKMFSYIPSPGKSVLKALSGALKEGFKGKSFLERGCTPIEERYYGNAKIFREEEKAELMKYYNESVNYMDITKPLYNEIKDYDDVSKMQYIDMFTWLRGDILLKADKMTMANSLELRVPFLDKEVFDVASKIPTEFKIANGTTKAILREAARGIVPDHVLDRKKLGFPVPIRHWLKDEMHDWAINIINESKTEHLIDKQYVLNLLEAHCADKGDYSRKIWTVLAFMVWHQIYVEHKYDTNKFHEETKRAYSLV

SEQ ID NO: 26870 - protein, 598 aa, Bacillus cereus ATCC 10987
MRNFQGQFANKGGRNAPKMGKAKNTKGTVMRVWNYMGYQKAALTFVIFLVFVTTLLGLLGPYLMGVIIDQYIVPKDLSGTARMCLVLIAIYGVTVLLTWLQTFVMVNVALKTIQKIRQDIFEKIQTLSLRFFDVRSQGDLMSRVTNDIDNLNQALTQSVVQIISSALTFIGVTIAMFALDWILAIVTLITVPIMFFVTKKLVTYSGKNFAKRQKDLGELNGFIEEAITGADVTTLYGKEKETVQNFNKINEQLRVSATKADTFSAFIFPSMNFINNLGMGLVIGTGSVMVLNGMTTVGVIAAFINYSRQFSRPLSQFATLMNTIQAAVAGGERVFEIMDEVPEIKNKKDAFVVQNLQGHVALENVSFGYEENKTILKEVSLKARPGETIALVGPTGSGKTTIINLLTRFYDIQQGQIHIDGKNIKEYDMNSLRSKIGVVLQDTYLFAGTIMDNIRYGRLDASDEEVINAAKAASAHSFIKHLPNQYETKIASEGSNLSQGQKQLLAIARAILADADILILDEATSNIDTRTELQIQEGLNNLMRGRTSFVIAHRLKTIEKADQILVIKDGSILEKGNHESLMEDRGFYFNLYTSQFKI

SEQ ID NO: 26871 - protein, 561 aa, Bacillus cereus ATCC 10987
MIHLKTQYTVSTYLLDRLSELEIEHIFGVPGDYNLAFLDDVVAHEKLEWVGNCNELNAAYAADGYARIKGIAALITTFGVGELSAINGVAGSYAENVPVIKITGTPPTTVMENGALVHHTLGDGKFDHFSNMYREITVAQTNLTPEHAAEEIDRVLRACWSEKRPVHIQLPIDVYNKPINKPTESILHKPVVSNKDALDKMLLHATSKINSARKPVILADFEVARFHAEEYLHQFVEKTGFPIATLSMGKGIFPEKHPQFIGIYTGDVSPSYLRKRIDESDCIISIGVKLTDTITGGFTQGFKKEQVIEIHPYTVKIMDKKYGPVVMKDVLKQLNDLIEHRKEDTLEIKPFISESLPITEEFNPKAQMITQKRFWQQIYHFLQENDVLIAEQGTPFFGSATIPLPNNTTYVAQPLWGSIGYTLPALLGTQLANLSRRNILIIGDGSFQLTVQELSTILRKNLKPIIFLINNNGYTVERAIHGQNEPYNDIQMWDYTKLANVFGTEEKSLTWKVENETELAEVLMNITVNNNQLIFIEVVMSQGDQPELLANLGKRFGMQNS

SEQ ID NO: 26872 - protein, 477 aa, Bacillus cereus ATCC 10987
MNWYVIIPMIISFIVVFLIGVYASRRVQATAHNKFLQEYFLGGRELGGLLLAMTMIATYGSASSFIGGPGIAYNMGLGWVLLSAIQVVTGYIVLTVIGKKFAIIARKMEAITLIDYLKGRYNNKAVVILSALCIIIFLFSATVAQWVGGGRLIESLTGLSYTTALFLFTFSVLVYVLIGGFRAVALSDTLLGIIMLVGTTIILIATVVAGGGIEKIMQELVQINPNLITPFGADGSLTKSYVTSFWILIGIGVVGLPQISVRAMSYKNSKAMHQALIIGTIVVGTIMIGMHLTGVFARVVLPGITVPDKVMPLLAMEVLPPWLAGVFLAAPMAAIMSTVNSLLLLVSSSIIKDIYVNYINKDATDSTIRKGSLWITAIVGLLVYAAAIKPPDFLIWLNLFSFGGLEAAFIWPIVLGLYWRKGNATGALASIVVGVGSYMCIHLFYPNPFGIHTVVFPICLAFIAYIIGSMSAVKKTA

SEQ ID NO: 26873 - protein, 273 aa, Bacillus cereus ATCC 10987
MKLLFYLEKMEELVMAFHKPEQIAELVIEAGVQKVSQTLPAMLILGFLGGAFISLGFLLNIRVLGNLPERWGSLVNVLGGAVFPVGLMLVVLAGGELITGNMMSLSMALYAKKITLVSVLNNWIWITFMNFVGAIFVAYCFGHLGGLTEGDYLNKTVAIAEGKLHESFGRTLILAIGCNWLVCLALWLAYGTSDFVGKIIGIWIPIMAFVVIGFQQVVANMFVISAVIFAGHLTWMDLAKNFVPVFIGNVIGGAGFVGFAYFACYQKQHSNMK

SEQ ID NO: 26874 - protein, 492 aa, Bacillus cereus ATCC 10987
MKIEIMVSLAIYMAGMLYIGYWSYKKTSDLSDYMLGGRGLGPAVTALSAGASDMSGWMLMGLPGAMYATGLSSVWIAIGLLIGAYANYLILAPRLRTYTEVANDSITIPDFLENRFKDRTKILRFVSAIVILVFFTFYASAGLVSGGRLFENSFNLDYKIGLFVTVGVVVAYTLFGGFLAVSWTDFVQGCIMFIALVLVPIVAFTDVGGVTETYNTIKQVDASHLDMFKGTTILGIISFLAWGLGYFGQPHIIVRFMAITSIKDLKTSRRIGIGWMAISIIGAMLTGLVGIAYYAKNNGTLQDPEMVFVTFSNILFHPYITGFLLSAILASIMSSISSQLLVISSAVTEDFYKTFFRRNASDKELVFIGRLSVLVVAMIAVVLAYHPSDTILTLVGYAWAGFGSAFGPAILLSLYWKRTNKWGVLAGMIVGAVVVITWVQIPSLKATMYEMVPGFFCSLLAVIVVSLVTKEPVKAIHLEFNEMEAVLEEETK

SEQ ID NO: 26875 - protein, 522 aa, Bacillus cereus ATCC 10987
MSETLLVIISILLLLMLLLIIFFIITFFIKKRTHHSILKLHPYLGRMRYLLEKIGPEFRQYWFDHDTDGKPFSRYDFQSVMFLAKYRSEILGFGSKRDFDTSGYYIANTLFPILTEELSVNVAQEREGKKYVIHKEGLFSRREKLTADTTNLWLYEEDDAVIVGENRKYPWKLYGMFGASATSYGAIGENYILASGFGAKMAGGSWINTGEGGVIPEHLHTGANIVAQIGPGLFGYRDEDGKFSMEKFMEKAKERNIKAFELKFGQGAKIRGGHLEGQKVNEKIASVRNVREGETINSPNRFSFLNNAADTLYFIQQLQENGGKPVGMKIVIGQQEPLEDLFKSMKELNIYPDFITIDGSEGGSGATYKSMADSMGMPLIPALLTCIDTANHYGVRDKFKVFASGKLITPDKVAIALAIGADAINSARGFMMASGCIMALQCNSGQCPSGVATTNPHYQKALDPYEKKWRVMNYVVSMRYSLFSLAAAAGVKSPRHLTREHIVFKDEVGRIVPLSELFPTSK

SEQ ID NO: 26876 - protein, 323 aa, Bacillus cereus ATCC 10987
MEHGHYLKKNAKFIDREVTKWSEMIKDWEEGVEIFGAALIGAPLSKPSISHSGASFAPKTIRAMLDAYSTYAITEEHDMKESVLYDCGDITMHVTDIKESHNRIAKTVGHVTKVNPNMIPIVLGGDHSISFPSITGFANSKGKVGIIQFDAHHDLRNLEDGGPSNGTPFRSLLENGVITGKQLVQIGIRNFSNARAYHEYAKEHGVTVYTMKDVREREIKDIMTESIEVLRKQGVTSIYISLDMDVLDQAFAPGCPAIGPGGMDSATLLDAIEFLGKEPLVQGMDIVEIDPTLDFRDMTSRVAAQVIMSFLLARETVRKQVSI

SEQ ID NO: 26877 - protein, 271 aa, Bacillus cereus ATCC 10987
MSVFTPEEITELAANSGRKKAHLSLLPMLILGFFGGAFIALGYLLDIHVIGTMPKAWGSFTSFLGAAVFPIGLILVILAGGELVTGNMMTVSMAWLHKKIDLFHFIRNLVIVTFSNFIGAVFVAYFFGHVVGLTEGAFLAKTVSIAQAKLQDTPLQAFISAIGCNWLVCLAVWLSMGSKEFIGKIIGIWFPVMTFVAIGFQHVVANMFVIPAAIFAGHLTWIEYFPNFIFVFFGNLVGGMLFVALPYFISYNKKLPSNKEQTELKKKSVSA

SEQ ID NO: 26878 - protein, 410 aa, Bacillus cereus ATCC 10987
MKIIVQKFGGTSVRDENGRKHALHHIKKSLDAGYKVVTVVSAMGRKGEPYATDTLLSLVNQEESHISNREQDLLLSCGELISAIVFSNMLNENGIKAAALNGAQAGFVTNDDFTNAKIIEMNCDRIHEELENVDVIVVTGFQGQTKKGDTTTLGRGGSDTSASALGVALHAEYIDIFTDVEGVMTADPRIVKDARHLQTVTYNEICNMAYQGAKVVHPRAVEIAMHAKVPLRVRSTYSDSEGTLISASDGATKGRDVEERPVTGIAHVSNVTQIKVLAKETAYDLQQHVFKEMANEGISVDLINISPTGVAYTVSDNVSNRAVELLQNLGYEPIVTEHCAKVSIVGAGMAGYPGVTAKIVTALAEKGIQILQSADSHTTIWVLVKETDLVEAVNALHSAFELSKEKQLEQ

SEQ ID NO: 26879 - protein, 493 aa, Bacillus cereus ATCC 10987
MYRLSQYETPLFTALVEHSKRNPIQFHIPGHKKGQGMDPEFREFIGHNALAIDLINIAPLDDLHHPKGMIKEAQDLAAAAFGADHTFFSIQGTSGAIMTMVMSVCGPGDKILVPRNVHKSVMSAIIFSGAKPIFMHPEIDPKLGISHGITIQSVKKALEEHSDAKGLLVINPTYFGFAADLEQIVQLAHSYDIPVLVDEAHGVHIHFHDELPMSAMQAGADMAATSVHKLGGSLTQSSILNVKEGLVNVKHVQSIISMLTTTSTSYILLASLDVARKRLATEGTALIEQTIQLAEQVRDAINDIEHLYCPGKEMLGTDATFNYDPTKIIVSVKDLGITGHQAEVWLREQYNIEVELSDLYNILCLVTFGDTESETNTLIAALQDLSATFKNKADKGVQVQVEIPEIPVLALSPRDAFYSETEVIPFENAAGRIIADFVMVYPPGIPIFTPGEIITQDNLEYIRKNLEAGLPVQGPEDMTLQTLRVIKEYKPIS

SEQ ID NO: 26880 - protein, 387 aa, Bacillus cereus ATCC 10987
MEQFINPRVKDIQISGIRQFSNMIQNYDNLISLTIGQPDFPTPSLVKEAAKRAITENYTSYTHNAGLLELRKAACNFVKDNYDLHYLPENETIVTIGASEAIDVAFRTILEPGTEVILPAPIYPGYEPIIRLCGATPVFIDVRETGFRLTADALKNAITEKTRCVVLPYPSNPTGVTLSKEELQDIVNVLKDKNIFVLSDEIYSELVYEQTHTSIAHFPEMREKTIVINGLSKSHSMTGWRIGLLFAPNYLAGHILKVHQYNVTCSTSIAQYAAIEALTAAKDAPKMMRHQYKKRRDYVYNRLTQMGLTVEKPTGAFYLFPYVGHLTSSSFDFALDLVKEAGLAVVPGTAFSEYGEGYLRLSYAYSIETLKEGCDRLEAFLQKKAKS

SEQ ID NO: 26881 - protein, 471 aa, Bacillus cereus ATCC 10987
MSKLFKKKSVTQLLDPSKSKTLMKTLGSFDLVMLGLGSIIGTGVLVLAGLVAARDAGPAVVFSFVLAAIVCGFIALCYAEIASILPVSGSVYTYAYATIGELVAHLVGWMLLSIYILATAAVASGWTGYFHNLISGLGLDMPKSLLMIPSQGGMMNLPAMVITLIITWMLSRGTKESKRINNIMVLIKIGMVILFIVVGVFYIKPENWVPFTPYGVSGVLAGGAAAFFTFMGFDILATSAEEVKDPQRNLPIGIIVSLIICTLIYVIVCLVMTGMVSYKELNVPEAMAYVMEVVGQGKVAGVIAVGAVIGLMAVIFSSMYAATRVFFAMSRDGLLPKSLAKINRKTGAPTFTIGLVGIGSSFIAGFIDLKELANLVNISGLVTYSMVGVSVIVLRKTHPNLKRGFMVPFVPILPIISIASCVFLMFNLPLRTWLYFCIWITIGVIIYFVYSIKHSNLNEEAISKAKDKIVK

SEQ ID NO: 26882 - protein, 367 aa, Bacillus cereus ATCC 10987
MSLNRILVINPGSTSTKIGVFDNERPVLEETIRHDEEQIGKYKRIIDQYEFRKETILEVLHSHGINISKLNAVCGRGGLLRPIEGGTYTVNDAMLEDLKNGFSGHHASNLGGILAYEIASGLNIPAFIVDPVVVDEMEPVARISGIAGMERKSIFHALNQKAVARKVAEELNHKYEDLNLLVTHMGGGITVGAHKKGKVIDVNNGLNGEGPFSPERAGTVPVGQLVEMCFSGEYYRDEMVKKLVGQGGLVSLIGTNDAIKVEQMVEKGDPEATLIYKAMAYQVAKEIGGASAVLHGKIDAIVLTGGLAYSKILVDEIKERVDWIADVIVHPGEDELQALAEGALRVLREEEAPKEYIVREKETVARG

SEQ ID NO: 26883 - protein, 301 aa, Bacillus cereus ATCC 10987
MNRKGYKSGFVSIIGRPNVGKSTFLNRIIGQKIAIMSDKPQTTRNKIQGVYTENDSQVIFIDTPGIHKPKHKLGDFMVKMAQTTLKEVDIVLFMVNAVEGFGRGEEFIIEKLKETKQPVFLVINKIDQVHPEQLLELIDQYRKLHDFAEIVPISALDGNNVEALIGTIKKYLPEGPQYYPDNQVTDHPERFIIAELIREKVLHLTREEVPHSVAVVIDAIQKREGGAVYINATIVVERPSQKGIIIGKQGKMLKEVGKRARFDIEALLGSKVFLEVWVKVQKDWRNKMSQLRDLGFREDEY

SEQ ID NO: 26884 - protein, 611 aa, Bacillus cereus ATCC 10987
  misc_feature (262)..(262): Xaa can be any naturally occurring amino acid
  unsure (1)..(611): unsure at all Xaa locations
MSKIIGIDLGTTNSCVAVMEGGEPKVIPNPEGNRTTPSVVAFKNEERQVGEVAKRQAITNPNTIMSVKRHMGTDYKVEIEGKEYTPQEISAIILQNLKASAEAYLGETVTKAVITVPAYFNDAERQATKDAGRIAGLEVERIINEPTAAALAYGLEKQDEEQKILVYDLGGGTFDVSILELADGTFEVISTAGDNRLGGDDFDQVIIDHLVAEFKKENNIDLSQDKMALQRLKDAAEKAKKDLSGVTQTQISLPFISAGAAXPLHLELTLTRAKFEELSANLVERTLEPTRRALKDAGLSASELDRVILVGGSTRIPAVQEAIKRETGKEPYKGVNPDEVVALGAAVQGGVLTGDVEGVLLLDVTPLSLGIETMGGVFTKLIERNTTIPTSKSQVFSTAADNQPAVDIHVLQGERPMSADNKTLGRFQLTDIPPAPRGIPQIEVTFDIDANGIVNVRAKDLGTSKEQAITIQSSSGLSDEEVDRMVKEAEANADADQKRKEEVELRNEADQLVFQTDKVVKDLEGKVDAAEVAKATEAKEALQAAIEKNELEEIRAKKDALQEIVQQLTVKLYEQAQAAAGQAEGAQGAQDAGAKKDNVVDAEFEEVKEDK

SEQ ID NO: 26885 - protein, 381 aa, Bacillus cereus ATCC 10987
MERIYLDHAATSPTHPEVVEKMIPYMTETFGNPSSIHFYGRQTRHAVDEARRACARSIHANPNEIIFTSGGTEADNLALIGVARANRHKGNHIITTQIEHHAILHTCELLEREGFEVTYLPVDETGRVQVSDIQKALTEETILVSIMFGNNEVGTMQPIAEIGKLLKEHQAYFHTDAVQAYGLVEIDVKEFGIDLLSISAHKINGPKGVGFLYASADVKFEPLLIGGEQERKRRAGTENVPSIVGLQHAILLAEKTREQKNAQYEEFKDIMVSVFKNEDITFEVNGNLEYRLPHVLNISFTGMNIEPFLVNLDLAGIAVSSGSACTAGSIDPSHVLVAMFGKDSDQIRSSVRFSFGLGNTKEQVEKAAYETVKIVKRLTQN

SEQ ID NO: 26886 - protein, 379 aa, Bacillus cereus ATCC 10987
MIYLDYAATTPMSAEALQTYMKAASQYFGNEQSLHDIGGTASSLLQVCRKTFAEMIGGKEQGVFFTSGGSESNYLAIQSLLNAQNKKHIITTPMEHASIRSYFQSLQSKGYTITEIPVDKNGLIHLIDLEAAITEDTVLASIQHGNSEIGTVQNIAEIGALLKKYNVLFHSDCVQTFGKLPIHVFEMGIDSLSVSAHKIYGPKGVGACYINPQVRWTQIFPGTSHEKGFRPGTVNVPGIAAFLTAAENILKNQQEESLRFKELRSYFLERLQALPLEIEVEGHSTSCLPHIIGVTIKGIEGQYTMLECNRRGIAISTGSACQVGKQEPSKTMLAIGKTYEEAKQYVRFSFGQQTTKDQIDTTIHALHTIGNQFYRGVKS

SEQ ID NO: 26887 - protein, 428 aa, Bacillus cereus ATCC 10987
MFVDQVKIYVKGGDGGNGMVAYRREKYVPKGGPAGGDGGKGADVVFVVEEGLRTLMDFRYQRHFKADRGQHGMSKGQHGRKAEDLIVKVPPGTVVKDEKTGQILADLVTHGQSAVIARGGRGGRGNSRFATPTNPAPEIAENGEPGQERDVILELKVLADVGLVGFPSVGKSTLLSVVSSARPKIAEYHFTTIVPNLGVVETGDNRSFVMADLPGLIEGAHAGVGLGHQFLRHIERTRVIVHVIDMSGLEGRDPYEDYVTINNELKEYNLRLTERPQVVVANKMDMPDAEENLQAFKEKVGDEVKIFPISAVTKQGVRDLLFEVANLLETTPEFPIHEVADESDTSVMYKLETEGVKFDITRESDGTFVISGYDIEKTFKMTDFSRDESVRRFARQMRGMGIDEALRARGAKDGDIVKILEYEFEFID

SEQ ID NO: 26888 - protein, 102 aa, Bacillus cereus ATCC 10987
MYAIIETGGKQIKVEAGQEIYIEKLDVEAGETVTFDKVLFVGGENVKVGSPVVEGATVTAKVEKHGRAKKIIVFKYKAKKNNRKKQGHRQPYTKLVVEAINA

SEQ ID NO: 26889 - protein, 401 aa, Bacillus cereus ATCC 10987
MEKKKVVLAYSGGLDTSVAIKWLQEKNYDIIALCLDLGEGKDLAFVKEKALSVGAIKSYMIDVQEEFANEYALMAMQAHTLYEGKYPLVSALSRPLIAKKLVEIAEQEGATAVAHGCTGKGNDQVRFEVSIQALNPYLEVIAPVREWKWSREEEIAYAKENDVPIPINLDSPFSIDQNLWGRSNECGILEDPWAAPPEDAYEMTLALEDTPNKPEFVEIGFEAGVPTTLNGTAYPLSELIKTLNALAGKHGVGRIDHVENRLVGIKSREVYECPAAMTLITAHKELEDLTLVKEVAHFKPMIEQKITELIYNGLWFSPLKQALNAFLQETQKNVTGMVRVKLFKGHAIVEGRKSEYSLYDEKLATYTAQDEFNHDAAVGFISLFGLPTKVYSQVNQKKVEA

SEQ ID NO: 26890 - protein, 397 aa, Bacillus cereus ATCC 10987
MSKIIAINAGSSSLKFQLFEMPSETVLTKGLVERIGLEDSIFTITVDGEKQKEITNIPDHAVAVNMLLKKLTENGIVKSLDEIGGIGHRVVHGGEKFADSVLITDEVLADIEELSDLAPLHNPANVVGIKAFQEVLPNVPAVAVFDTAFHQTMPESAFLYSLPYEYYEKFGIRKYGFHGTSHKYVTERAAELLGRPLESLSLLSCHLGNGASIAAVEGGKSIDTSMGFTPLAGVTMGTRSGNIDPALIPYIMEKTGQTVEEVVNVLNKKSGMLGLTGYSSDLRDIIAKEEEGDHRAKVALDVFVSRIHKYIGSYTARMKGVDAIIFTAGVGENSAIIRERVLEGLEYMGVYFDAKRNNVFGEEAFINFPHSPVKIIVIPTDEEVMIARDVLRLGNIG

SEQ ID NO: 26891 - protein, 396 aa, Bacillus cereus ATCC 10987
MKQFELSRAAESLQPSGIRKFFDLAANMKGVISLGVGEPDFVTPWNVRQACIRSLEQGYTSYTANAGLLELRQEIAKYLKKQFAVSYDPNDEIIVTVGASQALDVAMRAIINPDDEVLIIEPSFVSYAPLVTLAGGVPVPVATTLENEFKVQPEQIEAAITAKTKAILLCSPNNPTGAMLNKSELEEIAVIVEKYNLIVLSDEIYAELVYDEAYTSFASIKNMREHTILISGFSKGFAMTGWRLGMIAAPVHFSELMLKIHQYSMMCAPTMSQFAALEALRAGNDEVIRMRDSYKKRRNFMTTSFNDMGLTCHVPGGAFYVFPSIASTGLSSAEFAEQLLLEEKVAVVPGSVFGESGEGFIRCSYATSLEQLMEAMKRMERFIENKKRTKHNTFCP

SEQ ID NO: 26892 - protein, 320 aa, Bacillus cereus ATCC 10987
MKPKVYIAEPVPTFVENYLSEHCDYEKWEQNEKVPRDVLLEKIQDKDGLLNFGSAINEELLEAAPNLKVVSNISVGYDNFDLQAMEKRNVIGTNTPYVLDDTVADLVFALMLSAGRRVCELDSYVKNGEWNAEIGKEHFGLDVHHSTIGIIGMGRIGEAVAKRAKFGFDMDVLYYNRRRKEEAEQKFDATYCDLQTLLKQSDFIVLLTPLTDETYHLIGEKEFSFMKETAIFINASRGKTVDEEALIHALTEKKIFAAGIDTFTQEPIQKDNPLLSLQNVVTLPHIGSATLKTRQQMAMTAAENLVAALQGKTPPHIVRG

SEQ ID NO: 26893 - protein, 261 aa, Bacillus cereus ATCC 10987
MAGSTLTVKDLHVSIDGKEILKGVNLEVKGGEIHAIMGPNGTGKSTLSSAIMGHPKYEVTEGSIIIDGEDVLEMEVDERAQAGLFLAMQYPSEISGVTNADFLRSAINARREEGDEISLMKFIRKLDKNMEFLEMDPEMAQRYLNEGFSGGEKKRNEILQLMMIEPKIAILDEIDSGLDIDALKVVSKGINEMRGEDFGCLMITHYQRLLNYITPDFVHVMMNGRIVKSGGPELAQRLEAEGYDWIKKELGIEDETTEQEA

SEQ ID NO: 26894 - protein, 390 aa, Bacillus cereus ATCC 10987
MREAVIVAGARTPIGKAKRGSLKTVRPDDLGALVVKETLKRANYEGPIDDLIFGCAMPEAEQGLNMARNIGGLAGLSYDVPAITINRYCSSGLQSIAYGAERIMLGHSEAVLSGGAESMSLVPMMGHVVRPNSRLVEAAPEYYMGMGHTAEQVAVKYGISREEQDAFAVRSHQRAAKALAAGNFADETVPVDVTLRTVGSNNKLQEETITFTQDEGVRAETTIDILGKLRPAFNVRGSVTAGNSSQMSDGAASVLLMDREKAVSDGMKPLAKFRSFAVAGVPPEVMGIGPIAAIPKALKLAGLELSDIGLFELNEAFASQSIQVIRELGLDEEKVNVNGGAIALGHPLGCTGAKLTLSLIHEMKRRNEQFGIVTMCIGGGMGAAGVFELL

SEQ ID NO: 26895 - protein, 438 aa, Bacillus cereus ATCC 10987
MHHDEKNKIGLTVALSIVVGTIIGSGVFMKPGSVLDYSGSSNMAILAWVIGGLLTLASGLTVAEIGAQIPKNGGLYTYLEEIYGSFWGYLSGWMQTIVYGPAIIGTLGLYFSSLMINFFYLDKVWNLPIAIGTVVFLGVVNSMGTKYGGIVQTITTIGKMIPIVLIVVLGFWKGNSDIFNVVVPISENQSIGMAILATLFAYDGWILLASIGGEMKNPTKLLPKAMTVGILIVTAAYVLINLALLNVLPATQIVDLGENATATAAGMLLGEYGGKIISIGIIVSIFGCLNGKILTFPRIPMSMAERGQLPFAKFIAKESPRFKTPANAITVEIILGIILMIISDPNKLSEISVFIIYIFYVMTFIGVFILRKRNKNKERAYSVPLFPIVPIVAIFGSLFVIGSAIINDPVSCFLSIGIVFTGLPVYWYLNKKNKNEVS

SEQ ID NO: 26896 - protein, 67 aa, Bacillus cereus ATCC 10987
MNMQGRVKWFNAEKGFGFIEREDGDDVFVHFSAIQQDGYKSLEEGQQVEFDIVEGARGPQAANVVKL

SEQ ID NO: 26897 - protein, 505 aa, Bacillus cereus ATCC 10987
MRKLTKTFIVSLTLCIAFTIWGIIPESIIGKGSLGNVTTAIQTALVSKFGWFYIISVSIILGVSIFLIVSKYGSIRLGKDDDEPDYSYMTWFAMLFSAGMGIGLVFWGVAEPLNHLYAPPFGEGATEESARLALRFSFFHWGLHPWGLYAFVALCIAYFTFRKGKASTISATVGPLFKGGDHGRIAHLFDVLAVFATVFGVATSLGLGAKQIAGGVSYLTSIPNSLTTQLVIIAIVTVLFMLSAQTGLDKGIKYLSNTNIIFAFALMIIVLFAGPTNFIMNYFTSTIGSYIQELPSMSFRLSPLDEGGNQWIQSWTIFYWAWWIAWSPFVGTFIARVSRGRTIREFVIGVLLVPTIIGALWFSVFGGTGIHMELFGDAHIFEKIKEMGTEVGLFAMFDQMGSFGSALSVLAILLISTFFITSADSATFVLGMLTTHGSLNPPNRIKMIWGIVLAALASILLYVGGLEALQTAAIIAAFPFVFVIFFMMAALFKELQKEGRMKRHK

SEQ ID NO: 26898 - protein, 393 aa, Bacillus cereus ATCC 10987
MSKTVILSAARTPVGKFGGSLKDVKATELGGIAIKAALERANVSASDVEEVIFGTVIQGGQGQIPSRQAARAAGIPWEVQTETVNKVCASGLRAVTLADQIIRTGDQSLIVAGGMESMSNSPYILRGARWGYRMGNNEVVDLNIADGLTCAFSGIHMGVYGGEVAKEDGISREAQDEWAYRSHQRAVSAHNEGRFEEEIVPVTIPQRKGDPIVVAKDEAPRADTTIEKLAKLKPVFDKTATVTAGNAPGLNDGGAALVLMSEDRAKQEGRKPLATILAHTAIAVESKDFPRTPGYAINALLEKTGKTIEDIDLFEINEAFAAVAIASTEIAGIDPEKLNVNGGAVAMGHPIGASGARIIVTLIHALKQRGGGIGIASICSGGGQGDAVMIEVH

SEQ ID NO: 26899 - protein, 522 aa, Bacillus cereus ATCC 10987
MRMKSRKTDWPVFLISGGSLLLFVIAVFLNKNYVEGVINSSFAASIKYFGAFWQVLLIGTFIVAMCMAFSKYGRVKLGGLEKPEISTAKWLAIIMSTLLAGGGVFWAAAEPMYHLMTVPPIHEGISAGTKEAVMPALAQSYMHWGFLAWTILGTISAVVMMYGHYHKGMPLKPRTLLYPIFGEKLRKSLLGTMIDAFAIIAVAAGTIGPIGFLGLQASYGLQALFNIPDVFTTQLAIIICVVAVSTISAVTGINKGIQIISDLNVKLAILLMVFVLLCGPGGFIIDSFVSSFGFYINEFIPMSTYRGDTGWLGSWTIFFWGWFIGYGPMMAILVSRISRGRTIREIIVAIGIIAPIITTFWFTILGGSGVFYELMKPGSISSALSESGMPAAMIAITEQLPLSHIIGPAFLLLTILFVVTTGDSMAYSISMAVTGDGDPRISLRIFWSLIMGAVAAILLYMGEGSINALQSFIVVTAVPVSILLLPMLWLAPKVAGELALKQGIVKEEEKTSFLFQKASKSK

SEQ ID NO: 26900 - protein, 226 aa, Thalictrum dioicum
MGRGKIEIKRIENTTNRQVTFCKRRNGLLKKAYELSVLCEAEVALVVFSSRGRLYEYSNNSVKKTIERYKKASTDSPNSGSVYEANVQFYQQEASKMRNQIASLQNHNRNLLGESLSNLNIRELRQIEKKIEGGISKIRAKKNELLFSEIEYMQKREIDLQTDNKYLGAMIAANERVPPEHMNLMPANEYHIMSSAPFDSRNFLPANLLDHNNNYSHSDQTTLQLG

SEQ ID NO: 26901 - protein, 216 aa, Sanguinaria canadensis
IENTTNRQVTFCKRRNGLLKKAYELSVLCDAEVALIVFSNRGRLYEYANNSVKSTIERYKKTCQDPSNSGCAVEANTQFYQQEASKLRQQIGFLQNSNRNLTGEALSSMTVKELKQLETRLEKGISRIRSKKNELLFSEIEYMQKREIDLQNDNMYLRAKIAENERAQQHMNLMPGNEYDVMTSSAYDSRNFLQVNLLESTNHHYSRQEQTALQLG

SEQ ID NO: 26902 - protein, 212 aa, Chloranthus spicatus
IENTTNRQVTFCKRRNGLLKKAYELSVLCDAEVALIVFSTRGRLYEYANNSIKSTIERYKKASADSSSTTSIAEANTQYYQQEASKLRQQIHILQNSNRHLMGDALSSLSIKELKQLENRLERGITRIRSKKHELLFAEIEYMQKREADLQNDNMYLRAKIAENENAQQANMLPGPEFDTLPTFDSRNYFQANILEAAPQYSHQDQTALHLG

SEQ ID NO: 26903 - protein, 213 aa, Chloranthus spicatus
IENTTNRQVTFCKRRNGLLKKAYELSILCDAEVALVVFSSRGRLFEYSNNSVKTTIDRYKKAHADSNSASVSEANTQFYQQEAAKLRQQLGILQNSNRHMMGESLSSMNIKELKSLEVKLEKGISRIRSKKNELLFSEIEYMQRREMDLQNDNMYLRSKIAENERAQQHMNVLPGPEYDVMPAFDGRNFLPVNLLGSNHHQFSHQDQTALQLG

SEQ ID NO: 26904 - protein, 226 aa, Saruma henryi
MGRGKIEIKRIENTTNRQVTFCKRRNGLLKKAYELSVLCEAEVALIVFSSRGRLYEYANNSVRTTIDRYKKASDSSNPASVSETNSQYYQQEATKLRQQIGILQNANRHLMGESLSSMSVKELKQLETRLEKGISRIRSKKNELLFAEIEYMQKREVELQNDNIFLRGKIVENERAQQNMNMLPGGGGYEVMSQHPPYDSRNYLPVNLLEHNQHFSHQEPTALQLG

SEQ ID NO: 26905 - protein, 224 aa, Nymphaea sp. EMK-2003
MGRGKIEIKRIENTTNRQVTFCKRRSGLLKKAYELSVLCDAEVALIVFSSRGRLYEYANNSVRGTIERYKKAYAESSSSGAVAETNAQYYQHEAHKLRQQISKIQQDNRQMLGEGVSEMSLRDLKSLENKLERSISKIRGKKNDLLNGEIQYMQNWNEDLQKENTFLRAKVCENERAQQQHISILAAGPAEYELPPAVPFQHINLMESSHHQYSHQERTALQLG

SEQ ID NO: 26906 - protein, 216 aa, Helleborus orientalis
IENTTNRQVTFCKHRNGLLKKAYELSVLCDAEVALIVFSSRGRLYEYSNNSVKKTIERYKKASTDSSNSGSASEANAQYYQQEAAKLRNQIAALQNSNRNLLGEQLSNLSIRELKQIEKKIETGINKIRSKKNELLFAEIEYMQKREVDLQNDNMFLRAKISENERTQQHMSLMPGTNNYEVISSGPFDSRNFLQVNLLESNNNYSRSDQTALQLG

SEQ ID NO: 26907 - protein, 214 aa, Aquilegia alpina
IENTTNRQVTFCKRRNGLLKKAYELSVLCEAEVALIVFSNRGRLYEYANNSVRKTIDRYKKTCGEGSSTLTVSEANLLFYQQESSKMKQQIEILQNSNRHLMGEALSCLSIKELKQLESRLEKGISRIRSKKNEMLLAEIEFMQKREIELHNDNIYLREQITANERAQQHMNSLPGNVYEAITSAPYNSRDFLQVNLRESKPNQYCDSTALQLC

SEQ ID NO: 26908 - protein, 216 aa, Ranunculus ficaria
IENTTNRQVTFCKRRNGLLKKAYELSVLCEAEVALIVFSNRGRLYEYSNNSVKKTIERYKKHSTDSSNTGSVSEANAQFYQQEANKLRNQIATLQNSNKNLLGESLSNLSVRELKAIEKKIEGGIAKIRSKKNELLFAEIEYMQKREIDLQNDNMFLRAKIAENERTQQQHMSLMPVNDYEVISSAPYDSRNFLPVNLLDSNHNYSRNDQTTLQLG

SEQ ID NO: 26909 - protein, 501 aa, Phytophthora cinnamomi
GYIGREVYDAVVTVPAYFNDAQRQATKDAGTIAGLTVQRIINEPTAAAIAYGIDKKSQGEKNVLVFDLGGGTFDVTLLAIDGGVFEVLATNGDTHLGGEDFDQRIMQYFIKKWKKDKNLDVASDKRALQKLRREAERVKRALSAQAQARLEIESLLDGEDFTESLSRARFEKLNEDLFKKTLGPVEKVMKDADLKKSEVDEIVLVGGSTRIPKVQQLIKDYFNGKEPSRGVNPDEAVAYGAAVQGGILSGEQDDLTKDVLLIDVVPLSQGIETVGGVMTKLINRNTVIPTKKSQTFSTYQDNQPAVLIQVFEGERAMTKDNRLLGKFELTGLPPAPRGVPQIEVTFEIDANGILQVSAEDKGTGKAETITITAEKGRLSQEEIDRMVQEAAEFADEDKKVKDRIDGRNALEGYLYSLKNNVEEKLEDKIDEDDKDTVLTAVQDAMDWLEDNQEADKEDFEAKQKEVEKLVNPIMSKVYQGGAAGGDEDYDDEEEDDDHDEL

SEQ ID NO: 26910 - protein, 658 aa, Phytophthora cinnamomi
MNLSKILFMAAAAFAGAVVAEDAKGPRGPVIGIDLGTTYSCVGIYKDQKVEIIANDQGNRITPSYVAWDSNDERLIGDGAKNQATINPEKTLFDVKRLIGRKYNDKSVQADKKLLPYLLVNKDGKPFIEVEVKGEKRQFAPEEVSAMVLTKMKQISEGYIGREVYDAVVTVPAYFNDAQRQATKDAGTIAGLTVQRIINEPTAAAIAYGIDKKSQGEKNVLVFDLGGGTFDVTLLAIDGGVFEVLATNGDTHLGGEDFDQRIMQYFIKKWKKDKNLDVASDKRALQKLRREAERVKRALSAQAQARLEIESLLDGEDFTESLSRARFEKLNEDLFKKTLGPVEKVMKDADLKKSEVDEIVLVGGSTRIPKVQQLIKDYFNGKEPSRGVNPDEAVAYGAAVQGGILSGEQDDLTKDVLLIDVVPLSQGIETVGGVMTKLINRNTVIPTKKSQTFSTYQDNQPAVLIQVFEGERAMTKDNRLLGKFELTGLPPAPRGVPQIEVTFEIDANGILQVSAEDKGTGKAETITITAEKGRLSQEEIDRMVQEAAEFADEDKKVKDRIDGRNALEGYLYSLKNNVEEKLEDKIDEDDKDTVLTAVQDAMDWLEDNQEADKEDFEAKQKEVEKLVNPIMSKVYQGGAAGGDEDYDDEEEDDDHDEL

SEQ ID NO: 26911 - protein, 649 aa, Lilium longiflorum
MAGKDEVPAIGIDLGTTYSCVGVWQHDRVEIIANDQGNRTTPSYVAFTDTERLIGDAAKNQVAMNPTNTVFDAKRLIGRHFSDPSVQADMKLWPFKVISGTRDKPMIVVQYKGEEKQFAVEEVSSMVLVKMREIAVAYLGRSINNAVVTVPAYFNDSQRQATKDAGAIAGLNVLRIINEPTAAAIAYGLDKKATSPSEKNVLIFDLGGGTFDVSLLTIEEGIFEVKATAGDTHLGGEDFDNRMVNHFAQEFKRKHKKDISGNPRALRRLRTACERAKRTLSSTAQTTIEIDSLCDGIDFYSTITRARFEELNIDLFRKCMDPVEKCLTDAKMDKSSVHDVVLVGGSTRIPKVQQLLQDFFNGKELCKSINPDEAVAYGAAVQAAILSGERNEKVQDLLLLDVTPLSLGLETAGGVMTILIPRNTTIPTKKEQVFSTYTDNQSGVLIQVYEGERTRSKDNNLLGKFELLGISPAARGVPQITVTFDIDANGILNVSAEDKTTRQKNKITITNDKGRLSKEEIEKMVKEAERYKSEDEKHKKQVAAKNALETYIYNMRNAVNDERITSKLPAEVKKKIDDAMEGAIQWLEANQLAEVDEFDDKRRELEGICKPVIEKLCQGIGVIADRMGMNEDGTASRTGGAGPKIEEVD

SEQ ID NO: 26912 - protein, 203 aa, Lilium longiflorum
QSSQSMESAMITLDLPVIAAYRQLMEIPGETSNSLGDPSQSYALDAPTLTYALDAPTRSYVLDAPTLSYAHDAPTLTYALGAPASTYALDAGAMASTAADVKDLPAAYVFVVDMPGVGSGDLKVKVEGDNVLLISGERKREEEGVYLCIERRVGKLTKMFVLPENANTEAVSAVCKDGVLTVTVEKRPPQEPKKPKVIEVKVA

SEQ ID NO: 26913 - protein, 219 aa, Nicotiana tabacum
MVRGKTQMRRIENATSRQVTFSKRRNGLLKKAFELSVLCDAEVGLVIFSPRGKLYEFASSSMQEIIERYKRHTKDKVQPENQVGEQNLQHMQHAAASLMKKIELLEESKRKLLGEGLQSCSLVELQQIEKQLERSVSTIRARKIQVFKEQIERLKEKEKILASENAILREKFGGLQQRQGSSGEKEGEALCTESSEKSDVETELFIGPPECRIRRPLQN

SEQ ID NO: 26914 - protein, 335 aa, Nepenthes alata
YQWAFAIAAAGITSGSIAERTQFVAYLIYSSFLTGFVYPIVSHWFWSVDGWASASRASNLLLGSGVTDFAGSGVVHMVGGVSGLWGALIEGPRIGRFDRSGRSVILRGHSGSLVVLGTFLLWFGWYGFNPGSFLTILKAYGNNGGYFGQWSAVGRTAVTTTLAGSTAALTTLFGKRLLVGHWNVTDVCNGLLGGFAAITSGCSVVDPWAAIICGFVSSWVLIGFNKLAEKVKYDDPLEAAQLHGGCGMWGLIFTGLFATKKYVSEVYGGSPDRPHGLFMGGGGKLLAAQLIQIVVIFGWVTATMGPLFYGLKWLKLLRVKSEHEMAGMDMTSHGG

SEQ ID NO: 26915 - protein, 379 aa, Nepenthes alata
AVIGSGVLSLAWAIAQLGWVAGPAVLIAFSAITYFTSTMLADCYRAPDPVTGKRNYTYMDVVKAYLGGRKVQLCGLAQYGNLVGVTIGYTITASISMVAVKRSNCFHKHGHRDGCHTSNNPFMIAFACIQIVFSQIPNFHELFMASPIVAAAMSFAYSSIGIGLSIAKVAGGAHARTSLTGVAVGIDVTSTEKVWRTLQAIGDIAFAYAYANVLVEIQDTLKSSPPENKVMRRASLIGGRPPHSFYVLCGCMGYAAFVYDAPGNFLTGFGFYEPFWLIDFANVCIAIHLIGAYQVFGQPIFAFVEGWCRDMWPENKFITREHPIEVPFVGVYYLNLFRLVWRTTYVIITAIVAMLFPFFNDFLGLIGAASFWPLTVYFP

SEQ ID NO: 26916 - protein, 377 aa, Nepenthes alata
AVIGSGVLSLAWAIAQLGWIAGPAVMLLFSFVIYYTSILLADCYRVDDPIFGNRNYTYMDAVRSNLGGVKVKVCGLIQYLNLIGVAIGYTIAASISMMAIRRSNCFHNSGAKKPCHMSSNPYMIMFGILEIILSQIPDFDQIWWLSIVAAVMSFTYSTIGLSLGIAQVAANKAFKGSLTGISIGAVTQTQKIWRSFQALGDIAFAYSYSIILIEIQDTVKSPPSEAKTMKKASLISIVVTTAFYMLCGCMGYAAFGDIAPGNLLTGFGFYNPFWLLDIANAAIVVHLVGAYQVYCQPLFAFVEKSASGKWPKNAFINKGIKIQIPGFGAYDLNIFRLAWRTAFVITTTIISMLLPFFNDIVGILGAFGFWPFTVYFP

SEQ ID NO: 26917 - protein, 376 aa, Nepenthes alata
AVIGSGVLSLAWATAQLGWIAGPTAMLLFSFITFYTSRLLADCCRSGDSFTGERNPTYMDAVRSNLGGIQVKICGLVQYANLFGVSIGYTIAASISMMAIKRSNCFHASDDKNPCQYPASPFMIIFGLTEIIFAQIPDFHRLWWLSIVAAVMSFTYSTVGVSLGIAQVAENGKIKRSLTGISIGTVSQAQRIWRRFQALGDIAFAYSYSLVLVEIQDTIKSPPSEIKTMKKATVMSIAVTTLIYLLCGCMGYAAFGDLAPGNLLTGFGFYNPYWLLDLANAAIVVHLLGAYQVCCQPIFAFIETTASNAFPDNEFITKEVEIPIPGFKPYKLNLFRLVWRTSFVGVTTTISILLPFSNGVVGLLGALAFWPLTVYY

SEQ ID NO: 26918 - protein, 297 aa, Nepenthes alata
DQFDDTDPREKIKKGSFFNWFYFSVNIGALISSSLIVWVQENLGWALGFGIPAISMGIAIASFFSGTALYRLQKPGGSPLTRMCQVLVASFRKSKLALPEDSNLLYETSDENSVIEGGRKLEHTNDLKCLDKAAVVSDKEIKCEDFSNPWRLCTVTQIEELKILIRMFPIWATGIVFSAIYAQMSTMFVEQGEVMDRTIGSFTIPAASLSMFDTISVIFWVPVYDKILVPLARKSTGKQRGFSELQRMGIGLFISILSMAAAALVEMKRLQLAKELGLVDEDVAVPLSIFWQIPPYF

SEQ ID NO: 26919 - protein, 205 aa, Eucalyptus globulus subsp. globulus
MVRGKTQMKRIENDTSRQVTFSKRRNGLLKKAFELSVLCDAEVALIIFSPRGKLYEFSSSSLCKTIEKYQTRAKDMEAKTAEISMQPSKGNTLDMEKKIEHFEISRRRLLGEGLDSCSVEELQQTENQLERSLTKIRARKNHLIREHIERLKAEERKLLEEKRKLLQEIECGKGLTPVSSERPREEIRAESMDVETELFIGPPKR

SEQ ID NO: 26920 - protein, 543 aa, Aspergillus oryzae
MSLSTSSGDFVRLAFVQYTVFLVSINAPAWDYNLVALDYLPKCDLHWVGNCNELNAGYAADGYARINGMSALVTTFGVGELSALNAIAGAYSEFVPIVHIVGQPHTKSQKDGMLLHHTLGNGDFNVFTRMSADISCTLGCLNSTHEVATLIDNAIRECWIRSRPVYISLPTDMVTKKIEGERLDTPLDLSLPPNDPEKEDYVVDVVLKYLHAAKKPVILVDACAIRHRVLDEVHEFVEKSGLPTFVAPMGKGAVDETHKNYGGVYAGTGSNPGVREQVESSDLILSIGAIKSDFNTTGFSYRIGQLNTIDFHSTYVRVRYSEYPDINMKGVLQKIVQRMGNLNVGPVSPPSNLLPDNEKASTEQAITHAWLWPTVGQWLKEKDVVITETGTANFGIWDTRFPAGVTAISQVLWGSIGYSVGACQGAALAAKEQGRRTVLFVGDGSFQLTLQEVSTMIRNNLNPIIFVICNEGYTIERYIHGWEAVYNDIQPWDFLNIPVAFGAKDKYKGYKVTTRDELRELFANEEFASAPCLQFEIDSRIGR

SEQ ID NO: 26921 - protein, 522 aa, Metarhizium anisopliae
MPSLGFLKKKRTRDSNPDPSTSTPTSPVAATSPSKPFDSSTLQQRTSGSQAKTAPGTAPAPSQGSAATAAPASQQQQMNPANAQGGTFVTPLPMQTNQADSQSLPSINNLIHQPQNGASTNNYSSFNPAALGAQISHPPSASPGTDPGHMQQQQQQAYPQPAMQPQQQAGHLPDQQQQQYQQQQHEQRVHHQHQGSVTRVTKGKYSLGDFDILRTLGTGSFGRVHLVQSKHNQRFYAIKVLKKAQVVKMKQVEHTNDERRMLSDVKHPFLITLWGTFQDWKNLYMVMDFVEGGELFSLLRKSGRFPNPVAKFYAAEATLALEYLHSKNIIYRDLKPENLLLDRHGHLKITDFGFAKRVPDKTWTLCGTPDYLAPEVVSNKGYNKSVDWWSLGILIYEMLCGYTPFWDSGSPMRIYENILKGKVKYPAYINTDAQNLLERLITSDLTKRLGNLYGGSQDVKNHPWFSEVTWDRLARKDIDAPYTPPVKAGTGDASQFDRYPEDPEKYGGIGGSDEYGHMFTDF

SEQ ID NO: 26922 - protein, 693 aa, Nicotiana tabacum
MATSSVCIAGNSLSTHRRQKVFRKDIYGRKILFSSNLPSSSKTSRIAVKASLQQRPDEGRRGFLKLLLGNVGLGVPALLGDGKAYADEQGVSNSRMSYSRFLEYLDKDRVQKVDLFENGTIAIVEAISPELGNRVQRVRVQLPGLSQELLQKLREKNIDFAAHNAQEDSGSFLFNLIGNLAFPLILIGGLFLLSRRSPGGMGGPGGPGNPLAFGQSKAKFQMEPNTGVTFDDVAGVDEAKQDFMEVVEFLKKPERFTAVGARIPKGVLLVGPPGTGKTLLAKAIAGEAGVPFFSISGSEFVEMFVGVGASRVRDLFKKAKENAPCIVFVDEIDAVGRQRGTGIGGGNDEREQTLNQLLTEMDGFEGNTGIIVVAATNRADILDSALLRPGRFDRQVSVDVPDIKGRTEILKVHAGNKKFDSDVSLEVIAMRTPGFSGADLANLLNEAAILAGRRGKTAIASKEIDDSIDRIVAGMEGTVMTDGKSKSLVAYHEVGHAICGTLTPGHDAVQKVTLIPRGQAKGLTWFIPADDPTLISKQQLFARIVGGLGGRAAEEVIFGEPEVTTGAAGDLQQITGLAKQMVVTFGMSELGPWSLMDSSAQSGDVIMRMMARNSMSEKLAEDIDGAVKRLSDSAYEIALTHIRNNREAIDKIVEVLLEKETMTGDEFRAILSEFVEIPAENRVAPVVPTPATV

SEQ ID NO: 26923 - protein, 534 aa, Mesembryanthemum crystallinum
MGICASKNKATQPEDNGYTPANGVGSNNQSKPPAQQNYHQQPPQQPVAPPQPASHPPVRMPSPKPAPKVEPNTILGKPFEDVKVYYTLGRELGRGQFGVTYLCTDKKTGQQYACKSISKKKLVTKADKDDMRREIQIMQHMSGQPNIVEFKGAYEDKTSVNLVMELCAGGELFDRIIAKGHYSEKAAATMLRQIVNVVHVCHFMGVMHRDLKPENFLLSSKDENSLLKATDFGLSVFIEEGKVYRDIVGSAYYVAPEVLRRRYGKEIDVWSAGVMLYILLSGVPPFWAETEKGIFDAILQGHIDFESKPWPSISNGAKDLVRKMLTQDPKKRITAAQVLEHPWLRDGEASDKPIDSAVLLRMKQFRVMNKLKKLALKVIAENLPDEEIQGLKQMFANMDTDGSGSITYEELREGLARLGSKLTETEVKALMEAADQDGSGSIDYYEFITATMHRYRLERDEHLYKAFQYFDKDNSGFITTDELETAMKEYGIADENCIAEILLEVDTDNDGRINYDEFSAMMRSGTQNPVTKLI

SEQ ID NO: 26924 - protein, 725 aa, Pseudomonas fluorescens
VDIEAEQKALAAEAWSPRKPIQQGGLLKFVHGGEYHAYNPDVVSTLQAAVQQGDYSKFKEYTSLVDNRPVSMIRDLLKVKTLDTPLDISEIEPLESVLKRFDSAGISLGALSPEAHEALAEAMNRLGARSNSGEGGEDPARYGTIKSSKIKQVATGRFGVTPEYLVNAEVLQIKVAQGAKPGEGGQLPGGKVNGLIAKLRYAVPGVTLISPPPHHDIYSIEDLSQLIFDLKQVNPKALVSVKLVAEAGVGTIAAGVAKAYADLITISGYDGGTGASPLTSIKYAGAPWELGLAETHQTLRGNDLRGKVRVQTDGGLKTGLDVIKAAILGAESFGFGTAPMIALGCKYLRICHLNNCATGVATQNDKLRKDHYIGTVDMVVNFFTYVAEETREWLAKLGVRSLEELIGRTDLLEVIEGQTAKQHHLDLTPLLGSDYIPADKPQFCQVDRNPPFDKGELAEKMVDMAAAAINDLSGAEFDLDICNCDRSIGARISGEIARKHGNQGMAKAPVTFRFKGTAGQSFGVWNAGGLNMYLEGDANDYVGKGMTGGKLVIVPPKGSVYKTQDSAIIGNTCLYGATGGKLFAAGTAGERFAVRNSGAHTVVEGTGDHCCEYMTGGFVCVLGKTGYNFGSGMTGGFAYVLDQDNTFVDRVNHELVEIQRISGEAMEAYRSHLQNVLNEYVAETDSEWGRELAENLDDYLRRFWLVKPKAANLKSLLSSTRANPQ

SEQ ID NO: 26925 - protein, 154 aa, Pisum sativum
MKGGKSKGESKKAETKLAVNKKGAPATKGGKKPAKGKEPKDPNKPKRPPSAFFVFMEDFRKQFKKGNADNKAVSAVGKAAGAKWKSMTEAEKAPYAAKAEKRKAEYEKSMKSYNKKQAEGPAAVEEEEESEKSESEVHDENDDEEESEEEDDDE

SEQ ID NO: 26926 - protein, 626 aa, Chlamydia trachomatis
MSEKRKSNKIIGIDLGTTNSCVSVMEGGQPKVIASSEGTRTTPSIVAFKGGETLVGIPAKRQAVTNPEKTLASTKRFIGRKFSEVESEIKTVPYKVAPNSKGDAVFDVEQKLYTPEEIGAQILMKMKETAEAYLGETVTEAVITVPAYFNDSQRASTKDAGRIAGLDVKRIIPEPTAAALAYGIDKEGDKKIAVFDLGGGTFDISILEIGDGVFEVLSTNGDTHLGGDDFDGVIINWMLDEFKKQEGIDLSKDNMALQRLKDAAEKAKIELSGVSSTEINQPFITIDANGPKHLALTLTRAQFEHLASSLIERTKQPCAQALKDAKLSASDIDDVLLVGGMSRMPAVQAVVKEIFGKEPNKGVNPDEVVAIGAAIQGGVLGGEVKDVLLLDVIPLSLGIETLGGVMTPLVERNTTIPTQKKQIFSTAADNQPAVTIVVLQGERPMAKDNKEIGRFDLTDIPPAPRGHPQIEVTFDIDANGILHVSAKDAASGREQKIRIEASSGLKEDEIQQMIRDAELHKEEDKQRKEASDVKNEADGMIFRAEKAVKDYHDKIPAELVKEIEEHIEKVRQAIKEDASTTAIKAASDELSTRMQKIGEAMQAQSASAAASSAANAQGGPNINSED

SEQ ID NO: 26927 - protein, 961 aa, Arabidopsis thaliana
MTPFRWRLLGGGIHYNTLKVEHNESGPLSLKGLFGSVSGNFTFFTFLGSHLMVRISLLLLCLLVSTCLFTSSSAQAGFVSLDCGGAEPFTDELGLKWSPDNHLIYGETANISSVNETRTQYTTLRHFPADSRKYCYTLNVTSRNRYLIRATFLYGNFDNSNNVYPKFDISLGATHWATIVISETYIIETAELVFLASSPTVSVCLSNATTGQPFISTLELRQLSGSMYGSMLSEDRFYLSVAARINFGAESEASVRYPDDPYDRIWESDLQKKPNYLVDVAAGTVRVSTTLPIESRVDDRPPQKVMQTAVVGTNGSLTYRMNLDGFPGFGWAFTYFAEIEDLAEDESRKFRLVLPEQPEYSKSVVNIKENTQRPYRVYAPGYPNITLPFVLNFRFAKTADSSRGPILNAMEISKYLRKSDGSVDATVMANVASLYSSTEWAQEGGDPCSPSPWSWVQCNSDPQPRVVAIKLSSMNLTGNIPSDLVKLTGLVELHLENNRLTGKIPSSLTKLPNLKELYLQNNVLTGTIPSDLAKDVISNFSGNLNLEKSGDKGKKLGVIIGASVGAFVLLIATIISCIVMCKSKKNNKLGKTSAELTNRPLPIQRVSSTLSEAHGDAAHCFTLYEIEEATKKFEKRIGSGGFGIVYYGKTREGKEIAVKVLANNSYQGKREFANEVTLLSRIHHRNLVQFLGYCQEEGKNMLVYEFMHNGTLKEHLYGVVPRDRRISWIKRLEIAEDAARGIEYLHTGCVPAIIHRDLKTSNILLDKHMRAKVSDFGLSKFAVDGTSHVSSIVRGTVGYLDPEYYISQQLTEKSDVYSFGVILLELMSGQEAISNESFGVNCRNIVQWAKMHIDNGDIRGIIDPALAEDDYSLQSMWKIAEKALLCVKPHGNMRPSMSEVQKDIQDAIRIEKEALAARGGISDEFSRSSAHSSSLNMGMLDLAGSQSYVSIDESVLQPTAR

SEQ ID NO: 26928 - protein, 569 aa, Arabidopsis thaliana
MAATRVRCCHSNAAFTRLPLTRHRNSPTLPISLNRVDFPTLKKLSLPIGDGSSIRKVSGSGSRNIVRAVLEEKKTEAITEVDEKGITCVMKFGGSSVASAERMKEVADLILTFPEESPVIVLSAMGKTTNNLLLAGEKAVSCGVSNASEIEELSIIKELHIRTVKELNIDPSVILTYLEELEQLLKGIAMMKELTLRTRDYLVSFGECLSTRIFAAYLNTIGVKARQYDAFEIGFITTDDFTNGDILEATYPAVAKRLYDDWMHDPAVPIVTGFLGKGWKTGAVTTLGRGGSDLTATTIGKALGLKEIQVWKDVDGVLTCDPTIYKRATPVPYLTFDEAAELAYFGAQVLHPQSMRPAREGEIPVRVKSSYNPKAPGTIITKTRDMTKSILTSIVLKRNVTMLDIASTRMLGQVGFLAKVFSIFEELGISVDVVATSEVSISLTLDPSKLWSRELIQQELDHVVEELEKIAVVNLLKGRAIISLIGNVQHSSLILERAFHVLYTKGVNVQMISQGASKVNISFIVNEAEAEGCVQALHKSFFESGDLSELLIQPRLGNGSPVRTLQVED

SEQ ID NO: 26929 - protein, 491 aa, Zymomonas mobilis subsp. mobilis ZM4
MLSLPIWFSCDYRKSGKGRVSKMPEKSPKLSKTLSSFHLWGIAVGLVISGEYFGWSYGWATAGTMGFLIATVIVAAIYTSFIFSFTELTCSIPQAGGPFAYSFRALGKWGGAIAGMATLVEFLFAPPAIALAIGSYLNVQFPSLSPKMAAACAYIVFMALNIVGVRIAATFELFITVAAIFELLVFMGVVAPAFSWEQFLHDGWGVASHFDIQAIGGIFAAVPFAIWFFLAIEGVAMAAEEAKNPRRSIPIAYTAGILTLVSLAFGVMVFAGGSMDWHQLANLNDPLPQAMKHVVGAHSGWLHMLVFLGLFGLVSSLHGIIMGYGRQIFALARAGFLPATLGKLHIKLQTPYAATIAGGLVGIAAIFADDVLSFGGHSLTAILVTMSVLGSLTMYVLSMVSLFRLRQTMPDLPRPYKAPLYPFLPALALIGAFFLLAAVIYYNAGISFIYALLMCIACPLCLYSYKRSQNKKTEENDITTSAILAAEGAEE

SEQ ID NO: 26930 - protein, 400 aa, Klebsiella pneumoniae
MKQVYLDNNATTRLDPMVLEAMMPFLTDFYGNPSSIHDFGIPAQAALERAHQQAAALLGAEYPSEIIFTSCATEATATAIASAIALLPERREIITSVVEHPATLAACEHMEREGYRIHRIAVDGEGALDMAQFRAALSPRVALVSVMWANNETGVLFPIGEMAELAHEQGALFHCDAVQVVGKIPIAVGQTRIDMLSCSAHKFHGPKGVGCLYLRRGTRFRPLLRGGHQEYGRRAGTENICGIVGMGAACELANIHLPGMTHIGQLRNRLEHRLLASVPSVMVMGGGQPAVPGTVNLAFEFIEGEAILLLLNQAGIAASSGSACTSGSLEPSHVMRAMNIPYTAAHGTIRFSLSRYTREKEIDYVVATLPPIIDRLRALSPYWQNGKPRPADAVFTPVYG

SEQ ID NO: 26931 - protein, 568 aa, Zymomonas mobilis
MSYTVGTYLAERLVQIGLKHHFAVAGDYNLVLLDNLLLNKNMEQVYCCNELNCGFSAEGYARAKGAAAAVVTYSVGALSAFDAIGGAYAENLPVILISGAPNNNDHAAGHVLHHALGKTDYHYQLEMAKNITAAAEAIYTPEEAPAKIDHVIKTALREKKPVYLEIACNIASMPCAAPGPASALFNDEASDEASLNAAVDETLKFIANRDKVAVLVGSKLRAAGAEEAAVKFTDALGGAVATMAAAKSFFPEENALYIGTSWGEVSYPGVEKTMKEADAVIALAPVFNDYSTTGWTDIPDPKKLVLAEPRSVVVNGIRFPSVHLKDYLTRLAQKVSKKTGSLDFFKSLNAGELKKAAPADPSAPLVNAEIARQVEALLTPNTTVIAETGDSWFNAQRMKLPNGARVEYEMQWGHIGWSVPAAFGYAVGAPERRNILMVGDGSFQLTAQEVAQMVRLKLPVIIFLINNYGYTIEVMIHDGPYNNIKNWDYAGLMEVFNGNGGYDSGAAKGLKAKTGGELAEAIKVALANTDGPTLIECFIGREDCTEELVKWGKRVAAANSRKPVNKVV

SEQ ID NO: 26932 - protein, 151 aa, Azospirillum brasilense
MTTELNQGEQFVADFRANAAALTTANAYNPEDEHDACGVGFIAAIDGKPRRSVVEKGIEALKAVWHRGAVDADGKTGDGAGIQRRVPQKFFKDHVKVIGHRAPDNKLAVGQVFLPRISLDAQEACRCIVETEILRFGYYIYGWRQVPINVD

SEQ ID NO: 26933 - protein, 355 aa, Lactobacillus delbrueckii
MAPKALETYSQVVTKIWGNPSSLHKLGDRAHGLLEASRKQVADLLGVNTDEIYFTSGGTESNNTAIKGTAWAKREFGKHIITSSVEHASVANTFTELENLGFRVTRLPVDKEGRVNPEDLKAALDKDTTLVSIMGVNNEIGTIQPIKEISEILADYPNIHFHVDNVQALGKGIWDQVFTSRVDMMSFSSHKFHGPRGIGILYKKRGRMLMPLCEGGGQEKGLRSGTENLAAIAAMAKAARLLLTDEKEKADREYAIKEKISKYLAGKPGIHIFSPLKADFAPHILCFALEGIRGETLVHTLEDQDIYISTTSACASKKADEASTLVAMKTPDAIATSAVRLSFDESNTLEEADEF

SEQ ID NO: 26934 - protein, 107 aa, Synechococcus elongatus PCC 7942
MTPELQERLTSIINGDKIVVFMKGNKLMPQCGFSNNVVQILNILGVPFTTVDVLADYDIRQGIKEFSNWPTIPQVYVNGEFIGGSDILIELYQNGELQQMLEVALAS

SEQ ID NO: 26935 - protein, 151 aa, Lupinus luteus
LTESQAALVKSSWEEFNANIPKHTHRFFILVLEIAPAAKDLFSFLKGTSEVPQNNPELQAHAGKVFKLVYEAAIQLQVTGVVVTDATLKNLGSVHVSKGVADAHFPVVKEAILKTIKEVVGAKWSEELNSAWTIAYDELAIVIKKEMNDAA

SEQ ID NO: 26936 - protein, 236 aa, Arabidopsis thaliana
MYSSPSSWSSSQESLLWNESCFLDQSSEPQAFFCPNYDYSDDFFSFESPEMMIKEEIQNGDVSNSEEEEKVGIDEERSYRGVRKRPWGKFAAEIRDSTRNGIRVWLGTFDKAEEAALAYDQAAFATKGSLATLNFPVEVVRESLKKMENVNLHDGGSPVMALKRKHSLRNRPRGKKRSSSSSSSSSNSSSCSSSSSTSSTSRSSSKQSVVKQESGTLVVFEDLGAEYLEQLLMSSC

SEQ ID NO: 26937 - protein, 649 aa, Mycobacterium leprae
MFERFTDRARRVVVLAQEEARMLNHNYIGTEHILLGLIHEGEGVAAKSLDSLGISLEAVRSQVEDIIGQGQQAPSGHIPFTPRAKKVLELSLREALQLGHNYIGTEHILLGLIREGEGVAAQVLVKLGAELTRVRQQVIQLLSGYQGKEAAEAGTGGRGGESGSPSTSLVLDQFGRNLTAAAMESKLDPVIGREKEIERVMQVLSRRTKNNPVLIGEPGVGKTAVVEGLAQAIVHGEVPETLKDKQLYTLDLGSLVAGSRYRGDFEERLKKVLKEINTRGDIILFIDELHTLVGAGAAEGAIDAASILKPKLARGELQTIGATTLDEYRKYIEKDAALERRFQPVQVGEPTVEHTIEILKGLRDRYEAHHRVSITDSAMVAAATLADRYINDRFLPDKAIDLIDEAGARMRIRRMTAPPDLREFDEKIAEARREKESAIDAQDFEKAASLRDREKQLVAQRAEREKQWRSGDLDVIAEVDDEQIAEVLGNWTGIPVFKLTEAETTRLLRMEEELHKRIIGQEDAVKAVSKAIRRTRAGLKDPKRPSGSFIFAGPSGVGKTELSKALANFLFGDDDALIQIDMGEFHDRFTASRLFGAPPGYVGYEEGGQLTEKVRRKPFSVVLFDEIEKAHQEIYNSLLQVLEDGRLEF

SEQ ID NO: 26938 - protein, 403 aa, Arabidopsis thaliana
EESRSLNFALPSIFLEVKMVEQTQHPTILQKVSGQLLSSSVSQDIRGYASASKRPATYQKHAAYGNYSNAAFQYPLVAASQIATTTSPVFVQAPGEKGFTNFAIDFMMGGVSAAVSKTAAAPIERVKLLIQNQDEMLKAGRLTEPYKGIRDCFGRTIRDEGIGSLWRGNTANVIRYFPTQALNFAFKDYFKRLFNFKKDKDGYWKWFAGNLASGGAAGASSLLFVYSLDYARTRLANDSKSAKKGRGERQFNGLVDVYKKTLKSDGIAGLYRGFNISCAGIIVYRGLYFGLYDSVKPVLLTGDLQDSFFASFALGWLITNGAGLASYPIDTVRRRMMMTSGEAVKYKSSFDAFSQIVKKEGAKSLFKGAGANILRAVAGAGVLAGYDKLQLIVFGKKYGSGGA

SEQ ID NO: 26939 - protein, 623 aa, Mycobacterium avium subsp. paratuberculosis
MARAVGIRYGTTNSVVAVLEGGDPVVVANSEGSRTTPSIVAFARNGEVLVGQPAKNQAVTNVDRTIRSVKRHMGTDWSIEIDGKKYTAQEISARVLMKLKRDAEAYLGEDITDAVITVPAYFNDAQRQATKEAGQIAGLNVLRIVNEPTAAALAYGLDKGEKEQTILVFDLGGGTFDVSLLEIGEGVVEVRATSGDNQLGGDDWDDRIVNWLVDKFKGTSGIDLTKDKMAMQRLREAAEKAKIELSSSQSTSINLPYITVDADKNPLFLDEQLTRAEFQRITQDLLDRTRQPFKSVIADAGISVSDIDHVVLVGGSTRMPAVTDLVKELTGGKEPNKGVNPDEVVAVGAALQAGVLKGEVKDVLLLDVTPLSLGIETKGGVMTKLIERNTTIPTKRSETFTTADDNQPSVQIQVYQGEREIAAHNKLLGSFELTGIPPAPRGVPQIEVTFDIDANGIVHVTAKDKGTGKENTIKIQEGSGLSKEEIDRMIKDAEAHAEEDRKRREEADVRNQAESLVYQTEKFVKDQREAEGGSKVPEETLSKVDAAIADAKTALGGTDITAIKSAMEKLGQESQALGQAIYEATQAESAQAGGPDGAAAGGGSGSADDVVDAEVVDDDRESK

SEQ ID NO: 26940 - protein, 583 aa, Nicotiana tabacum
SIKFLAPSLPNPARFSKNAVKLHATPPSVAAPPPGAPEVAAERLEPRVEEKDGYWILKEQFRKGINPQEKVKIEKQPMKLFMENGIEELAKIPIEEIDQSKLTKDDIDVRLKWLGLFHRRKNQYGRFMMRLKLPNGVTTSAQTRYLASVIRKYGKEGCADITTRQNWQIRGVVLPDVPEILKGLAEVGLTSLQSGMDNVRNPVGNPLAGIDPEEIVDTGPYTNLLSQFITGNSRGNPAVSNLPRKWNPCVVASHDLYEHPHINDLAYMPATKDGRFGFNLLVGGFFSAKRCDEAIPLDAWVPADDVVPVCKAILEAFRDLGFRGNRQKCRMMWLIDELGVEGFRAEVEKRMPQQELERASPEDLVQKQWERRDYLGVHPQKQEGYSFIGLHIPVGRVQADDMDELARLADEYGSGEIRLTVEQNIIIPNIENSKIEALLKEPVLSTFSPDPPILMKGLVACTGNQFCGQAIIETKARSLMITEEVQRQVSLTRPVRMHWTGCPNTCAQVQVADIGFMGCLTRDKNGKTVEGADVFLGGRIGSDSHLGEVYKKAVPCDDLVPLVVDLLVNNFGAVPREREETED

SEQ ID NO: 26941 - protein, 456 aa, Nicotiana tabacum
MMRLKLPNGVTTSAQTRYLASVIRKYGKEGCADITTRQNWQIRGVVLPDVPEILKGLAEVGLTSLQSGMDNVRNPVGNPLAAIDPEEIVDTRPYTNLLSQFITGNSRGNPALSNLPSKWNPCVVGSHDLYEHPHINDLAYMPATKDGRFGFNLLVGGFFSAKRCDEAIPLDAWVPADDVVPVCKAILEAFRDLGFRGNRQKCRMMWLIDELGVEGFRAEVEKRMPQQQLERASPEDLVQKQWERRDYLGVHPQKQEGYSFIGLHIPVGRVQADDMDELARLADEYGSGEIRLTVEQNIIIPNIETSKIEALLKEPVLSTFSPDPPILMKGLVACTGNQFCGQAIIETKARSLKITEEVQRQVSLTKPVRMHWTGCPNTCAQVQVADIGFMGCLTRDKNGKTVEGADVFLGGRIGSDSHLGEVYKKAVPCDDLVPLVVDLLVNNFGAVPREREETED

SEQ ID NO: 26942 - protein, 347 aa, Nicotiana tabacum
GDVTTRQNWQIRGVVLPDVPEILKGLDEVGLTSLQSGMDNVRNPVGNPLAGIDPHEIVDTRPYTNLLSQYVTANFRGNPAVTNLPRKWNVCVIGSHDLYEHPHINDLAYMPASKDGRFGFNLLVGGFFSPKRCAEAVPLDAWVPADDVVPVCKAILEAYRDLGTRGNRQKTRMMWLVDELGVEGFRAEVVKRMPQQKLDRESTEDLVQKQWERREYLGVHPQKQEGYSFVGLHIPVGRVQADDMDELARLADNYGSGELRLTVEQNIIIPNVENSKIESLLNEPLLKNRFSTNPPILMKNLVACTGNQFCGQAIIETKARSMKITEEVQRLVSVTKPVRMHWTGCPN

SEQ ID NO: 26943 - protein, 255 aa, Solanum lycopersicum
MRIFVFLVLLTVAIGTENLNSHVFPRPLIIEYPEKQLRDELKCTTWRFVVETNNLSPWKTIPEECADYVKEYMVGPGYKMEIDRVSDEAGEYAKSVDLGDDGRDVWIFDVDETLLSNLPYYSDHRYGLEVFDDVEFDKWVENGIAPALGSSLKLYQEVLKLGFKVFLLTGRSERHRSVTVENLMNAGFHDWHKLILRGSDDHGKTATTYKSERRNAMVEEGFRIVGNSGDQWSDLLGSSMSYRSFKLPNPMYYIL

SEQ ID NO: 26944 - protein, 70 aa, Vibrio cholerae
MSTKMTGSVKWFNETKGFGFLTQDNGGNDVFVHLNSIQSEGFKTLAEGQRVSFIVEQGKKGPQASNVVAL

SEQ ID NO: 26945 - protein, 770 aa, Arabidopsis thaliana
MNANACKDNPTMRGLLRASSLLLCGVILIQLLAAQIHAQSKKPKSPWPTLTGDPPLVIARGGFSGLFPDSSYDAYNFAILTSVPDAVLWCDVQLTKDALGICFPDLTMRNSSSIEAVYPTRQKSYPVNGVPTSGWFTIDFSLKDLKDVNLIRGILSRSEKFDGNSNPIMTVQSVSTQMKPSFFWLNVQHDAFYAQHNLSMSSFLVAASKTVLIDFISSPEVNFFKKIAGRFGRNGPSLVFRFLGQDEFEPTTNRTYGSILSNLTFVKTFASGILVPKSYILPLDDQQYLLPHTSLVQDAHKAGLEVFVSGFANDIDIAHDYSFDPVSEYLSFVDNGNFSVDGVLSDFPITASASLDCFSHVGRNATKQVDFLVITKDGASGDYPGCTDLAYKKAIKDGADVIDCSVQLSSDGTPFCLSSIDLGNSTTVSLTAFRNRSTTVPELGSLGAIYTFSLTWAEIQTLTPAISNPYRVTSLFRNPKQKNAGKLFSLSDFLSLAKNSTSLSGVLISVENAAYLREEQGLDVVKAVLDTLTQTGYSNSTATKVMIQSTNSSVLVDFKKQSQYETVYKVEENIRDILDSAIEDIKKFADAVVIQKLSVFPVAQSFITTQTNVVEKLQKSQLPVYVELFQNEFLSQPYDFFADATVEINSYITGAGINGTITEFPFTAARYKRNLCLGRKETIPYMAPAQPGALLTLVSPTAFPPAEAPNPVFTDADVTEPPLPPVTAKAPTSSPGTPSTNAQAPSGQTRITLSLLLSVFAMVLASLLLL

SEQ ID NO: 26946 - protein, 473 aa, Arabidopsis thaliana
MSIALGNLFDLESQESGGSPLFMSPAPSTDPQPISGEKNGGDGGRIPVEEWLPITESRKGNVYTATFHLLCSGIGLQVILLPAAFAALGWVWGTIILTVGFVWKLYTTWLLVQLHEAVPGIRISRYVRLAIASFGGACTILVITGGKSIQQLLQIMSDDNTAPLTSVQCFLVFSCIAMIMSQFPNLNSLFGVSLIGAFMGIAYCTVIWILPVASDSQRTQVSVSYATMDKSFVHIFNAIGLIALVYRGNNLVLEIQVLTNSQLKHDLDGTLPSDSKNPSCKTMWRAVMISHALVAICMFPLTFAVYWAYGDKIPATGGPVGNYLKLYTQEHSKRAACFIHLTFIFSCLCSYPINLMPACDNIEMVYITKKKKPASIIVRMMLRVFLSLVCFTIAVGFPFLPYLAVLIGAIALLVTFTYPCFMWISIKKPQRKSPMWLFNVLVGCLGASLSVLLLVASAMRLAQKGLHANFFRP

SEQ ID NO: 26947 - protein, 676 aa, Erwinia amylovora
MPATEIPEKPQKDRINPVVFYTSAVLILLFSLTTILFTEFSDRWINRTLNWVSNTFGWYYLLAATLYIVFVIFMACSRFGSIKLGPEQSKPEFSLMSWAAMLFAAGIGIDLMFFSVAEPVTQYMMPPEGQGQTLEAARQAMVWTLFHYGLTGWSMYALMGIALGYFSYRYGLPLTIRSALYPIFGKRVNGPIGHTVDIAAVLGTIFGIATTLGIGVVQLNYGLKVLFDVPEGLTAQAGLIVLSVIMATISVTSGVNKGIRLLSELNVLLAFGLILFVLFVGDTSFLLNALVLNVGDYINRFMGMTLDSFAFDRPAEWMNNWTLFFWAWWVAWSPFVGLFLARISRGRTIRQFVLGTLTIPFIFTLLWLSIFGNSALNEIIHGNLALAQETLAHPERGFYSLLAQYPGFTFSASVATITGLLFYVTSADSGSLVLGNFTSRLADINNDAPNWLRIFWSVTIGVLTMGMLMVNGVTALQKTTVIMGLPFSFVIFFVMAGLYKSLRVEDHRRASATVNTPPVTVDRLNWKQRISRVMNYPGTTHTRKMLDNVCRPAMEEVGRELEHRGAKVQVNELPAVDDERLNHLELLVDLADEQSFLYQIWPQRYSVPAFTYRARSGKSDYFRLETFLLEGTQGNDLMDYTKEQIINDILDQYERHLTFLHIHREAPGNSMPFPEV

SEQ ID NO: 26948 - protein, 74 aa, Vicia faba var. minor
KDPNKPKRPPSAFFVFMADFREQYKKDHPNNKSVAAVGKACGEEWKSLSEEEKAPYVDRALKKKEEYEITLQAY

SEQ ID NO: 26949 - protein, 445 aa, Pisum sativum
GGFSVVRKGTRKSNNDDEKSQSQSKSQSQSQVAIKTLRRLGTSNNLPRKKDGGENSTETMMKFPTMRQVSVSDALLTNEILVMRRIVENVSPHPNVIDLYDVYEDTNGVHLVLELCSGGELFDRIVAQDKYSETEASTVVHQIVAGLEAIHRANIIHRDLKPENCLFLDVGKDSSLKIMDFGLSSVEEFTDPVVGLFGSIDYVSPEALSQGKITTKSDMWSLGVILYILLSGYPPFIAQNNRQKQQMILNGNFSFYEKTWKGISQSAKNLISSLLTVDPAKRPSAQELLSDPWVKGEKAKDDQMDPEIVSRLQRFNARRKLRAAAIASVWSSTIFLRTKKLKSLVGSYDLKEDEIENLRMHFKKICADRDNATLCEFEEVLKAMKMPSLIPFAARIFDLFDNNRDGTVDMREILCGFSSLKNSKGEDALRLCFQMYDTDRSGCIT

SEQ ID NO: 26950 - protein, 429 aa, Phragmites australis
MAQPVVPAMQCQVGARGKAAVRARPAGAGGRVWGVKRSGRGTSGFKVMAVSTESTGVVPRLEQLLNMDTKPFTDKIIAEYIWVGGSGIDLRSKSRTLSKPVEDPSELPKWNYDGSSTGQAPGEDSEVILYPQAIFKDPFRGGNNILVICDTYTPAGEPIPTNKRHRAAQIFSDPKVVDQVPWFGIEQEYTLLQTDVNWPLGWPVGGYPGPQGPYYCAVGADKSFGRDISDAHYKACLYAGINISGTNGEVMPGQWEYQVGPSVGIEAGDHIWISRYILERITEQAGIVLTLDPKPIQGDWNGAGCHTNYSTKSMREDGGFEVIKKAILNLSLRHDLHISAYGEGNERRLTGLHETASIDNFSWGVANRGCSIRVGRDTEAKGKGYLEDRRPASNMDPYVVTSLLAETTILWEPTLEAEALATKKLALKV

SEQ ID NO: 26951 - protein, 429 aa, Phragmites australis
MAQAVVPAMQCQVGVKAAVRARPAAAGAGGRVWGVRRSGRGTSGFKVMAMGMSTSGVVPRLEQLLNMDTKPYTDNIIAEYIWVGGSGIDVRSKSRTISKPVEDPSELPKWNYDGSSTGQAPGEDSEVILYPQAIFKDPFRGGNNILVICDTYTPAGEPIPTNKRHRAAQIFSDPKVVSQVPWFGIEQEYTLLQTDVNWPLGWPVGGYPGPQGPYYCAVGADKSFGRDISDAHYKPCLYAGINISGTNGEVMPGQWEYQVGPSVGIEAGDHIWISRYILERITEQAGVVLTLDPKPIQGDWNGAGCHTNYSTKSMREDGGFEVIKKAILNLSLRHDLHISAYGEGNERRLTGLHETASIDNFSWGVANRGCSIRVGRDTEAKGKGYLEDRRPASNMDPYVVTSLLAETTILWEPTLEVEALAAKKLALKV

SEQ ID NO: 26952 - protein, 352 aa, Medicago sativa
MASSINGRKPSEIFKAQALLYKHIYAFIDSMSLKWAVEMNIPNIIQNHGKPISLSNLVSILQVPSSKIGNVRRLMRYLAHNGFFEIITKEEESYALTVASELLVRGSDLCLAPMVECVLDPTLSGSYHELKKWIYEEDLTLFGVTLGSGFWDFLDKNPEYNTSFNDAMASDSKLINLALRDCDFVFDGLESIVDVGGGTGTTAKIICETFPKLKCIVFDRPQVVENLSGSNNLTYVGGDMFTSIPNADAVLLKYILHNWTDKDCLRILKKCKEAVTNDGKRGKVTIIDMVIDEKKDENQVTQIKLLMDVNMACLNGKERNEEEWKKLFIEAGFQHYKISPLTGFLSLIEIYP

SEQ ID NO: 26953 - protein, 352 aa, Medicago sativa
MASSINGRKPSEIFKAQALLYKHIYAFIDSMSLKWAVGMNIPNIIHNHGKPISLSNLVSILQVPSSKIGNVRRLMRYLAHNGFFEIITKEEESYALTVASELLVRGSDLCLAPMVECVLDPTLSGSYHELKKWIYEEDLTLFGVTLGSGFWDFLDKNPEYNTSFNDAMASDSKLINLALRDCDFVFDGLESIVDVGGGTGTTAKIICETFPKLKCIVFDRPQVVENLSGSNNLTYVGGDMFTSIPNADAVLLKYILHNWTDKDCLRILKKCKEAVTNDGKRGKVTIIDMVINEKKDENQVTQIKLLMDVNMACLNGKERNEEEWKKLFIEAGFQHYKISPLTGFLSLIEIYP

SEQ ID NO: 26954 - protein, 352 aa, Medicago sativa
MASSINGRKPSEIFKAQALLYKHIYAFIDSMSLKWAVEMNIPNIIQNHGKPISLSNLVSILQVPSSKIGNVRRLMRYLAHNGFFEIITKEEESYALTVASELLVRGSDLCLAPMVECVLDPTLSGSYHELKKWIYEEDLTLFGVTLGSGFWDFLDKNPEYNTSFNDAMASDSKLINLALRDCDFVFDGLESIVDVGGGTGTTAKIICETFPKLKCIVFDRPQVVENLSGSNNLTYVGGDMFTSIPNADAVLLKYILHNWTDKDCLRILKKCKEAVTNDGKRGKVTIIDMVIDKKKDENQVTQIKLLMDVNMACLNGKERNEEEWKKLFIEAGFQHYKISPLTGFLSLIEIYP

SEQ ID NO: 26955 - protein, 403 aa, Vibrio vulnificus YJ016
MSKLNVNKVVVAYSGGLDTSVIIPWLKENYDCEVVAFVADVGQGEEELVGIEEKAKASGASECYVVDLKEELVADYIYPTLKTGAYYEGKYLLGTSMARPVIAKAQVEIARKVGADALCHGCTGKGNDQVRFEGAFAALAPDLKVIAPWREWDLVSREQCLDYLAERNIPCAASLTKIYSRDANAWHISTEGGVLESTWNAPNEDCWVWTVDPEQAPNEAEYVTLQVEKGEVVAVDGEQMTPYNALVYLNEKGAKHGVGRIDIVENRLVGMKSRGCYETPGGTIMMEALRAVEQLVLDKTSFEFREELGLKASHLVYDGRWFTPLRKSIMAAADELAQDVNGEVVVKLYKGMATVTQKRSENSLYSEAFATFGEDEVYDQSHAGGFIRLYSLSSRIRALNSQK

SEQ ID NO: 26956 - protein, 404 aa, Pirellula sp.
MKSCVLAYSGGLDTSVILGWLQDQGYEVHCVYVDLGQPCEDRDAIMEKARTCGAKSSRLVDVREELCRDFAFPVLAWQAKYEQIYLLGTSIARPLISKVCLEVAREVGATAYAHGATGKGNDQCRFQLAAEALDPNIEMIAPWRIKSFRDAFPGRTELIEYCDVKRIPVKASTAKPYSSDENVLHISYEAGKLEELDVNGVELVEFGMGVSPQDAPDKPEEVTIGFESGVPKTLNGKAVNALEMVEQLNDIAGRNGVGRIDMVENRFVGMKSRGVYESPGMTVLYDALMYVEQLTMDRDLMHLRDRMAPEVAEMVYYGFWYTPKMDALMSFIETAQRPVTGEVTLQLYKGNIMVSSRTSPNSLYDEEIATMEGGGSYNQDDAEGFLRIQGLPSRVQGRVSPRKF

SEQ ID NO: 26957 - protein, 510 aa, Allium cepa
MPIPVLLLLTIFLALLLYLFFFVAKKHEGKRVPGPKGWPILGNLPQLGAKPHQSLCELSRTYGPLFGLRFGYVDVVVAASADVAEQFLRVHDVNFSNRPPNSGAEHIAYNYQDLVFAPYGPRWRMLRKLCALHLFSPKALEDLSPVRSLEVATLANTLYLRAQSDQPTVNLAQMLTTCTTNALSKAMMGRRVFVNETTDTETSKFKDMVLEIMSLAGVFNVGDFVPWLRPFDLQRVVRKMKDVHARFDSFLDKVIAEHRMVDNAHDLLSLLIRSKDDVDNDGVKLTNTDIKALLLNLFTAGTDTSSSTVEWALSEMIRHPDALKRAQRELDEVVGRDRLVSETDIRSLPYIQAIVKETFRLHPSTPLSLPRISSEACTVNGYLIPKNTTLLVNVWAISRDPGVWKEPLEFRPERFLGGGGYETVDLKGNDFELIPFGAGRRVCAGLSLGLRMVQFLTATLVHGFDWKLVDGQSAEKLDMEEAYGLPLQRAVPLMVRPVPRLDEKAYHVVV

SEQ ID NO: 26958 - protein, 767 aa, Aspergillus fumigatus
MFNQSLDLPVLFPYPRIYPEQYAYMCDLKKTLDAGGHCVLEMPSGTGKTVSLLSLIIAYQQHYPEHRKLIYCSRTMSEIEKALAELKELMKFRSQQLGYTEDFRALGLTSRKNLCLHPSVKREKSGTVVDARCRSLTAGFVKEKKERGEDVELCIYHEVCADVLRKLWVQMPYCNVIIYSYHYLLDPKIAERVSRELSKDCIVVFDEAHNIDNVCIEALSIDITEDSLRKATRGANNLERKISEMKSSDAEKLQNEYSKLVEGLREAEQARDEDQFIANPVLPDDLLKEAVPGNIRRAEHFVAFLKRFIEYLKTRMKVTHTISETPPSFLTHVKDLTFIERKPLRFCAERLTSLVRTLELINIEDYQPLQEVATFATLVSTYDKGFLLILEPFESETATVPNPVLHFTCLDAAIAIKPVFDRFSSVIITSGTLSPLEMYPKMLGFPTVLQESYTMTLARRSFLPMIVTRGSDQAQISSSFQIRNDPGVVRNYGNIVLEFSRITPDGIVVFFPSYLYMESIISMWQGMGILDSIWNYKLILVETPDAQESSLALETYRTACCNGRGAILFCVARGKVSEGIDFDHHYGRAVLCIGVPFQYTESRILKARLEFLRENYRIRENDFLSFDAMRHAAQCLGRVLRGKDDYGIMVLADRRFQKKRNQLPKWISQAMLESETNLSTDMAVATAKNFLRTMAQPFKAKDQEGISTWSLADIERHREKQMLEEERVRREAVANGRATNGTHNGASAAADEFDDDIDEDLMMLDAQ

SEQ ID NO: 26959 - protein, 301 aa, Arabidopsis thaliana
MKRLSSSDSMCGLISTSTDSFGYTTDEQSPRGYGSNYQSMLEGYDEDATLIEEYSGNHHHMGLSEKKRRLKVDQVKALEKNFELENKLEPERKTKLAQELGLQPRQVAVWFQNRRARWKTKQLEKDYGVLKGQYDSLRHNFDSLRRDNDSLLQEISKIKAKVNGEEDNNNNKAITEGVKEEEVHKTDSIPSSPLQFLEHSSGFNYRRSFTDLRDLLPNSTVVEAGSSDSCDSSAVLNDETSSDNGRLTPPVTVTGGSFLQFVKTEQTEDHEDFLSGEEACGFFSDEQPPSLHWYSASDHWT

SEQ ID NO: 26960 - protein, 547 aa, Lactococcus lactis
MYTVGDYLLDRLHELGIEEIFGVPGDYNLQFLDQIISREDMKWIGNANELNASYMADGYARTKKAAAFLTTFGVGELSAINGLAGSYAENLPVVEIVGSPTSKVQNDGKFVHHTLADGDFKHFMKMHEPVTAARTLLTAENATYEIDRVLSQLLKERKPVYINLPVDVAAAKAEKPALSLEKESSTTNTTEQVILSKIEESLKNAQKPVVIAGHEVISFGLEKTVTQFVSETKLPITTLNFGKSAVDESLPSFLGIYNGKLSEISLKNFVESADFILMLGVKLTDSSTGAFTHHLDENKMISLNIDEGIIFNKVVEDFDFRAVVSSLSELKGIEYEGQYIDKQYEEFIPSSAPLSQDRLWQAVESLTQSNETIVAEQGTSFFGASTIFLKSNSRFIGQPLWGSIGYTFPAALGSQIADKESRHLLFIGDGSLQLTVQELGLSIREKLNPICFIINNDGYTVEREIHGPTQSYNDIPMWNYSKLPETFGATEDRVVSKIVRTENEFVSVMKEAQADVNRMYWIELVLEKEDAPKLLKKMGKLFAEQNK

SEQ ID NO: 26961 - protein, 377 aa, Nostoc sp. PCC 7120
MIEYLIFLAISTATFALFSLGLNLQWGFTGLINFGHIAFMTLGAYTTVLLSLKGVPLFISAIVGAIFAALLGLVIGFATLRLREDYLAIVTIGTGELIRLVVNNQDLPVGDTWVSGAFGVQSYPIPLSTEPNLFFRLLMIGILTLLFAVTVFSLWRWIRNAQKLQLTDATDKTSSKQEIASRFGVGIILGLLATAIYISGVITLYNYIPKAGLMLVSLLVLAFVFWRLEYLVRSPWGRVLKAIREDEEIGKAMGKNVFWYKLQSLMLGGAIAGIAGAFFAWQISAIYPDNFQPQLTFDSWIMVILGGAGNNIGSILGAVIYFAYDAITREVLPKIIPLDEARLGAFRIMCIGLILMVLMIWRPQGILGKKEELTLGK

SEQ ID NO: 26962 - protein, 406 aa, Arabidopsis thaliana
MDEEIEIPPFFLCPISLEIMKDPVIVSTGITYDRDSIEKWLFAGKKNSCPVTKQDITDADLTPNHTLRRLIQSWCTLNASYGVERIPTPRPPICKSEIEKLIRDSASSHENQVKCLKRLRQIVSENATNKRCLEAAGVPEFLANIVSNDSENGSLTDEALNLLYHLETSETVLKNLLNNKKDNNIVKSLTKIMQRGMYESRVYATLLLKNILEVADPMQSMTLKPEVFTEVVQILDDRISQKATKAAMHILVNICPWGRNRHKAVEAGVISVIIELLMDESFTSERRGPEMAMVVLDLLCQCAEGRAEFLNHGAAIAVVCKKILRVSQTASDRAVRVLLSVGRFCATPALLHEMLQLGVVAKLCLVLQVSCGGKTKEKAKELLKLHARVWKDSPCLPKNMILAYPC

SEQ ID NO: 26963 - protein, 565 aa, Streptomyces peucetius ATCC 27952
MAASPEKPASVTPRRKAGRHRGEGQWAMGHHTPLNGNEQTKKDDDGLNVRTRIETIYAHRGFDSIDGADLRGRMRWWGLYTQRKPGIDGGKTAILEPEELDDEYFMLRVRIDGGRLTTEQLRVIGEISQEFARGTADLTDRQNVQFHWIRIEDVPEIWRRLEGVGLSTTEACGDTPRTILGSPVAGIAADEIVDGTPAIDEIHRRYIGNKDFSNLPRKFKTAVSGSPLLDVAHEINDVAFVGVDHPEHGPGFDLWVGGGLSTNPKLGVRLGAWVPVDEVPDAWEGVISIFRDYGYRRLRNRARLKFLVADWGAEKFRRVLEDEYLKRPLLDGPAPQQPAQQWRDHVGVHRQNDGRFYVGFAPRVGRVDGATLTKIAELAESHGSGRVRTTVEQKMIVLDVAEDRVDSLVSGLEALDLRVTPSPFRRGTMACTGIEFCKLAIVETKGRGSALIDELERRLPRFDEPITININGCPNACARIQTADIGLKGQLMLDDEGNQVEGYQVHLGGALGLDPAFGRKVRGLKVTSAELPDYVERVLGRFQAEREDGERFATWAARASEEALS

SEQ ID NO: 26964 - protein, 351 aa, Streptomyces peucetius ATCC 27952
MFHPLRVGAVERLTDDSVAVTFEVPAELRETFRHIPGQHVALRRVVDGVETRRTYSICTPAAPVGGVPALCVGIRLVDGGEFSTYALKELAVGDTVEVMAPAGRFLFQPRPGHFAAVVGGSGITPVLSMAATLLEREPEARFCLIRSDRTAASTMFLDEVADLKDRYPDRFQLVTVLSREEQQAGLPSGRLDQERMTGLLPALLPVTEVDGWFLCGPFGLVQAAERALRGLGVDRGRIHQEIFHVDDGSAPLPASVAAPAHASLTATLDGRSGTWPVKEGESLLETVLHSRADAPYACKGGVCGTCRAFLVSGQVRMDRNFALEPEETEAGYVLACQSHPATAEVELDFDR

SEQ ID NO: 26965 - protein, 498 aa, Chlamydomonas reinhardtii
MADEMDPMTACITALTDAAMTTAQATALCGQFAFAADNSDLSDRLDQTNQGLNTLYLVSCGALVFVMHAGFAMLCAGAIRSKNTMNILLQTVMDAAVSAVAFYILGYGFAYGIGNNPNGFIGDSLFGLSRWVSHSSSSDAGANWQAWFFQWAFAATATTIPAGAVAERLNFNAYLIYSFFISAFVYPVVVHWVWAAEGWLGYARFGGYSHLFRSGMIDFAGSGVVHMTGGLAGLAGCIMVGPRMGRFDSNGQPVEMPGHSATLVVLGTVLLWFGWYGFNPGSQLIINYTASAAVVGRAAVTTTLSGAAGCLSCLLTAFLRHKAWDLVSGCNGALVGFVSITASANVVEPWAALIAGLVGGWVFDAVCLLFLKLRIDDPLSAAPMHAFCGAWGVFFAGLLAKKEYICESYGRDCEGYVADGLFYVGDGRLLAQVIGIISIFAWVFGLMLLLFGGLKAVGLLRISAEEEQAGLDVSKHGGSAYNYDHGLGKPEKAQALGL

SEQ ID NO: 26966 - protein, 525 aa, Pisum sativum
MEYGTRKLSDVYEVSEILGRGGFSVVRKGTRKSNNDDEKSQSQSKSQSQSQVAIKTLRRLGTSNNLPRKKDGGENSTETMMKFPTMRQVSVSDALLTNEILVMRRIVENVSPHPNVIDLYDVYEDTNGVHLVLELCSGGELFDRIVAQDKYSETEASTVVHQIVAGLEAIHRANIIHRDLKPENCLFLDVGKDSSLKIMDFGLSSVEEFTDPVVGLFGSIDYVSPEALSQGKITTKSDMWSLGVILYILLSGYPPFIAQNNRQKQQMILNGNFSFYEKTWKGISQSAKNLISSLLTVDPAKRPSAQELLSDPWVKGEKAKDDQMDPEIVSRLQRFNARRKLRAAAIASVWSSTIFLRTKKLKSLVGSYDLKEDEIENLRMHFKKICADRDNATLCEFEEVLKAMKMPSLIPFAARIFDLFDNNRDGTVDMREILCGFSSLKNSKGEDALRLCFQARDRSGCITKEEVASMLRALPYDCLPTDITEPGKLDEIFDLMDANSDGKVTFDEFKAAMQRDSSLQDVVLS

SEQ ID NO: 26967 - protein, 520 aa, Pisum sativum
MGYGTRKLSDVYEVSEILGRGGFSVVRKGTRKSNNDDEKSQSQSKSQSQSQVAIKTLRRLGTSNNLPRKKDGGENSTETMMKFPTMRQVSVSDALLTNEILVMRRIVENVSPHPNVIDLYDVYEDTNGVHLVLELCSGGELFDRIVAQDKYSETEASTVVHQIVAGLEAIHRANIIHRDLKPENCLFLDVGKDSSLKIMDFGLSSVEEFTDPVVGLFGSIDYVSPEALSQGKITTKSDMWSLGVILYILLSGYPPFIAQNNRQKQQMILNGNFSFYEKTWKGISQSAKNLISSLLTVDPAKRPSAQELLSDPWVKGEKAKDDQMDPEIVSRLQRFNARRKLRAAAIASVWSSTIFLRTKKLKSLVGSYDLKEDEIENLRMHFKKICADRDNATLCEFEEVLKAMKMPSLIPFAARIFDLFDNNRDGTVDMREILCGFSSLKNSKGEDALRLCFQARDRSGCITKEEVASMLRALPYDCLPTDITEPGKLDEIFDLMDANSDGKVTFDEFKAAMQRDSSLQ

SEQ ID NO: 26968 - protein, 688 aa, Ashbya gossypii ATCC 10895
MALKFDKLDFAVICALALAVVAYLKLDVLKELFAADDSALAVQSSSRDIVEVLRENKKDYLVVYASQTGTGEDYAKKFAKELAAKYSLNVMCVDVENYDFDNLNSLPKDVIVSFFVSTYGEGDLPDGGLEFEEWLQVLEEGDLGNVRYTMFGLGNSTYEFYNGAAEKTQKLLKQAGARMLGTFGKADDGAGTTDEDYMAWKDDILEELKDALALHEKEVSFISSYEYKVLPQDLMGSISLGEPNSQYLPGKTLAKKENMQLGPFDATHPYVAPITSTKELFKKKDRNCIHVEFDLSGSNLKYSTGDHLGVWPSNPDEKVEKFLTTFGLDPTTIFDLKPKDITIKPPFPVPTTIGAAVRYYLEISGPVSRQVIGSLLQYVTEEQLKERLQALSKNKEKYAKEITSKCMDLADALLYLSSGKKWTQVPWEFLIETVPHMQPRYYSISSSSSSDKQTVHITAVVENYPNPEVSSLGPVTGVTTNLLRHIHLTRTKEDIAASSLPVHYNLAGPRDLYQNYKLPVHVRRSTFRLPSNPSTPVIMVGPGTGVAPFRGFIRERISFLKNQENVKLGKHLLFYGCRDDADFLYHDEWPVYAKELGSSFELMVAYSRIPNKKKVYVQDHLLERENEVLELINKGAFIYVCGDAKGMSQDVHRTLIDILRRGKNISEEESSEILKQFKTTGKYQEDVW

SEQ ID NO: 26969 - protein, 563 aa, Ashbya gossypii ATCC 10895
MSEITLGRYLFERLKQVEVRTIFGVPGDFNLSLLDKVYEVDGMRWAGNANELNASYAADGYARVKKISCLVTTFGVGELSALNGIAGSYAEHVGVLHVVGVPSTSAQAKQLLLHHTLGNGDFTVFHRMSANISDTTAVITDISSAPAEIDRCIRACYVHQRPVYLGLPANMVDLTVPASLLNTEIDLSLKPNDPEAEEEVVSTVLELVANAKHPVILSDACASRHDVKQETKQLIDVTQFPAFVTPMGKGSIDEQHPRFGGVYVGTLSAPDVKEAVESADLILSVGALLSDFNTGSFSYSYKTKNIVEFHSDHTKIRSATFPGIKMKTVLQNLVKRIGEAAKGYQPSPVPTYAAPNEDADPKTPLKQEWLWNQVSSFLKEGDIVITETGTAAFGINQTRFPSSTIGISQVLWGSIGFTTGACLGAAFAAEEIDPNKRVILFIGDGSLQLTVQEISTMVRWGLKPYLFVLNNDGYTIERLIHGETAQYNCIQPWKHLDLLPTFGAKDYETHRVATTGEWRALTEKQEFNKNSSIRMIEIMLDVMDAPSSLIKQAKLTAATNAQP

SEQ ID NO: 26970 - protein, 490 aa, Ashbya gossypii ATCC 10895
MLRQVLRRSLSDSRRPLRSVGSISCSARASGIGMRAYSSQIFKEGMQLETHTDIQSAAREQAQERMGSEALASNNSVLKHAYQESVDHGTRPIYLDMQATTPTDPRVVDTMLKFYTGLYGNPHSNTHSYGWETSQEVEKARKNVADVIKADPKEIIFTSGATESNNMALKGVARFYKKRKNHIITTRTEHKCVLEAARSMKDEGFDVTFLNVNEDGLVSLEELEQAIRPETSLVSVMSVNNEIGVVQPIKEIGAICRRHKVFFHSDAAQAYGKIPIDVDEMNIDLLSISSHKIYGPKGIGALYVRRRPRVRMEPLLSGGGQERGFRSGTLPPPLVVGLGHAAKLMVEEYEYDSAHVRRLSDRLLKGLLSIEQTTLNGSADHRYPGCVNVSFAFVEGESLLMALRDIALSSGSACTSASLEPSYVLHAIGRDDALAHSSIRFGIGRFTTEAEVDYVIKAITERVEFLRELSPLWEMYKDGIDLNTIEWSGH

SEQ ID NO: 26971 - protein, 385 aa, Ashbya gossypii ATCC 10895
MKLISQSKGTSSSEVCLVVVAQDKEDLFTLYNIINTDDELIFKKKLTLKLDEAGKKKSTELVRLRVKVVSSEFEPQHEFLKYKGITTEDDAGKANVDVALGKFFSFTVDYQYPFTIIKKDFNSYCQKLINEACNLESRSDMAAVVLQEGLAHICLLSSFSTILKQKVEYSLPKKKRSVDVLKFDEKTEKFYKAIYNAMLKHFDLSQLKAVILCSPGFYAKTLYEKILQYAQTNQEKTVIDNKDKFLVAHCSTGYLQGISEVLRDPAYSQKLQNTKNSGQLQVMDAFLKHLNDDDNKSWYGEAEITKACEFGAIETLLITDDWLRADSVSVRNKSLKLIKDVENMGGKVCVFSSMHSSGEELNSLTGLACILKYPIPDLDEHEDED

SEQ ID NO: 26972 - protein, 453 aa, Ashbya gossypii ATCC 10895
MAVFTSSTGKLGKGVGEHDEDASKPQDRPPSQANMLTKFFHKVTGQPASYVNKADYIFGKTLGAGAFGVVRQARNSKQNQNVAIKILLKRALKGNELQMLYDELSILQKLDHPNIVKFKDWFESREKFYIVTQLATGGELFDRILKKGKFTETDAVKIVVQMLTAVEYMHSQNVVHRDLKPENVLYLDPSDESQLVISDFGIAKQLSSESQLIHRAAGSMGYVAPEVLTTSGHGKPCDIWSLGVITYTLLCGYSPFIAESTEGFLEEVFSGSDPVTFHSPYWNNISKEAKQFILRALTLTPARRPTAAELLTDRWIVSKQSNTADLLPTIREGFNASKKFRDAMQVVILNNRIKKLKQMYGHDESDTDLEENSASTDRRKVGLEVLQNALRSLSLKGSQESPEQKQLKSQVTQQAFVQLVLAAKENKERIREYQSQQSLDSVAAHQNTTDAPQ

SEQ ID NO: 26973 - protein, 462 aa, Ashbya gossypii ATCC 10895
MVRVLEEKYDGATVAFTFMGSALVFVMVPGLGFLYSGLARRKSALALIWVVFSALIVGIVQWYMWGFSLAFSKTAVDNKFIGNLNSFGLRDVYGKASPDADYPELVFAVFQGLFMCVTLAIIAGATAERGRLLPHMVFLFLFATVVYCPVAYWVWSPGGWAAQWGVLDWAGGGPVEILSGVGGFVYSYFLGARRESLLINFRPHNVSMVTLGTSLLWFGWLGFNGCTSLSPNLRSVYAFLNSMMSAAVGGMAWCVLDFRLERKWSTVGLCSGVISGLVAATPSSGCIPLYASLIQGVVAGVVCNFATKLKYYAKTDDSMDILAEHGIAGIIGLLFNAVFAADWVVGLDGSTEHDGGWLTQNWPQMYKQIAYIVAVSGYSILVTSIICYVLNCIPGMQLRASEAAEERGMDEDQIGEFAYDYVEVRRDYFSWGVQNDQSANPSVASSVAEKNAPGVPDDSEGK

SEQ ID NO: 26974 - protein, 356 aa, Ashbya gossypii ATCC 10895
MLTNVLPTGTGLVGNAFLEQLLSIKQSICYNIIYVARSRAALISKDYSPLNLGSSWKSALENADEKPLELNALVGYLQKSPQKVILVDNTSSSDIADFYPNFVGAGISIATPNKKAFSSDLKLWNGLFSDEEGHGLVYHEATVGAGLPIIGTLRDMIKTNDKVEKIEGIFSGTLSYIFNEFSTIAPNSVKFSEVVKVAKSLGYTEPDPRDDLNGMDVARKVTILARIAGFEVQSPSSFPVQSLIPDELTSVNSVDEFMSRLPDYDEQLTLLKDAAARENKVLRFVGKVDFPNNVVSVGIEKYDFSHPFASLKGSDNVISIKTSRYSQPLIVQGAGAGASVTAAGVLGDVIKIAERL

SEQ ID NO: 26975 - protein, 1425 aa, Ashbya gossypii ATCC 10895
MTAGHRDERPDREGGSERDEHLNRVVQSVSDATKRLSQISNSSTAHTKTGKRKNRDTVGPWKLGKTLGKGSSGRVRLAKNMQSGKLAAIKIVPKRNVRHNQKQVTALPYGIEREIIIMKLITHPNIMALYEVWENKSELYLVLEYVEGGELFDYLIARGKLPEQEAIHYFKQIVQGVSYCHNFNICHRDLKPENLLLDKKNKTVKIADFGMAALETTNRLLETSCGSPHYASPEIVMGQKYHGSPSDVWSCGIILFALLTGHLPFNDDNVRKLLLKVQHGRYQMPSNVSKEAKDLISKILVVDPEKRITVDKILEHPLLVKYDNPGKGGLACPLEKPEERPKVLDIHSIDDIDETILSNLQILWHGAPKEYLVDKLLQSGFTEEKLFYALLLRYQQRQSVEPTSVPSNMASTNGSGAFARASNNDQSVINAPKVTQKSQFSINSLLVSPKKTREGYVASSSRVFKHSVSRRSLHVSPSPMKSSTSCRSLKSSSSKRLQSPNPKAITQPVKVTSPQPRRRTLHNSASKRSLYSLTSISKRSLNLNEFLQEANEVKTPKLPSMPLQDQPRSEAPKTPTKTTYGADSHGGEKPTFISVLHDCPTVDSEGMVFKSSSGTPMIAANAPIIQPAFIFGVGAFPGTKQPSSNSLSKPSLNSQSSPKQAQEATANSMRETIRDRQTLVVEKRVPSKTESVPPAFPRVRPIMERKHGSDLTLVRDTRSVAKEKRSSLSLDPRRTAPEPPRGIETLLRRYSLKNSIKSRSSLKKKRDSGAWSITDKTIFQDLGQVPEDEEQEKDSEEKGNDTFISTTETSDTPSSKFKVTTSTPIKKDDATAISAENAAVGTEQSGSEDEATNFDSNAHSYPISTDLKTEDDLTPIKPQGQTDLLRMPSSFMNSSNTFANLNNFISNIDKEYSPENSDSGRIEKDEPAGKAQPEQITVKKRQRTLAPGGYLSPSIPRMESENSLNQELGSRISDLSDLSFANDMPTYTNTAHAVSISPGTRNVCSFSPLEPRSPQDVSNNGKMRSNLHIPLRQLSEDMCDKTITTQEGESVNIFEDAPEEEGSLTTSTSGSVPNIHQKAISIDTMNTSCALVPVSHVRTSIHMNGDSSVLDWSTSDGILSKARPLPTSNHVRKKSGNRLSNNLTLSKSMMSMFKNLDQINVTDIQDPMPVSDLLSKGVDPIEPIEPLKNDQVTLKAESIGAESDSINMDLADRKHVTIFHDNVSDKNFKSTRMENSDKGSLGSGAPQATHLFHTGNKDMKSHETLLSPITETPAAALSATSLTRKESISSDGKSVKDETKKSGKGNWFMRLIMSFTKPKKTVIQEHMTVLPFDDVNIITLQQFSYQGVEYEIRQMERRKDKQKVEYDCRLLDGDFKFKINIYGENSAATKVSVKQKGRSDELAFTKLNTDIEALIKAKENAANVK

SEQ ID NO: 26976 - protein, 237 aa, Ashbya gossypii ATCC 10895
MAKSRFEYVREYEVHDTLLPETYIVVRIDGKHFHEFSQHYSFEKPNDERALKLMNASAKNVVMAYSGDIILAFGESDEYSFILRKDSTLFRRRRDKLSTLFVSLFTAQYVALWPKFFPEQPLSHKRLPFFDSRCVCYPNTTVVKDYLCWRYVDTHINNLYNTVFWNLVLKCNLTPREAEQRLSGTLSSDKQEILFSECGVNYNNESEMFKKGSLINRKGEIMHIDVVKQIDELFAGF

SEQ ID NO: 26977 - protein, 796 aa, Ashbya gossypii ATCC 10895
MADLSGTAVKREPEKGPASALDTTGDLPHIYDTVSVETPGPFETSEKKVDKEGADTEGDSGEFTDVLVEDDSPYPEVRAAVPSFDDTTMLQNTVRMWTIGLLMTTIGSAVNMLFSMHAPSMAVSTFVTSMLAWPLGRFWARWVPNVRIFGRFGGPFLNPGPFSLKEHALITVMGNISFGGGAAYATDILLSMNMFYKRDYGWLFDLLAIWSTQCIGFSLAGLCYKILITPPLMIWPSTLVQCTFLSNIHIHNNKVANGWKVSRLKFFMIIFIAGFIYYWLPGYLFQALSSFAWVTWIAPKNVVVNQIFGSSTGLGLLPITFDWNQIAGYVGSPLVPPISAIFTILCSMVTIFWIVVPIVHYSNTWYGNYVPISDSTSMDRFQQRYNVTKVVNQRLSLDLEAYHSYSRLYLPTTFAISYGMSFASVMATISHTACFHWRTIYNGVRNINTQDRDVHARLMERYKAPPYWWYLVTFFVFLALSIATVRAWDTQLPVWALFLALAIAGFFLLPVGIIYALTNMAVGLNVITEFIIGYMLPGRPIAMMFFKTFGYITNSQAITFAQDMKLGHYLKVAPKLMFTAQFIATIWGSTVQIAVLRWSEANIKGLCTKAQPGHFTCPGATVFFTASIIWGVIGPQRMFSAGQMYSSLNYFFVLGFFLPIVNWLILSKWSKRFEKSGRGLKFVAKYLSWPVFFSGTGLIPPATPYNYGSYCIVGIFFGYFIKRYYFQWWCKYNYSLSAALDIGLAWGALIIFFSTGIAVRKAPVWWGNTVIDTLDTNGQAIKYILQEGEYFDRASP

SEQ ID NO: 26978 - protein, 890 aa, Ashbya gossypii ATCC 10895
MSKISEGVGDPPSYGSRSPSLSSHDKEKEKYNAGAEEQVTAEVLTDEQLVYLISRMGYDHPRDLSDVPASVRYLESKLAELDIEKCLRIIDLSFEIHNEDFNLKTDDWNDLVRFSKRDFDPEDPQHVFELKTVAGIFEYYSPYVEVRAVASPVDDPTIPVETFRAYFLATFWVVVGSALTMFFSERQPSIALSISAVQMLVYPCGLLWARLMPCWGFNVYGRRIALNIDSPWTEKEQMFVTLLYGITTGSFYANYNILTQHIHYRSPMPYAYQLLLSIPLQFLGFGLAGIMRKYVVYPATAMWPSIMTTIALNKAMMSDEHSGGFGRKKMFYLTFAIIFVYNWFPTYLFEALSTFNWITWIKPDNFNLATVTGGINGVGLNPLSTLDWTNIGVGGFYLPFRVTLTMYMGGLLAALITLGVYYMNYSECQFLPIFTQSLYNNKAKVYQVEEILTEDRLLDEQKFQKYGFPYYTAGNMVAYGCFMCVYTALVVSSILQQGAFYMRVYKAWILDLWSLRTRSGLREAFSNEKHVLDEFHDPHCRMMRKYKEVPEWWYMSIFVVSIVIGVIVVTTFKTNTPVWGLFLAVGLNFILLLPITLLQATRGVTIGLNLLLQMISGLALPGNPYALMFIKAFGYNIDGQTDNYLSNMKMAHYAKIPPIPLFRGQLLMVLIQVFVNLGVINWQLHNVENYCDPKQRFKFTCPGVRTYFNASVMWGAIGPRRIFEHVYPIMKWCWLIGACVGLFFGIWKRLSIMYDKIPYPRRFSPVIFIIGMLSFGPPYNLQYSTSGLYVGFISMFYLKRYHLRIWERYNYVIAAAITCGVVFSAILMFFSVQWKDIELNWWGNSISYAGLDYARVPLLNVTETREDTLDQSLATFRNSLSANFYKLSII

SEQ ID NO: 26979 - protein, 586 aa, Ashbya gossypii ATCC 10895
MVSGLSKKKTTAKQLSKLTINTMSEITLGRYLFERLRQIEVQTIFGLPGDFNLSLLDKIYEVEGMRWAGNANELNAAYAADGYARLKGMSCLITTFGVGELSALNGIAGSYAEHVGVLHVVGVPSISAQAKQLLLHHTLGNGDFTVFHRMSANISGTTAMISDITSAPAEIDRCIRTCYITQRPVYLGLPANMVDLKVPASLLETPIDLNLKPNDPEAEAEVVETVLEMIAAAKNPVILSDACASRHDVKAETMKLIDVTQFPAFVTPMGKGSIYEQHPRFGGVYVGTLSSPEVKEAVESADLVLSVGALLSDFNTGSFSYSYKTKNVVEFHSDHIKIRNATFPGVQMKYVLRKLVDNVAEVIKSYVPVPVPSKPANNEEIDSATPLKQEWLWNQVGKFLREGDVVITETGTSAFGINQTHFPNNTYGISQVLWGSIGFTTGACLGAAFAAEELDPNRRVILFIGDGSLQLTVQEISTMVRWGLKPYLFVLNNDGYTIERLIHGETAQYNDIQPWQHLNLLPTFGAKDYEAVRVSTTGEWDALTQDKAFNENSKIRMIEVMLPVMDAPSNLVKQAELTAATNAKQE

SEQ ID NO: 26980 - protein, 541 aa, Ashbya gossypii ATCC 10895
MAIPTPFSPWGKAARTLSRCLSKRNFSKLVIARRLNSTHHRGKPMRLERELRYAIIGGTLLLTYSYMSSCLSSDTIKGIKQYGAPARSLSTSSDGKANGNPDTISLLTDYEVNTKLRSLEESYYVNRGKGVLRYDVSQLPSNNPIEDSRVEQIITVPNEQTQAQEELYFFGIFDGHGGPYTSSKLSEALVPYVAHQLSKIYAQGNEALTSEAIDDAIEQGFLQLDNDIVQKTLGQFFENPSKESLIEALPAVSGACSLLAMYDSNNCTLKVALTGDSRALLGRVDENGKWTVQSLTIDQTGDNADEVARIRAEHPGEPNCVRNGRVLGSLQPSRAFGDYRYKVKEINGKNVYDLPSHLKIFFRKEPREFLTPPYVTAQPEITTAQIDSSARFMVIASDGLFELLTNEEIAGLVVKWMEKHPVKKGFETLKSSARDKIPPVHDTTVHAESQRPAFRYKDANKGSAGFLMEDNNVATHLIRNALSGGGDKRYVSTLISIPSPKSRSYRDDLTVTVVFFGEEQNQPDNQLILNHEATRPLEPKL

SEQ ID NO: 26981 - protein, 470 aa, Ashbya gossypii ATCC 10895
MTSPQQINNLQAAFQDALNMSGSPGVVSTSPTTSFMNTLPPRTSVAKQAKALKPFSTGDIKILLLENVNQTAIDIFDKQGYQVEFHKSSLGPEELIEKIRDVHAIGIRSKTKLTPEILKHAKNLVCIGCFCIGTNQVDLDYAAKMGVSVFNSPFSNSRSVAELVIGEIISLARQLGDRSIEMHTGTWNKVSHHCWEVRGKTLGIIGYGHIGSQLSVLAEAFGMHVLYYDVVTIMALGTAKQVATLDELLNNSDFVSLHVPATDETKNMISAPQLAAMRNGAYLINASRGTVVDIPSLIQAMKAGKIAGAALDVFPHEPAKNGSGAFGNQLSPWISDLVSLPNIILTPHIGGSTEEAQSAIGVEVATSLSKYINDGTSVGSVNFPEVSLRSLDLDQENTVRVLYIHQNVPGVLKTVNNILSDHNIEKQFSDSSGDIAYLMADISNVNYSDIKDIYDKLNATEYKISIRLLY

SEQ ID NO: 26982 - protein, 754 aa, Ashbya gossypii ATCC 10895
MWRAIRPFGGLGPVAVLQRLPGPRHNVAVRLQVMSRARCGWQCVRATSRLTVPVCRQSRAYSAARVGGEGTPSPRDKEHEQERKVEKRPAEPSRAQPAKPAGWHEVFRLLRLVKPDWKLLLAALGLLTISCSIGMAVPKVIGLVLDATKDAVAQAEKNETGAPMSLLDMPSIIGNFTLVDVLAAFAGALLVGSAANFGRMFLLKMLGERLVARLRAQVIKKTLHHDAEFFDRNKVGDLISRLGSDAYIVSRSMTHNISDGVKAALCGGVGVGMMFHISSTLTSAMIMFAPPLLIAATIYGKRIRAISRELQQSTGNLTRVSEEQFNGIKTIKSFVAEGKEMRRYNTAVRRLFNVAKREGITSATFFSGTNVLGDVSFLLVLAYGSHLVLQGELSLGSLTAFMLYTEYTGSSVFGLSNFYSELMKGAGAASRLFELTDYKKSVPSTVGQTFVPRDGRIEFKDVSFSYPTRPTSQIFKKLRLTITPGSNVCIVGPSGRGKSTIASLLLRFYDANSGTILIDGQDISKVSAKSLRKHLGVVQQEPVLMSGTIRDNITYGLSYTPSMDEIRAVAKKCFCHNFITKFPDGYDTVIGPRGALLSGGQRQRIAIARALIKKPKILILDEATSALDVESEGAINYTLGRLMRSKEITIVSIAHRLSTIRRSENIVVLGNDGSVIEAGKFADLYRDEDSELFKLLNEHASEPAKPEASPAPAQEEASAPQAADIPRDIEGGNLRLNEEVIKHVLEDTARAPMP

SEQ ID NO: 26983 - protein, 678 aa, Ashbya gossypii ATCC 10895
MRRARANEGERRGPAAAEQFERPRTHARSGSSNRKHMICVQDRCVRVGSSAQVRLARGRCLCHLNSCAARTGAAAPRDRGAVLFRKVRGQLRAQPSSSPSHGAGAPCRAAVYRRVRAGLTGLRPPAVVMSRRASTLGGSVPTSRGTEAAMVDIVSWHLVADPASSLQLQGGDITRELYRWTAERPGRRRSHSYGGSRAPSVHSMGARDMRAPNGFRRSYMMERGGVLTGSFMEFLSLYGHFAGEDLSEDEDDALADAAVLFEEEETLLQGRRRSYGTDSGEAGGASVFRTVLLLLKSSVGTGVLFLPKGFHNGGWLFSTGALVFCGAASCVCFMLLIAAKEQEGVGGYGDLGRRVCGVAMQRTVLASIVLSQLGFAAVYAVFTATNLQVVCSTLFGWHASTGVYVAAQAAVYLPLALTRRITKLSATALLADLFILLGLVYVYYFSASQVVQHGAATDSMLAFNPSSWTVFLGTAIFTYEGVGLLIPIQESMRSPEKFRRCLLWVMVAVTAVFISFGMLCYAAFGAKVETVILLNFPQDSALGTGVQLLYAAAIMLSTPLQLFPAIRILENVVVTTSRSGKYSTKVKWIKNWFRALVVVLMLVLASLGSNDLDKFVSLIGSFACIPLIYVYPPLLHYVVFRGTGTVSQVALALDLAVMAFGLGIMGYTTVQTVVQWYG

SEQ ID NO: 26984 - protein, 931 aa, Ashbya gossypii ATCC 10895
MTSIPHRHTYYGGGATPPAATGPLSGSRGHAAGRSKKKQVTFGPYIIGPTLGEGEFGKVKLGWSKARLDGDSRNVAIKLIRRDTVPKNSEKEIKIYRELNALKLLSHPNIVRLEEVLQNSKYIGIVLQYASGGEFYKYIQKKRRLKEPPACRLFAQLISGVHYIHYKGLAHRDLKLENLLLDEHENLIITDFGFVNEFHKNDLMRTSCGSPCYAAPELVVSSKPYSAQKADVWSCGVILYAMLAGYLPWDDDPENPEGEDIAKLYQYITHTSLKFPEYIKPIPRDLLKRILVSNPEVRLTVADIEQHAWLQPHAQFLMWSPSDWDAKAKAETNNLFRQPSAVHAGVLRPQSSCSISSANSKGDNRGSLIMDSTLNPQPVPPQEFQSHIIMKPTSPSNGLRKMSPVRRHARSNSAASIALQAVVDAERDYFNSPSIHSLHHDSLSQNTTPPSSAGRVPTYAITRSATHHNGISSSLMNRNSVIIEVSPQKGSVPPVMIPGNRESLNGQESGGIAMADMSQRPTIVKDKTSSHMVPQAGRKQRPTSYQPCSTTAFAQSPDLVSGAGALVPIMGKQQRVSTASNPTFVDVGRSGSTRRLPGPNNQLLETPFEADRQIDDNPVVDDATIKSDDMLPSTLEIVAYDNECGTSPGSNGQHRRYSAIVMSEIYEQEEGERISCELSSPNKMGSARPDCSTARISINTPNMGLQNRECIVSSSSPESDASSKQKSGKTDKKDKRFSLLSFYSFYNNSKSSIDSSTDAVQPTGLVLDVVKHPNISRTSSQKKNPAPAGNGTQAIPRRHNTLPREAQRTPVALSYVYASLDVTPNAGTPELADVPSPINLVKMAEQPHGTKQHDPSTPTRSATVHGKSQRLSNNTPKGPIYEDPKPKRKTNKVSLMVSSINPSQAPQPPRQKEPSTARKVLDFFKRRSLRI

SEQ ID NO: 26985 - protein, 369 aa, Ashbya gossypii ATCC 10895
MSELVEKTSTLLKYLDLDQRGAVIAEYIWVDSAGHLRSKGRTLQRRVESVDELPEWNFDGSSTGQAPGHDSDVYLKPVAFYPDPFRRGDNIIVLAECWNNDGTPNKYNHRHEAAKLFEAHRAADIWFGLEQEYTLFDHNDNVYGWPKGGFPAPQGPYYCGVGAGKVYARDVVEAHYRACLYAGLRISGINAEVMPSQWEFQVGPCTGITMGDELWVGRYLLHRVAEEFGVKVSFHPKPLKGDWNGAGCHTNVSTREMRQPGGMRYIEEAIDKLSKRHKEHIKLYGSDNELRLTGRHETASMATFSSGVANRGASIRIPRSVSKEGFGYFEDRRPASNIDPYLVTGIICETICGAIENADMSKEFERESS

SEQ ID NO: 26986 - protein, 629 aa, Ashbya gossypii ATCC 10895
MKPIGLTGMGLQSAGDSGEELKSGWMPAEMPLGEYMFRRLMSAGTKTVFGVPGDFNMGLLEHMYGEAVCAEGLQWIGTCNELNAAYAADGYSRYCNKIGCVVTTLGVGELSALNGVAGAFAEHVKVLHIVGVSMRAAQTHPELHGNVHHLVPRLRNSNFKAPNHKVYSEMVSGRVSCCCEFLEDLETACDQIDHVIREIWRHGKPGYLFVPADMPNMKVSSRNLVQAPTIMLESAVLERTNLAACDRIGIEILQHLYQSSTPAILCDGLCDRFGLTGDVRRLVELTGMWNFSTIMGKSILDETQPHYKGVYYGAGSKERNALLQECDLILYLGPVKDEVNTWKYTFQFNPQSMIIELHPEYVSLTRNGEQTILNSGHLLPVLRSILAHLNVANLSFNYPTAKKRVPREHQYAADEPITQGMLQHMIPECLNPGDVMVVDTGTFQFSVFDMKFPTDLKCISQSFYLSIGMALPAALGVACAMREFPRLHLGPKLANEGYTPRLVLCEGDGAAQMTIQELSTFIRYELPVEVLLWNNDGYTVERVIKGPTRSYNDIMSWDWTKLLRVFGDFDGTRSESVRVKDFNSLIEHLSSWKSDKKRSKIRLMEVILDKMDISATLKELAKQFQHNAA

SEQ ID NO: 26987 - protein, 885 aa, Ashbya gossypii ATCC 10895
MEKLSGEFKGSPPYFNEDKDSSSLSPSLPSQDDKKYKYNVSADAQETKEVLTEDQLIYITTRMGYEHATDLEHIPESVRYLESKLADLDVEKCCEIIDVHIKEHDQDPNLSTEDWNDLVRFSKRDFDPKNPQQVFELKVVAAIFHYYSPYVEVRAVASPVDDPTIPVETFRAYFLATLWVVIGSGFNMFFAQRQPAISLGVFAVQMLVYPCAVLWVRVMPCWGFKVFGRRIALNIESQWSEKEQMFVTLLYSITNGAFYSEYNIVTQQIHYKSPMSYAYQFLLSFSLQFLGFGLAGIMRRYVVYPSIALWPSSMTTIALNKALLSSDHSNGIGRKKMFYITATAIFVYNWFPTYLFEALSTFNWMTWIKPDNFSLATVTGGINGVGLNPISTFDWTNIGTSSLYLPFRVTLTTYLGGLLAALVTLGVYYMNYRECQFLPIFTQSLYNNRATSYRVEEILTEDRKLDEQKFQKYGFPYYTAGNIVAYGCFMCVYTALVVTSILQQGAFYGRVYKTWILDLWSLRKPSSWRAVFSNDKHVLDDFHDSHSRMMRKYKEVPEWWYMTIFIVSIVIGIIVVKVFKTNTPVWGLFLAVALNFVLLLPITLLQATRGVTIGLNLLLQMISGLALPGNPYALMFIKAFGYNIDGQADNYLGNMKLAHYAKIPPVPLFRGQLLMVLIQIFVNLGVINWQLHNIENYCDPKQRFKFTCPGIRTYFNASVMWGAIGPKRIFEHVYPIMKWCWLIGACVGLFFGLWKKLSIMYKKIPYPDRFSPVIFIIGMLSFGPPYNLQYTTSGLYVGFISMCYMKRYHLRVWERYNYVVAAGISCGLVFSAIVMFFTVQWKGVEISWWGNTVSYAGLDYARVPLLNVTETERGYFGPELGQIPG

SEQ ID NO: 26988 - protein, 494 aa, Ashbya gossypii ATCC 10895
MTEEVRKQAQQLTLDTQRSEEHSGNVVVVSNRLPVTIKKNDSGEYEYSMSSGGLVTALQGLKKSTKFQWYGWPGLEIPEGDREQVQRDLLEKFNAIPIFLSDELADLHYNGFSNSILWPLFHYHPGEINFDENAWLAYNEANRAFAEAIQKNLRDDDIVWVHDYHLMLLPELLRNYIATANLQNVKLGWFLHTPFPSSEIYRILPVRQEILRGVLSCDLLGFHTYDYARHFLSSVHRILNVNTLPNGVKFQGRFVNVAAFPIGIDVNNFTEGLQKESVVQRVKQLKETFKDCKIIVGVDRLDYVKGVPHKLHAIEVFLNEHPEWIGKVVLVQVAVPSRGHVEEYQYLRNVVNELVGRINGQFGTVEFVPIHFMHKSVPFEELISLYSISDVCLVSSTRDGMNLVSYEYIACQAENKGSLILSEFTGAAQSLNGAFIVNPWNTDELAEAIHESLTLPIEKREANWEKLYKYISKYTSSYWGETFVHELYKLSSQK

SEQ ID NO: 26989 - protein, 501 aa, Ashbya gossypii ATCC 10895
MSITSEELNYLIWRYLQEAGHEVSALAMQEETRVLEFDEKYKEHIPLGTLVKLVQKGILYTESEFLVQYNAQSEGADAEHYGKDFNLVQALEVDKQRFPELVAQGRFALAHEREEPEAEPEVTRLESDDSFIKTLQCVQTFPPGYVSQWNPKHEGVFAYGERDSRAAVVTYSVADGLWNISETVVLADANTGQQNEVTCLEWAPAGQSLLTGVESGELRLWSVEGKLQNILSYHRAPIVCIKWNSDETHVLTCDADNMTIVWNVLSGTAVQHFSFKEAGTEESLGVDATWIDQDKFAIPGIQGSILVFNIGISKPIGKLRGHSKTLTTIAYNEHNKLLLSASDDNTLRVWRGGNLNPSHVFYGHSQSITSAHWVDDDTIISTSMDGSIRVWSLASNSTVASATVDGVPNFTGALSPDQGKFATGTLDGEVMVYDIQKLLQQLNHNGYHGTARSAEVARIPVVGDHRSAREGNYVTQISWSQESTQLSVSYSLGDINILSVD

SEQ ID NO: 26990 - protein, 623 aa, Ashbya gossypii ATCC 10895
MSELVNKMENLSVGDSAQKKSAYVPPHVKRRMKEGGSEPSSRNTENFGNGGRFGGSEHNGFGGGRGSWFGGNARGGGPRSSDRGGSSRFGKWVDGKHVPMKRNEKLEVQLFGTPEDPNFQSSGINFDNYDDIPVDASGEDVPDPITEFTSPPLDELLLENIKLARFTKPTPVQKYSVPIVAKGRDLMACAQTGSGKTGGFLFPVLSQSFSNGPASTPDESGYYMRKAYPTAVVLAPTRELATQIFDEAKKFTYRSWVKPCVVYGGADIRQQIRELERGCDLIVATPGRLNDLLERGKISLCSVKYLVLDEADRMLDMGFEPQIRHIVEGCDMPTVENRQTLMFSATFPTDIQHLAADFLKDYIFLSVGRVGSTSENITQKVLHVEDIDKRSVLLDLLAASDGGLTLVFVETKRMADALTDFLIMQNLSATAIHGDRTQAERERALAFFRTGRANVLVATAVAARGLDIPNVTHVINYDLPSDIDDYVHRIGRTGRAGNTGLATAFFNRGNKNVVKELVDILEEANQEVPSFLSQIAKEMSYGGGGGKSSRGGRGGYSRGNSTRDFRRHGGGGGSEWSSANRASSGWGNATRTGSGWGDSSGFGGSTESWSNASKTVGSNNSWW

SEQ ID NO: 26991 - protein, 552 aa, Ashbya gossypii ATCC 10895
MNKQNRRGLQLQLFPYSRSIAQRDTMRSIADQKTNWVVQKFGGTSIGKFPTNIVNDIVKVFSHDYGKNVAVVCSARSSYTKSEGTTSRLLMACDAAASYDETFQDIVRVIREDHVENASHHIKDAEIRVRLVEQTNDELDQVERYLQASQILGEVSNRTMDLVMSVGEKLSCLFLTALCEDCGVTAEYVDFSSIVPTDFRCAEGSLDNSFYALLVVAFKERLAQIVQANKEGKRIVPVITGFFGLLPMGLLNGVGRGYTDLCAALVAVALNADELQVWKEVDGIFTADPRKVPQARLLETVTPEEAAELTYYGSEVIHPFTMEQVIRAKIPIRIKNVQNPTGDGTVIYADNIAKKGESTPPHPPISVSSSFFEQRKRGATAITTKNDIVVLNIHSNKKTLSHGFLAQIFTILDNYKLIVDLISTSEVHVSMALPVPDSDSQRSLRNAVEELKKLGTVDLIKKMAIVSLVGKQMKHFIGIAGAMFTTLSEQNINIEMISQGANEINISCVIDEKNSVRALQSIHAKLLEPLAPTSSGAVLNGRLEQLKSLDLS

SEQ ID NO: 26992 - protein, 138 aa, Ashbya gossypii ATCC 10895
MFATYSASILRSTLPLRSVGVRLLSQETRRAIEGAISSAPVVLFMKGTPEFPQCGFSKAAIEILGRQGVDPAKFAAFNVLEDSELRSGIKEYSEWPTIPQLYVNKEFVGGCDILTNMAQSGELTTMLEEASVLVPDTE

SEQ ID NO: 26993 - protein, 397 aa, Ashbya gossypii ATCC 10895
MSENVYIVAAARTPIGSFQGSLASQTYVDLGAHAVKAALSQVPQIDASQVDEIIFGNVLSANVGQAPARQVALAAGLPKSIVATTVNKVCASGMKALILAAQAIKCGTADIVVAGGAESMTNTPYYMPAARGGARFGEAKLIDGIQRDGLNDAYDHQAMGVHAEKCASDHSITREEQDNFAIESYQKAQKAHAEGKFAAEIAPVTIKGVRGKPDVTVSQDEETTKFNAEKLKAARPVFKKENGTVTAPNASPINDGGAAIILVSERKLKELNLRPSALIKGWGEAAHEPADFTWAPSLAIPKALKHAGIQDINEVDFVELNEAFSVVGLANTKLLGLDPSKVNVYGGAVALGHPLGCSGARIIVTLLSILQQEGGKVGVAGICNGGGGASSVVLAKL

SEQ ID NO: 26994 - protein, 873 aa, Ashbya gossypii ATCC 10895
MRTPRLPMKGNIAEVVLYRCSKTIKVNNYSNPRPVALDGRMMETTNTQKPLQWQTTPGEGSLEVHSPEQDRQRSISLSKFIPRSLKRNNSMNGSVESHVDAGDAEVDQEGQRASNGRQLGPGGEKRPEAGQLRGTGALPVILKENNKFASRLRSMFKASRELSQQEPNDVQQVSPEGKAEGTARHTPDGGMRVRSPSTPTFTVSRDPQPPTGQAAGTHEAIDIAPGRLQSPLMPSSHSAGGGITSKARGNRSNTVRGLNPYFAYQGLPPHAEPAHDGSQRSYDNSTFLTTPNTAQTSQTTLSYTNCSSNASAASLNDIEENEEVCSFQHTKKSPDILLQAIGCPVTPLTASESREETPLKSPVLRRVASQPTSLNKQEGQTRNNQQATDAGASLMAHQTLPVPVSCRSSSSSNMCAEASATARLEGGSPEHLELPPKRSQRLRAKSFGNKFREAVVGPQSFEKIRLLGQGDVGKVYLVREKKSDRLYALKIFGKAEMIKRKKIKRILAEQEILATSNHPFIVTLYHSFQTEDYLYLCMEYCMGGEFFRALQTRKTKCISEDDARFYASEVTAALEYLHLMGFIYRDLKPENILLHQSGHVMLSDFDLSVQAKGTRNPQVKGNAQSSLVDTKVCSDGFRTNSFVGTEEYIAPEVIRGNGHTASVDWWTLGILTYEMLFGFTPFKGDNTNQTFSNILKNDVYFPNNNDISRTCKDLIKKLLVKKESKRLGSKFGASEIKKHPFFKTVQWALLRNQEPPLIPVLTEDGYDFAKLSHKKDVKKAEKFGPSGDSTHKFKVAASIDSVEEQERIMFEEKVEHDDAVSDDDPFHDFNSMSLMKQDNNSLIYGDNNSYGKITYAPNQNRSRSNSHRSFFKR

SEQ ID NO: 26995 - protein, 581 aa, Ashbya gossypii ATCC 10895
MSSYTCQNNVPSSIPLAEYLFHRLRQLGVTTGFGLPSDYNMFLLDGLENVADMHLCCNTNELNASYAADGYARMQRLSCLVSTFGVGELSVVNGIAGSFAEHVAVLLIVGMPPASAQRRKLLLHHTLGNGDYDVFRRLASDICTYSTVVRSAHTAAEVLDHCIARCYRDQKPVYCGVPINLAEAMLPSAPLDVPLPLLDEPCAPLDELVALLLDKIYAAKHPVLVVDACVARHGCMQQLQRLAQATDFPVCCTPMGKGIVDEQGARFAGVYVGSLSAPQVREVVDFADFVLVVGALTAEFCTFAFHFAYKPKNIGLVHARHARVGARGFPDAPLRALLGLLVQRWTPRASANAREPVPEPSALRVAPNPATPLRHEWLWARLSRWFAPGDILVSETGTSAFGVLQTRLPPGVCVVSQPLWGSVGYSVGACLGVLVATRAAAPPRRVVLFVGDGALQLTVQELSTMVRLRLAPLIFVLNNRGYSADRLLNRARHRANARYYDVQPWHNLALAPAFGASAYDPRAVTTVGELDALLSDPAFAQPSVLKMVEVALPSMDGPPALLDTLVPEHPEHADHKRPKLV

SEQ ID NO: 26996 - protein, 2195 aa, Ashbya gossypii ATCC 10895
MSYLAFVYCLHSTSLVLVPTLSYCRLDTPGTHTHTHGYIQASDVTTDQRKVMLHSEPYDALQEAYEGGQPLGEQTELRGQDGHISWANAIPGKQGLYDPDYEKDACGVGFVANIKGEPSHKIVSDAKYLLCNMTHRGAVSTDGNGDGAGILVGIPHEFMQREFRMEAGVEVPAKHQYAVGNIFFKKDAAEVLEASKQTFGQLAESLDLRVLGWREVPHDSSILGSVALSREPTILQPLVVLKETYGQEISGEEFQAKYETTFRMQLYILRKQASTAIGIQNWFYVCSLNNRTIVYKGQLTPAQVYNYYHDLTNAHFKSHLALVHSRFSTNTFPSWDRAQPLRWLAHNGEINTLRGNKNWMRAKEGVMASAVFQDQLEKLYPIIEEGGSDSAALDNVLELLVINGVLSLPEAMCLMVPEAYHKDMDSNLKAWFDWAACLMEPWDGPALLTFTDGRYTGATLDRNGLRPCRFYITSDDRVICGSEVGVIPVANELVVCKGKLKPGDMLLVDTEKGEMVDTNMLKKEFSLRQDFKSWLSKVIKLDDLSEKTKKYTPQAFTPSHSTGHVQQDPRLLALGYTFEQVSLLLIPMALQGKEALGSRGKDVPLAGLNEDPVLVYDYFRQLFAQVTNPPIDPIREANVMSLECFVGPQGNLLEMHPSQCDRLLLRSPVLMWDEFEALKNIEKVHPTWSTAHIDITFQKSEGLLGYTNAIERITQEASDAIEQGKKILMISDRKIDAEHVPISSLIAVGAIHHHLIRNKQRSQVALILETGEAREVHQFCVLLGYGCDGIFPYLAMETLVRMNNEGLVRNVNDDYSDITDEQLLHNYKEAIDGGILKVMSKMGISTLASYKGAQIFEALGIDNSVIDLCFAGTASRIKGVTFEYIAQDAFSLHERGYPSRFTIKRSVNLPEAGEYHWRDGGYKHVNEPSAIAALQDSVRNKNEDAWSMYVQKEMEAIRDCTLRGLLDLDYESSTAIPLEQVEPWTEIARRFATGAMSYGSISMEAHSTLAIAMNRLGAKSNCGEGGEDPERSIVHPNGDTMRSAIKQVASARFGVTSHYLSDADEIQIKIAQGAKPGEGGELPGHKVSKEIAKTRHSTPYVGLISPPPHHDIYSIEDLKQLIYDLKCANPRAGISVKLVSEVGVGIVASGVAKAKADHILVSGHDGGTGAARWTSVKYAGLPWELGLAETHQTLVLNDLRRNVVVQTDGQLRTGFDIAVAILLGAESFTLATIPLIAMGCVMLRKCHLNACAVGIATQDPVLRAKFQGQPEHVINFFYYLIQDLRKIMAKLGFRTVTEMVGHSEKLRKRDDVSTKALNIDLSPILTPGHVIRPGVPTSFTKKQDHKLHVRLDNKLIDEAEVTLDKGLPVTIDASIINTDRALGSTLSYRVSKRFGEHGLPQDTIVVKINGSAGQSFGAFLASGITFILDGDANDYVGKGLSGGRIIIKPPQNSKFESDENVIIGNTCFYGATSGYAFIAGSVGERFAVRNSGATLVVERIKGNNAFEYMTGGRAVVLSQMESLNAFSGATGGIAYCLTSDYDDLVGKINLDTIELQSLSDPVEIAFVKNLIQEHYNYTKSELAARILHNFNHYLKNFVKVIPLDYKKVLENEAAEKTKEKERSANEYLRTFSKKLNLSADATNGEVSKLLSKKNQAAARPISIKATLAEPKVVDLEDAVQNPDQEDNIKKLDRINGFIKYKLRHEEYRNVATRTKDWKELTSAITKKAAKFQTARCMDCGVPFCTSDTGCPISNVIPKFNELVFKNQWKLALDKLLETNNFPEFTGRVCPAPCQGACTLGISEDPVGIKSIERLIIDNAFKEGWIKPCPPEVRTGRTVAIIGSGPAGLSCADQLNRAGHSVTVYERADRCGGLLMYGIPNMKLDKSIVQRRLNLLAAEGIEFVTNTEIGKDITMSELKSKFDSVVYAVGSTIPRDLRIPGRELKNIDFAMTLLKNNTQALLEKDLGTIRKHIEGKKVIVIGGGDTGNDCLGTSVRHGAASVLNFELLPQPPKERAKDNPWPQWPRVMRVDYGHAEVKEHYGRDPREFCILSKEFVGNENGEVTAIKTVRVEWKKSQSGVWQMVEVPGSEETYEADVVLLSMGFVGPELIEDPAVTKTRRGTIGTVSDMSYSVDGGKLFAAGDCRRGQSLIVWAIQEGRKCATAIDNYLMGSTNLPGNGGIVKRDYKLLEELASAF

SEQ ID NO: 26997 - protein, 457 aa, Ashbya gossypii ATCC 10895
MNNIIVFAGSSHPSLVNKICENLSIRPAEVKLGKFSNGETSINIGESVREKDVYVIQSGCGHVNDNFMELLILINACKTSSASRVTAVMPYFCYSRQPDIPYTAKGAPLISKARKAGEKGAEAVESVLTTQKPVSQSARKSIELAIENSISTLQLGESAPVRAKLEHSGSNSRIPVIQKHEEASSSEAAGTAFNSNNSSYKLWVAQSGTLVANLLTTAGADHVITMDLHDPQFQGFFSIGVDNLYCKPLIQAYIQHRIPEYKDAVIVSPDSGGVKRSSKVADALGLPFALIHKERRSQILKGPPDATLASGGGMPLSPKPLISNLNSTDVKSSLGSSKYVQTTMLVGQVRDKVCILLDDLVDTSYTITRAATLLKEQGATKVYAVVTHGVFSGDALNRVAQSAIDKIIITNTVPQEETVRILGKDRVDIIDVSRVFGEAIRRIHNGESISMLFEYVT

SEQ ID NO: 26998 - protein, 819 aa, Ashbya gossypii ATCC 10895
MRELGTSQQYLRPASSCSQSGSVNQLLRRPQLHLNSDSDDDHPLGPPKLSNFGSALLTDKENETPTYLRRSGTSLQGGNATATSGHTKPSTFTGTMNTEDSHSTLFSSMSKHQPSMTTVDAERTAPGDDGLSSHRYQVIQQSMKDEILSRQGTRRSRRFITSRLATLGPAKRNSTTTNFEFSSNISHDEPRDVSHQEGNVSTSSNSNSGVLNNNGYNVFLDTEERARHDDKESHSAARQSGLSDYGNISFGDLNPYQYLKKHNLPTSELPNISRIYFEMQKRENRRAAVRKNVLNGSGGQVAQLPTNNSAIASTAVALKEANGIASISSGSNKLTPPQAANSMIKRDRQPRRKHSDASVSSFSKLLSSPISAGAPNYADSQKHTPVQKNSTPYEPLLINQNTKKREALNSLDVNANRHPSIITKKQKVDELHDYLKKAPAAASVKKVEIVEPVRDPVITTIPLKPPSAEVPANVHQLPQRKRQVITVNGSEYEKVELLGRGGSSKVYKVRNSSNRIYALKRVSFDEFDDASADGFKGEIELLKKLENQTRVVKLIDHEMNHGVLYVVMECGDHDLSQVLAQRSSMPLDIEFVRYHAQEMLKCVKVVHDAGIVHSDLKPANFVFVKGILKIIDFGIANAVPDHTVNIYRDTQIGTPNYMAPEALVAMNYTQDSDQIQQEMHHNRWKVGKPSDIWSCGCIMYQMIYGKPPYGSFQGQNRLLAIMNPEVKIVYPEKTPTGDFVPRTALDTIKACLERNPERRWTVDELLRGPFIKPITVTHFFIRDLIKNAVKYGSDQRYVSKEKVENLADDVWHRLSDFRL

SEQ ID NO: 26999 - protein, 469 aa, Ashbya gossypii ATCC 10895
MDSRSASESDEDAITAVSGKRNREGVRVNPQASGKKQVRIADEGEEEQDEQEDEEEDVDEGAEGKRRKKKKLNKNLQGVNGGYAWEDEIQRSWDLVKVDNEGNMAALVASIIEARKKRSANKDITPYQRGIIRTMILVIDCSEAMLERDLRPNRHAMTVQYAIDFVHNFFDQNPISQLCIVAMRNGMAQLVSQVSGNPQEHIEALKAVRKQEPKGNPSLQNALEMARGLLLHVPSHCTREVLIVFGALSSTDPGDIHQTIASLANEHIRTRVIGLSAQVAICKELCKQTNYGDNSYYGVILNETHFKDLFAEAVVPLPVNKMNKGFTLVKMGFPTRIFEDTPSFCTCHSRLVHGGYFCPNCKSKVCSLPIVCPCCDLMLILSTHLARSYHHLMPLKVFQELPVDIQFPTENCFSCQKKFPRLRNYKTQDLLTSSRYRCENCKCDFCIDCDVFVHEILHNCPGCESKAVL

SEQ ID NO: 27000 - protein, 431 aa, Ashbya gossypii ATCC 10895
MSTGDFLGKGIELIQKAIDLDTATQYQDAYTAYYNGLDYLMLALKYEKNPKSKDLIRAKFTEYLSRAEQLKEHLDSEQQKAQDQPRRAAASQDGGAGGGGHEEDGEEKKLRGALSGAILTEKPNVRWEDIAGLEGAKEALKEAVILPVKFPHLFKGNRKPTSGILLYGPPGTGKSYLAKAVATEANSTFFSISSSDLVSKWMGESERLVKQLFNMARENKPSIIFIDEVDALTGSRGEGESEASRRIKTELLVQMNGVGNDSTGVLVLGATNIPWQLDSAIRRRFEKRIYIPLPDFAARTRMFELNVGETPCALTKEDYRTLGKYTEGYSGSDIAVVVKDALMQPIRKIQMATHFKNVSDDPSVRKLTPCSPGDEDAIEMSWVDIEAEELQEPALTIKDFLKAIKTSRPTVNEVDLQKQEEFTRDFGQEGN

SEQ ID NO: 27001 - protein, 608 aa, Ashbya gossypii ATCC 10895
MSNANHHHQQQKMYTGGRNMPHGMHRPGSIPIGQRIGKYQVIKTLGEGSFGKVKLAHHVSTGQKVALKIINKKVLAKSDMQGRIEREISYLRLLRHPHIIKLYDVIKSKDEIIMVIEYAGNELFDYIVQRDKMSENEARRFFQQIISAVEYCHRHKIVHRDLKPENLLLDEHLNVKIADFGLSNIMTDGNFLKTSCGSPNYAAPEVISGKLYAGPEVDVWSSGVILYVMLCRRLPFDDESIPVLFKNISNGVYSIPKFLSQGAANLIKRMLIVNPLNRITIHEIMEDEWFKVDLPDYLVPVDMKADATSKPGTDDERIDEALVAVLANTMSYDKDEIYEALEDPNQTDPTVLEIRDAYLLLKENKSLIDGLRSNKQKLDQLDTFLSQSPPTFESHSQLGPGSGFQAALGGSQHGDQNPHQVKRLASRQRTYQLSFSEQQDEDSTIAILPSSLPQIHRANMVAQGSPAAVKISPLSNKKSKTRWHFGIRSRSYPLDVMGEIYLALKNLGAEWAKPSEEDLWTIRVRWKYDVGTQQNERIPDLMRMVIQLFQIETNNYLVDFKFDGWESSSGNPISSSSTDDEMSTFSAYPFLHLTTRLIMELAVNSQSS

SEQ ID NO: 27002 - protein, 803 aa, Ashbya gossypii ATCC 10895
MLRSVGRVPGYRVRGAATSWMHRPLAGGCWLPEHISVNPGNRPSLADGHLSVWLAACRPFSSSVARYQANKNYRMDLGKQQEQSALEQYGINLTKLARAGKLDPVIGRDQEISRAIQILSRRTKNNPVLLGRAGVGKTSLIDGLAQRIVKGEVPSSLMDKELVALDLGSLIAGAKYRGEFEERLKSVLDEIDKSEGQVIVFIDEVHMLLGLGKTDGSMDASNILKPRLAKGMRCISATTFDEFKIIEKDPALTRRFQPVILDEPSVSDTISILRGLKERYEVHHGVRITDTAIVSAAVLSNRYINDRFLPDKAIDLVDEACAVLRLQHESKPDSIQAIDRAIMTMEIELESLRKEEDPVSLERADALKKSLKEKNDELEKLTKVWDKEKKEIEAIKSAKATLEQAKIDLEIAQREGDYGKASELRYAKIPQLEKTISESEKSGSKNNILHDAVTADDISAVVSKMTGIPVSSMFKGDKDRLLNMEQSLTKRVVGQDEAISAICQAVRLQRAGLTSSKRPIASFMFFGPTGTGKTELTKALSEFLFDNESNVIRFDMSEFQEKHTVSRLIGAPPGYVLSESGGQLTEAVRRKPYAVVLFDEFEKAHPDVCKVLLQVLDDGKLTDSQGHHVDFRNTIIVMTSNVGQDILLNDSELTIDGKVSEKTKNKVIESVKRIYPPEFINRIDELLVFNRLSKSVLRSIVDIRLKEVQQRLSDKRMVLALTDEAKDWLTERGYDPGYGARPLNRLIHKTILNPMALYLLKGQLRDGETVKVTVEADKLVIKPNHEESESTDSTGETHAALDT

SEQ ID NO: 27003 - protein, 458 aa, Ashbya gossypii ATCC 10895
MNISEAGRLLGHSRLRHIPGRRYNSMGKIRGNNYFAETTRDVWTIINEAAAKAAAESVANGGSGAGKGMKVLNLGQGFFSYSPPDFAIAGAQRALENAMNNQYAPTRGRPALVEALLKLYRPMYGDLAAENVQVTTGANEGIFACLAGLVNPGDEVIVFEPFFDQYIPNIELLGGVVRYVPIRPPAELSKRVTEGTEWVIDYDMLRQTINEKTKAVIINSPHNPIGKVFTREELLKLGNICVEKGIYIISDEVYEHLYFTDEFTRIATLSEEISQHTLTVGSAGKSFAATGWRIGWVISRNKELLALASKAHVRICFSSPAPLQEACAVAIEHALKTTYYADTRAAYQKKYERFQKPFDDLGLPYTRAEGSYFLLVDFSRLPLPADYHFPEELADKGRDFRVAYWLINELGLVAIPCSSFFIPDHREASENMLRFAICKDDTYLDEAIERLMVLKNYL

SEQ ID NO: 27004 - protein, 524 aa, Ashbya gossypii ATCC 10895
MRVSRLGFSCLALAGWASAMIMQNPFSAIMRGEGDAGSTTWLDGLESWPVLGQDGKLAKWYAQGMSEPRNMLQKIALRGSDFEVMRHKSNPDYALRVKKQDPAKLGVDTVKQWSGYLDYKDEKHFFYWFFESRNDPANDPVMLWLNGGPGCSSFTGLLFELGPASIGKDLKPVHNPHSWNNNASVIFLEQPVGVGFSYGDSVDSTAVAGADVYAFLRLFFQKFPHLAKNDFHIAGESYAGHYIPQIAHEIITSKEENSEEIPNFNLTSVLIGNGFTDPRTQYKYYEPMACGKGGVPAVLNEDQCSRMNASSSRCDRLMNLCYLTNRAIPCLAATVYCERYITQVYEETGLNYYDMRRKCESPDSDLCYRGLDYVQQYMNQKEVQEALGSEVELYEGCNKRVGARFALSGDHGKPFQQYVSQLLDRAIPVLIYAGDKDYICNWLGNKAWSDEVGWRHTYKYRTLPLKPWVNKNTGKTAGEVKSFGALTFLRVYDAGHMVPYDQPESSAYMIESWLNKNYNLDYKV

SEQ ID NO: 27005 - protein, 425 aa, Ashbya gossypii ATCC 10895; identical to SEQ ID NO: 333

SEQ ID NO: 27006 - protein, 305 aa, Ashbya gossypii ATCC 10895
MSDNKQSNFLINFMMGGVSAAVSKTAAAPIERVKLLIQNQDEMLKQGSLDRRYNGIVDCFKRTAASEGVISFWRGNTANVIRYFPTQALNFAFKDKIKAMFGFRKEVDGYAKWFAGNLASGGAAGGLSLLFVYSLDYARTRLAADSKSAKKGGERQFNGLVDVYKKTLASDGIAGLYRGFLPSVVGIVVYRGLYFGMYDSLKPLLLTGNLESSFIASFLLGWAVTTGASTASYPLDTVRRRMMMTSGQAVKYDGAFDAFRKIVAAEGVKSLFKGCGANILRGVAGAGVISLYDQLQLVLFGKKFK

SEQ ID NO: 27007 - protein, 1110 aa, Ashbya gossypii ATCC 10895
MVVIVASLFLPFQPQFEISTSRTEAAALVDSQVVKIPALGGPAESANVVLKAKRASSSHGLTSPFVGPTEQNSGSDDVTDASKTGARGGISSQLLMENITSNVNSAAGTPGAQLGNHGNTSVEEFFASGGTARARDADPGSEVYSTASSPAGESSSSVQPGAVLNNADSTANLLKNVNKKLLYQSVLAGSLSTSALEGHKSTTSSNAHSTVITPRSRQLPDVASSVTNVPKGKAMRQMPVRRLLHRKSSSSIATVHSNLKYPLNINDYDEESVEEEGGRQSSLPHMPYKEAEEQESSDEEELDLDENGNRKNAVPKFGGYSNTARIRAQLMMNSQNIFKTAPWKIVPSSKGNGGLKNALTTALVEKTIEQPVTWIGTVGIPTDAVPPDVLKGITEQLDEAFDSKAVITDDITFKSAYQNFCKKILWPTLNYQIPDNPNSKAFEDHSWNYYQHLNQQFADKIVESYKDGDLVWVHDYHLMLVPEMVRKKLPTAKIGFFLHVSFPSSEVFRCFAQREKILEGILGAHSIGFQTEEYARHFQQTANRLLMCDVADRILRYKGRIIAIESTPIGVDAFDLEVQLKSQETLEWRRLIRERWAGKKLIVSRDQFDRIRGLRKKMLAYERFLKLNPEYIDRVVLIQVCLGSGRDSEMEREVMTVVDRINALSRDISVSQPVVFLHQDLQFPQYLALNCEADMFLVSTMREGMNLTCHEFVICSQEKNAPLLLSEFTGSARVLGSGSLLINPWDIRQVADTIKVGLELSKEQRRRKWKQMFKSVIMHDSDNWMASSLASINNSWEANRERSKVFNLSLDKILDSYETARRHIFILKLSEPPTARMVTVLSELCTRSAVFIINSFSRSMLERLYCRVPNIGLIAENGAFVRLNGIWYNMVQDVSWKEDIIKVIEDKVERLPGSYYKVGETMIRFHTENAEDQDRVSNVVGDAITHVNTLFGDNGIHAYVHKNIVFVQQSGLSVQALRFLLNHYNSVDDTPGSTPAHSPAVSPVMTPVNSSLAMSPSTAASKTPSAATATASYFSNGRSTSRVEFVCVTGTSSPVLEPLFQSINELAKKGDLPYGYTVAYGDAITTYAKEHVEGSNELFGILDKLTFIGC

SEQ ID NO: 27008 - protein, 539 aa, Ashbya gossypii ATCC 10895
MLGRETKVVIRYFARRSIAQAPGNSPRAAENEQWLHSLAEHAPSERNREGFVSDGIREQRVEVQTGPGGLKYHVEPGQNDSGYLNVRSPLENFVSSNYLGDGGRRVALSNFVDVRIVRCKSGSGGNGAVSFFRDAGRAIGPPDGGDGGDGGGVYVQAVPGLTTLAKLKSTYEAHDGKNGGGVQLDGARGRDVLIQVPVGTVVKWCMDPKVIREYLAEKQVKGDTDIRSTLQSATIKLPCIGRYAYDRQPRFIQLFRKSYEPGEGWIFKEKGEEYHQEKDWWQALNKKVRHHDAELTEMELDQDTFPLFGLDLDKPMSTPLCLLRGGKGGLGNMHFLTKLIRNPRFAKRGRNGLEQFFMFELKTVGDLGLVGLPNAGKSTILNRISAARPRVGHWEFTTLAPTVGTVSLGIDKPTFTVVDIPGIIKGAAQDKGMGLEFIRHIERSKGWVFVISLEKNQPIADLHTLIGELGGLEKVSSKKVLVVCNKADIDYDKPESQLKYERVKQFCDENLWDCIPISALKAENIELLLDRMAMCAGKS

SEQ ID NO: 27009 - protein, 716 aa, Ashbya gossypii ATCC 10895
MSSYQGDRIGGGSSNIAIPLQQQRRQSNAHVTESLASRRSSMLLGTSHVSGKLLKRQGTLGQSSPVADKNIESRVFIDIDSPNFKTVEQKQHEEIVNSLRNYYLNDYVQSKRKLSSTSVNTASMSNMEDEEASDDGKSSADDSGLRHDSHLNSVGGDITREFYWIGSRGDQMRRTKNRSCDDLSLACGQRRGSTASALNVPGGFRREYIVSKIRKDVSSVNEDQTAVDNSLFFDKVPFLTRNFLEFLYVEGHFAGESFDEEFALVPPTYATGVDEHTPLLLNTDPEQQQQVPAHLRVKTSTFKAFLLMIKSFIGTGVLFLPNAFSNGGLAFSISMLFFFSAYSYWCYYILVRSKDATGVSSFGDIGGILFGSWMKFIILFSLVLTQMGFAGAYVVFTAKNLIAFLDNVFNWPDIPVKYLLLTQLFIFIPLSFVRNVSKLSITSLFANFFIISGLIIVVYYTACRWMYDLSFKPAEGVIMVFNPNRWSLFIGTAIFAFEGIGLIIPVQESMRHPEEFPKVLGLVIITTTVLFITIGTLGYLAYGSQIQSVILLNLPQDALSVNMIQLFYSMAILLSTPLQLFPAIGIIENKFFPRFTKVDIKGQDSADFQLQQNSGRANWRVKWSKNLVRSIIVLLVIILAYFGADNLDLFVSIVGCLACIPLVYIYPSMLHLRSCSTPDHEKSNTWKTRCSVLIDYILIIFGFVSMCYTSYQCFAG

SEQ ID NO: 27010 - protein, 367 aa, Ashbya gossypii ATCC 10895
MDADAILKKDQRRSSLKQRNLLLSMRLNQTTATNGAPPQARVQPGKGYRNPGKVLSPIRNQEMSPGKRPTLEISELKNVSPINQAHKTGKARAGGVPLSKLQNLKLADFEIGKVLGKGKFGRVYCVRHIESGFVCALKAMEKKDIIQYNIEKQFRREVEIQSSLRHPNLTQLYGYFHDEKRVYLLMEYLVNGELYKHLKGRSHFNDVVASYYVYQMADALDYMHERNILHRDIKPENIIIGFNNTIKLTDFGWSVITPKGSKRKTLCGTVDYLSPELIRSREYNEKVDVWALGVLTYELLVGSPPFEEESKELTYKRILKRNLIFPDHVDTEARHLISRLLEYDPGDRIPLKEVKKHPWIEKNKPFW

SEQ ID NO: 27011 - protein, 486 aa, Ashbya gossypii ATCC 10895
MESVKMQKRGSSPMSSPRKKRKHLVSTLNKHYKSINKLDDYRQLYISDSRMDIFVWGTGSMCELGLGPLAKNKEVKRPRLNPLLQREKAGIVSFAVGGMHCLALDSDNNVWSWGTNDSGALGRDTSGAAEQLRDMDAAESSDDEDGDLNELEATPTMLPRDSLPLDTQKVVQLAATDNLSCVLFENGDVYAWGTFRCNEGILGFYQDAIESQRSPWKLPSFSGSRIVQMAPGKDHILFLDEHGVVYAWGNGQQYQLGRKIMERSRLRTLDPRAFGLDGVKYIASGENHSFALADDGRLFAWGLNQFGQCGISNEVEDGAMVTVPTEVLLPPDVKVESIAAGEHHSIVLTQDGDLYTFGRLDMFEVGISAEDYPESTYKDVHGKARSVPVPTKLKGLPKFKAIAAGSHHSLAVARNGIIYSWGFGETYAVGLGPAGEDVEVPTRIKNTATQHESIVFVGCGGQFSVAGGIELSDEEAEKRAKEMGDE

SEQ ID NO: 27012 - protein, 470 aa, Ashbya gossypii ATCC 10895
MPGNQVGTDGAGAVDVAALANAAWVGASSVLIWMMVPGAGLLYAGLSRRRHALAMLWASIMAVTVVSLQWFAWGYTLAFAPATRGNGFLGTLHYAGMYHVLDAAPKRALPTAADVLFQGMFAMVAGTLMIGGSGGHARLLPMLVFLFWWVTLVYCPVACWTWNADGWLARMGVLDYAGGGPVHLTSGHAALVYALILDSRRGRRARRPRKFRPHSVTMVVLGTVFMWFGWFGFNGGTAGSPTALAFYGCVSSNLAAGCGAIVWLFLDYFRYGKKWTVVGLCSGAISGLVAITPAAGYVPAWASVAIGAFAGFSCIFAVAIKIVLGIDDGLDVYAIHGVGGAVGSAMTGLFACKYVNASGAPYVRPIEGGWLERNWAQLGYQVVAILSISAWSAIVTALLLLLLDRIPYLRLRPAADEQEDVDIHGINLFVNDVHDRVAEKIGVTSHAASTSRDQEAAKPRETPELDAVVS

SEQ ID NO: 27013 - protein, 387 aa, Ashbya gossypii ATCC 10895
MVHYRLAAAMLGAAACAQAAQPSPEELWGFDVGTAGIQTFAHLPHERWLLQPDLEFDIGILGMPFDMSVTYRPGARFRPEGIRRGLQATDSAQRLQNYRALNPYDDWAHIVDCGDVPVVLTDNRIARDMMHRAYADVLRRSSKSDPRVPPRIIMLGGDHSVLLPALRALHDVYGPISVVHFDSHIDTWQPANTSVWDTAHVPLNHGTMLWEAFQHGLLSDHNVHVGLRSNLAHPDDFHRDDAAGFYRIHADEILDIGPQGVVDRILRVIHRGVPVYVSVDIDVLDPSAAPATGTVEPGGWLPRELLRVLRGLQPLTLVGADIVEVAPAYDRADITAITAAQLVYELAASMVASGPVAHTLLDTRADSAAVPAQVRFRARGPSRSATA

SEQ ID NO: 27014 - protein, 268 aa, Ashbya gossypii ATCC 10895
MIGYEAGEPEVVTSEAERDYPPLDSGLAHYTPRDAAVSQRRDTPRIDAAELHGSSPARHQGTHGGPLEAVLKVPAEPHADMFLYEQPAAGLSSAPAGDDASVDGEPPRVGRDGILHGRGPFFEGAGLDFTSTDQVALESMAAADPAEQPFYVNAKQYYRILKRRYARAKLEENLKISRERRPYLHESRHKHAMRRPRGQGGRFLTAAEIDELKKQELAQSKAKSPAKDTADDRPKSPDTSYPPHKIQPQPPGGAVDKQQVADAAPSRT

SEQ ID NO: 27015 - protein, 403 aa, Ashbya gossypii ATCC 10895
MSSRLNNIKDHVTGQSQATVKGTSPDDVVIVAAYRTAIAKAFKGGFHEMPSDQLLYEFLVKFFEKVDVDKKLIQEVTCGNVLNLGAGANEHRAACLAAGVPFNVPFMAINRQCSSGLTAVNDIANKIKVGQINVGLALGVESMSVNYPRMNFDHTSPDLQENKEARKCYIPMGITNENVAKAFKIPRAVQDEFAADSYKKAEAAVKGGLFQEEILPITNPDGKVINTDEGPRKGVTAESLGKLRPAFIPEKGVTTAGNASQVSDGAAGVLLARRSVAEKLGLPILGKYVAFQAVGVPPEIMGVGPAYAIPAVLEQTGLQVGDVDIFEINEAFAGQALYCVEKLGIDKTKLNPRGGAIALGHPLGCTGARQIATIMRELQPGQIGLTSMCIGSGMGAAAIFVKE

SEQ ID NO: 27016 - protein, 571 aa, Ashbya gossypii ATCC 10895
MCGIFACYRKDDIESFKPTALRLSKRVRHRGPDWSGNVIKNDTILVHERLAIVGLDSGAQPINSPDGNYVLCVNGEIYNHIHLREECSDYEFTSLSDCEPIIPLYLKYDVETPQHLDGMFAWCLYDVQRDRIVAARDPIGVTTLYMGKSSSSPRTRYFASELKCLVDECDEITAFPPGHVYDSDTDKLTRYFKPDWIDETRIPSQPVDYKAVRTTLEKAVRKRLMAEVPYGVLLSGGLDSSLIASIAARETERANREAGDVYADGKHLAGMDDRGLLHTGGWSRLHSFAIGLPNAPDLQAARKVAKFIGSIHHEHTFTLQEGLDALDDVIHHLETYDVTTIRASTPMFLLSRKIKAQGVKMVLSGEGSDEIFGGYLYFAQAPSPAEFHTETVKRVNNLHLADCLRANKSTMAWGLEARVPFLDREFLQLCMNIDPAEKMIAPQKGRIEKYILRKAFDTSDEPGVDPYLPEEILWRQKEQFSDGVGYSWIDGLKDAAERAISDEQFANPNPAWGDDIPTTKEAFWYRLKFDALFPQPTAAATVMRWVPKADWGCAEDPSGRYAKIHDQHISS

SEQ ID NO: 27017 - protein, 157 aa, Ashbya gossypii ATCC 10895
MAEEDHTFETAEAGASLTYPMQCSALRKNGFVVIKGRPCKIVDMSTSKTGKHGHAKVHLVAIDIFTGKKLEDLSPSTHNMEVPVVKRTEYQLLDIDDGFLSLMTMDGETKDDVRAPDGELGETMQASFDEGKDLMVTVITSMGEEAAISFKEAPRSD

SEQ ID NO: 27018 - protein, 532 aa, Ashbya gossypii ATCC 10895
MSVLAGVEASGIARNYVFKNWAGIYSARPRLYFQPRSEDEVVAIVRAAREQGRTIVTVGSGHSPSDMCATDDWMVNLDRLNGVLELQEDEQGRYADVTVAAGIRVYELHRYLSARGYALQNLGSISEQSVGGIISTGTHGSSPYHGLVSSQYVNLTLVNGRGELVFLDSEHEPEVFRAAMLSLGKLGIIVRATIRVVPAFNIHSTQEVINFETLLDNWETIWTSSEFIRCWWYPYVRKCVLWRGVKTSEPAEKSRSSWWGTTLGRLVYESLLWLTVNVYPSLTPFVERFIFRQQYGKVETFGNGDEAVQTSIDGLNMDCLFSQFVDEWACPLNNGPEVLRSLDHSIAQAAQNKEFFVHVPIEVRCSNTTLPHEYKCPEDRTVTAPGPVYGNLLRPYLDNTPSHLRYAPLSDVTNSQLTLYINATIYRPFGTNTPIHKWFTLFEDTLGAAGGKPHWAKNFLGSTATAAGPVKSSDEYQDYEMRGMATKIKEWYGDNLKQFQKVRREQDPHNVFIANKDWAVKNGIIDIDELDS

SEQ ID NO: 27019 - protein, 337 aa, Ashbya gossypii ATCC 10895
MKQDLFHDLRRLIVARRSTPAAPACSISQMPPTKDDDPQRPTCAFQDVYSRYTDLLHSHVLAARDLYLYYNGDADGPSPRADFSATYNTLMSCLADGRKLVFVACGKSFRIIAKTVATCHSLGIPAAVLHPTEAMHGDIGIVADGDALLLCSHSGETDELLHLAAYLRSARLAPASPLIAVTGDPASTLARRAHHVITVFQPPHLRERVVQDGLNAPTIATTLMLLALDCLVLALSDGGSPCARRRRADAFAARHPGGSIGSHAAAPAPEYPEQSAARAATVAHYAGSETLPEFLHMIVTHDYVRVRGHLHSATALRHRYARASRDGIPWTQIMSDL

SEQ ID NO: 27020 - protein, 353 aa, Ashbya gossypii ATCC 10895
MSRPVVLKLGNTRFAHKAWDELGRIADVVTVNKAVTRPEFLRMLRDPNSPASRAQVVTRTFASVQQTGLFDRELAEHLPASVVAVCQNGAGYDQIDPESFTKRQIQVANVPGLVNAPTADTHVFLLLAALRNFCHGQLLLRQGRWPDAPVAGTPFGHDPAGKTVGVLGMGGIGRAVVQRLRPFGFERIIYHNRNRLSSELECSCEYVSFEELLAQSDILSVNVPLSSATRHMLDADAIARMKDGVLVVNTARGPIFDEQALIAALQSGKISAAGLDVYENEPHVPQALLELPNVVCLPHMGTHTVESIKKMEEFVVENVHSVLRTGRVKSLIPELRNAPWLASTVPLIPQSDY

SEQ ID NO: 27021 - protein, 677 aa, Ashbya gossypii ATCC 10895
MTSRRTYMWLSLAVKQVPRPVIGMQRWPPFNHLHQRTRFSFSASTRIQTRLNSTANPRASTEEKPHQERLELSTATGNASGAKDVRRLFQLARPELKSLVCALVLIVISGAVSMTIPSVIGKLLDVAREDVEQESGDEEEAVLYGLPEKQFYLALSGIFAVGALANMGRIVVLKTTGERLVARLRTRTMKAALEQEGAFLDSNRVGDLISRLSSDASIVSKSITQNTSDGARAVIQGAVGFGMMSYISWQLTAVMTLLAPPLVLMAAFYGRRVRNLSRELQTKVGGLTKVAEEQLNATRTVQAYCGERREIRRYATEVRNVFDVGLKEALISGSFFGATGFVGNATLLALLLTGTSMIKGGGISVGELSSFMMYAVYTGSSLFNLSSFYSELMKGAGAAVRVFELNDRKPLIHPTIGKDPVSLTGKTIAFNSVNFAYPTRPHHQVFAGMDLSICPGEHVCIVGPSGGGKSTVASLLLRFYDPISGSITIGGEDIRLFNLSKYRRMMGIVQQEPVLFNASILENITYALPLHLTKDPARIDRALRLSNCSAFVGSFPEGLQTAVGPRGTQLSGGQKQRVALARAFLQDPAILILDEATSALDSKSEDIVASTLLQRCQEAKITISIAHRKSTIQHSTRVIVLDKLGHVLETGTYQQLIGDPGSSLSGLLSKEHSSDAE

SEQ ID NO: 27022 - protein, 1142 aa, Ashbya gossypii ATCC 10895
MGDKNNNVTSLRGDRIGPWKLGETLGAGSTGKVLLAQNTETGQIAAVKVISKSVFNAQGSTFVGSNDPDVLPYGIEREIIIMKLLNHPNVLRLYDVWETAQDLYMVLEYVEKGELFNLLVQRGPLPENEAVRFFRQIIIGISYCHALGIVHRDLKPENLLLDHKFNIKLADFGMAALESKDKLLETSCGSPHYAAPEIVSGLPYHGFESDVWSCGVILYALLTGRLPFDEEDGNIRNLLLKVQSGKYEIPGEDEISPEARDLIVQILTVEPEQRIKTREILKHPLLQKYPSIKDSKSIRNLPREDTYLNPLDHNDGTIDQAILQNLVVLWHGRDKNEITMKLKEPGANLEKTFYALLHRFKFENEQQQLKQQQIAKRISSTSSSPQQNIVKSSSRRSINNILSTPKKKRSSAINVSSAHKRPVSIQKLNDCGTLNPTSPSKKRSLSNRKLSAVLAGSNSSSPSRKRMSVGQDAPPVPTAVLRDYNKRASRASKRLSFLPSKRGSITTKIIATYAKLSEDNDWEYIDREAKRTSSDFATLIDNIFEHEKYEQIRREKEELERKVREAKEREERERRARAEAERRKREEEERRRRREVEELIRQRELQKSLEEQVARLKAEVAATKQEKRISLAQEQHVRSISEPMERKGTRPSKRDSFLALQNNINSLLKRRTLSLETRPISRLDPGIRLSEENTILEDDLECNEDRLRVEKNILETIRRSKFLGSQYDIDKELQRVRREKLEKVNMRKSQDRKLEPGLHSRQEQRFVSDGTTVTSSHEDSESIILPKNVTAIGVLKDEESEPRKLSEVKIPQFTRRSKHFSASSKRLSVLSMYSTKVSYTNLADYLNNDVQLKSLQPSAPTSIKIPQEPEFMFESAGQENRYQAAAPTDTYLERPKVGVEGDHEPGEPVELIELDDSEDRSKQYSEEDIAKVKLPILPPLDHLNKPNGLGIYQAPAPPKEPLGQPVMKSMIPDDIKIKCVPNQLSPRRRATERAPEKKLTKTVPERVIAAETFPPPNTKKKPSFFKKFSREKMHSDCDVQLDTTVGDSKMFRALNKLLNGWTSYGLKEVRSMPASYTITGKLSSDNILSLRSTAFEIVILSVADTGSSVKFTKKSGSKKTFTRLVNEIEKILEKESVLVLAS

SEQ ID NO: 27023 - protein, 92 aa, Ashbya gossypii ATCC 10895
MSDEQEQKPEIKPETHINLKVSDGSSEIFFKIKRTTPLRRLMEAFAKRQGKEMDSLRFLYDGVRIQPDQTPDDLDMEDNDIIEAHREQIGGS

SEQ ID NO: 27024 - protein, 111 aa, Ashbya gossypii ATCC 10895
MVSPSVIKQVQALIQQNRVFIASKTYCPYCQAAKRTLLEEKRVPASAVKLLELDTMGEEGAVIQAALQELSGQRTVPNIYINGRHVGGNSDLEALKASGELDQLLEEALRE

SEQ ID NO: 27025 - protein, 563 aa, Ashbya gossypii ATCC 10895
MRGQSLLAPLMLVPALVAGTSIQGGKAQLEKRQSMPDDLVAAVGGHLSKLRSKMNVQQGKFFDARGSLKNIADSLGVSEQEVSSVSAELESVMAEMSELFPQDAKQLKFLSEPRGDVRKVREWDNVVRKESLQDYQLRVRKVSDPAGLGVDPDVKQYSGYLDVEAEDKHFFYWFFESRNDPKNDPIVLWLNGGPGCSSMTGLFFELGPSSIDQKLKPVRNPYSWNTNASVIFLDQPVNAGYSYSSNSVANTVAASKDVYAFLELFFRQFPEYQAGQKFHIAGESYAGHYIPAIAAEILSHPDEERSFKLSSVLIGNGLTDPLTQYPYYERMACGGGGEPAILGPEQCSAMNETLPRCLRLIRTCYTLQNVWSCVPASLYCNGNQLTPFQRTGKNVYDVRKECEGQLCYDDMKYSEEYLNTPEVIKAVGAEVDSFTSCNFDVNRNFLLNGDWMKPYQRHVTEILDKGLPVLIYAGDKDFICNWLGNRAWTDELPWKHHDDFTKQPIKPWNGPSGDQAGEVKNYKHFTYLRVFGAGHMVPYDVPENSLDMLNTWLQGDFGMGAQE

SEQ ID NO: 27026 - protein, 327 aa, Ashbya gossypii ATCC 10895
MSPKLTPLDNVANLLRFRNTNSFPTRAVWPVNRRAAVLILLFIGTHGELRVLLTKRSRGLNSFSGHVSLPGGKADNPMEPFELIARREAEEEIGFPLNDGVLSEEYNLKVDTISGELPHYISTTFLSVKPFLCFLYNADLSDDEKHVRALKINKPFTKLNPGETSSVFSIPLRDLVAHELSEQPTDVEYVRRREFMYDWGGLSWLVRHYYYACDNVGEVSWLNGVEDLSSDEDDSGGEVICKDVWGLTAKILYDVARVAEGLVPNSKSEGVCAHEALIYGLHELGKQMHSPNRTTWELGMIERKRALSCADVIPDYYMERLKSHLPL

SEQ ID NO: 27027 - protein, 320 aa, Ashbya gossypii ATCC 10895
MATNAIKLLAPDIHRGLAELVAKRLGLRLTDCKLKRDCNGEATFSIGESVRDQDIYIITQVGSGDVNDRVLELLIMINASKTASARRITAVIPNFPYARQDRKDKSRAPITAKLMADMLTTAGCDHVITMDLHASQIQGFFDVPVDNLYAEPSVVKYIKEHIPHDDAIIISPDAGGAKRASLLSDRLNLNFALIHKERAKANEVSRMVLVGDVTDKVCIIVDDMADTCGTLAKAAEVLLEHNARSVIAIVTHGILSGKAIENINNSKLDRVVCTNTVPFEEKMKLCPKLDVIDISAVLAESIRRLHNGESISYLFKNNPL

SEQ ID NO: 27028 - protein, 600 aa, Ashbya gossypii ATCC 10895
MVDDSYYITPHETALAVVATAMKKARLQLDTLVVNSLVGGVLFSTGGMLYLAGHSDSPGMMASAPGLANLLGAATFVLGLFFVVINGADLFNSKILFFSVALLRRTVSIYDLLVSWIVNWFCNLAGTLFVCYVICHLSGATASESWVENSRVIVASKVSHSFVQILIRGMAGNFYVCLAIYLQLMVKPLHVKLIVMSLPIFTFVSMGFTHVIADMYLVMMGMINGADLTVARCIWAVFIPGTLGNIIGGFAFGAIVPFYLHLIVVERDRKKLSLPEYDARDEQPELNIDSRVVRVPKEQAQDKGVTDLLSAYYPDEQLHAMPDSEARSQSMPVVSRTTTRRSHASSFAAPSAAATRSPPGVFPVRGMARPLTRERHIANAADDSAPYLALDSSSTTSSLRSSSDSTQPPTAARRRHSLPGTLWESPDQEEAQYLYDGGYDVRGHTLGSRLERALTWITSPARLPSPEPFVAEKAAPGSPRARRASFASRFRSFGRAFMPSRDPDDIHTIHRKLSEAGVTAVAADASDNIAGVVNYDGIALPANNSPFYRTQPQLRPVVPLAARPSFETAAARSSKRLSQLRNMVSFDNDDFEEQSIREPR

SEQ ID NO: 27029 - protein, 904 aa, Ashbya gossypii ATCC 10895
MNDETKFTNKALDIITIAQKLAQDHQHSTLVPLHVLAAFVETPADGSMGYLQNLIEKARYDYELFRRTINRQLVRLPSQTPAPSTIAPSQSFVQLLEKAAKLSEQQKDSFIAQDHLLFALLEDATVAQIFKECSVEPEAVKQQALVLRGNQKIDSRGADTSTPLEYLSKYAIDMTELAREGKLDPVIGREEEIRSTIRVLARRIKSNPCLIGEPGIGKTAIIEGVAQRIIDNDVPKILQGSKLFSLDLAALTAGAKYKGDFEERLKGVLKEIEESKTLIVLFIDEIHMLMGNGKDDAANIMKPALSRGQLKVIGATTNNEYRAIVEKDGAFERRFQKIDVAEPTVRQTIAILRGLQGKYEIHHGVRILDSALVSAAQLAKRYLPYRRLPDSAIDLVDIACAGVAVARDSKPEELDSKERELQLIQVEINALDRDKDSDPTTKERLMQAKQKEASLMEELEPLRQRYEEERRSHEELTKAKAKLEELENKALDAERRHDYGTAADIRYFAIPDLRKRIGELEVEVAEEEQRLGQNTMIQNVVGSDAIAETAARLTGIPVNKLTESENEKLIKMERVLAEQVVGQVEALKAVSRAVRLSRSGLSNPKQPASFLFLGLSGSGKTELAKKLAAFLFNDEDAMIRIDCSELSERYSVSKLLGTTAGYVGYDEGGLLTNQLQRRPYSVLLFDEVEKAHPDVLTILLQMLDDGRITSGQGKTIDCSNCLVIMTSNLGASYIASQPGARIEPATRDVVMAAVRAHFRPEFLNRISSIVVFNKLSRKAIHKIVAIRLAEIEARFRDNDKHYKLDIAPDAVDFLARHGYSEDMGARPLNRLIQTEILDKLALRILKGEIKDKETVKVTYAADRDALAVLANHPPSAGSHAEDMDIDDWDDLDNDDLVDGPAALD

SEQ ID NO: 27030 - protein, 877 aa, Ashbya gossypii ATCC 10895
MDFQQVDTKEKNSDRLPSPCAPASEKDGKAGSQDVPLSDTQELSLLDDEHLILLLHKMGYKHADLEDIPPVVHYLVARINELTIEKSLTILKKCAVDHAGDPNITEEEATDLERFTSGDFDHTDETEVFQLKLLAALFYYHSPYPEVRAVVGPGDDPTIPVETFRCYFLTTTITIIGCGLTTFFQSRYPLIEFSSMAAQFLFFILGTLWSKFMPAVRIPIFPGYGFQLNLQTSWSKKEQMFATLLYSITTGVFYSYFNILTQDMFYNDPTSLGFQIILSLSLQFMGFGLAGLLRPFVVFPARALWPLSMPTIALNNALLAQDVGKGTSIRKVFFYFGIGMFIYNWFPTVFADVLSNLNWLTWIKPNNFNLAAITGGRYGIATNPLPTLDWNYITHWALALPFYTVFLQYLGSLLSVVIIIAVYYTNYMECQYLPIFGQPLYSNEGKFFDASKVLTDFKLDWQKYQQYSLPYYSAGNIVGYGSFISLYTLLAAYSIITEYEILGGACKRLGVGLWSLTKLDTWRNLHKNDSSILEGYDDAHCREMRKYPEVPEWWFFAIFLISLVLAIILVTTYKTNTPVWGIFLAVGLNVAFLLPLTTLQSTTGASLGLNLLVQMITGYLLPGNPYALMIIKAFGYNIDGQADNYLSNLKMAHYCKIPPVPLFRGQLSMVLLQVIVSLAVINWQIHNVPDFCNPKNRSGFICQGPRTYYNASIVWGIIGPKKVFSYLYPMMKWCWLIGALLGVLFGGWCRLSRKYKLYYPRSFNPVVFVTGMISLMPPYNLRVYTSKLYVAFIGQYWLRRYHLRIWEKYNYVVAAAFNCGVIFSAITIFFAIQYPEIRLDWILNTINDVGIDATPTPLKDVKLTERGYFGPPRGSLP

SEQ ID NO: 27031 - protein, 848 aa, Ashbya gossypii ATCC 10895
MSRQVHTGRSSSDDTGAPQWPSRNSVLNDDIEALQAEYDQLKAGEVHSAQGATHGDIGSRQYSGSGKPAAQYLGLNVNSREAVPEYEETVVSVKDYYNYKLRGFISLNTARDYALSVFPLHRWIHHYNVAWMYADMVAGITVGCVLVPQSMSYAQLASLSPQYGLYSSFVGAFIYSFFATSKDVCIGPVAVMSLETAKVIARVTENLPEDTNITGPIIATALTLLCGAIAMVIGILRLGFLVEFISITAVTGFMTGSALSIISGQVPSLMGYSKKVNTRATTYKVIIESLKHLKDTNMNAAFGLVPLVLLFLWKWICGSLGPRLVDRYLQFKPSRASRWNAAFFYLQALRNAVIIVVFTAISWGISRHKLEKPPISLLGKVPSGLKNVGPLELPEGLVEKLLPELPAATIILLLEHIAIAKSFGRINNYKVVPDQELIAIGVTNLFATFFNAYPATGSFSRSALKAKCNVKTPLSGLFTGACVLLALYCLTEAFYFIPKATLSAVIIHAVADLIASYKVTWMFWRTNPLDFFAFIVTVIITVFSSIEHGIYFSISWSCAVLLCKVAFPDGKFLGYIDVAEVIEPAGPPSINSEADLASIDNSATFQQIDKDGGKLNTVESVLPDPHTRFHRRWIPLDHAYSRELNPEAVVNPPPPGVIVYRPTDSWTYLNCSRHFDIILDHVKEHTRPGQLVNHLSNKERLWCDPGPWRPPRIFRRFIADKRTGSAVADARPVLRVLAMDWSQVSQVDSTGIQNLVDLRNALNKYADRPVEFHFAGIVSPWIKRALVNTGFGIADPPLISSRVSYHLVRLPADPPHIVHGHSVVFALGTNTPFFHLDMPDFETWRHDA

SEQ ID NO: 27032 - protein, 521 aa, Ashbya gossypii ATCC 10895
MAIGMLRRNSSGTAVSVLQGRVLRTRRLSSVKDGSRFVPAEPMTLADVNENVVKAKYAVRGKIPTRAEELERRLEEHPGSLPFSKIIQANIGNPQQLGQKPLTFYRQVISLMQNPQLLEMPAEWLQQAFKADVVVRARRMLQDAGGSVGAYSASQGVKGYRRTVAQFIERRDGIPANPDNVYLTAGASSAVSCLLSTFCKGPETGVLIPIPQYPLYTATITQNNAVALPYYLNEADGWSTNPDEMERVILDSKKRNIAPKCLVVINPGNPTGSVLSVKDMEAILTLAAKYGIVVIADEVYQDNVFGDAKFHSMRKVLKNLQLREPTLYKNVQLASLHSISKGLSGECGQRGGYMELIGFREELRKVFVKLASISLCPVVTGQALVDLMVGPPSQGDPSYEQYTQETRSIYHELEERSQLLWKTFCSLEGIECNMPQGALYLFPKLHLPQKAIEAAQKLGIPADELYCSELLDETGICTVPGTGFGQIPGTYHVRTTFLPPGTKWIESWKDFHKKFYDKYRD

SEQ ID NO: 27033 - protein, 237 aa, Ashbya gossypii ATCC 10895
MTVIDITSKDQFTQQTTVAAGSKLVALYFHTAWAEPCKAMSAVFSAVSEEPAHKDVLFLAIDADEHAEISELFEVAAVPYFVLIKEGAIVKEISGSDPKDFVSALNEYTAGSNSTGAAATASAPAEEYGEEETEEQLQERLKKLTSAAPVMLFMKGTPSEPKCGFSRQMVGILREHQVRFGFFDILKDESVRQGLKTFSDWPTFPQLYINGEFQGGLDIIKESLEEDPEFFQNTLSS

SEQ ID NO: 27034 - protein, 774 aa, Ashbya gossypii ATCC 10895
MKFFIDDLPVIFPYPKIYPEQYQYMCDIKKTLDAGGNSILEMPSGTGKTVSLLALTVAYQMHYKEHRKIIYCSRTMSEIEKALVELESLMDYRAKELQYQEEFRGLGLTSRKNLCLHPRVSKERKGTVVDEKCRRMTNGQARARKQQDPEANVELCNYHENMYNYSPEEYLPLGVYSFEKLIRYCEDKTLCPYFTVRRMISMCNIIIYSYHYLLDPKIEERVSREVSKDAIVIFDEAHNIDNVCIESLSLDLTKDLLKRASKGASVLGKKVEEVRRVDTKKLQDEYDKLVQGLRANDIMEENEEPLVESPVLPADILKDAVPGNIRRAEHFVAFLKRFIEYLKTRMKVLHVISETPNSFLQHLKQLTFIDRKPLRYCAERLSLLARTLEIDEVEEFNALKDIATFATLISTYESGFLLIIEPYEIENAAVPNPIMRFTCLDASIAIKPVFEKFSSVIITSGTISPLDMYPRMLNFETVLQKSYSMTLAQKSFLPMIITKGSDQVAISSRFEIRNDPSIVRNYGSILVEFAKITPDGMVVFFPSYLYMESIISTWQTMGILDEVWKYKLILVETPDAQETSLALETYRKACSNGRGAILLSVARGKISEGIDFDHHYGRTVLMIGIPFQYTESRILKARLEFLRENYQIRENDFLSFDAMRHAAQCLGRVLRGKDDYGVMVLADRRFSRKKNQLPKWIAQGLSDADLNLSTDMAIANTKQFLRTMAQATDPKDHEGVSVWNIKQLLAYQQEQKRRKGTMGVIEEEVDEDIELPDA

SEQ ID NO: 27035 - protein, 857 aa, Ashbya gossypii ATCC 10895
MTKDTCTGARRVINCVAQLPFRTQARGADWQVEPTAGNSALHASLTRLGDGWEQHVVGWTGEVGSADGEAPQYLTAEERAAAAGRLQERAGGLRLHPVWLLRKDQARWRAYAENVLWPALHYILNPPSDGQQENTWWYDYVRFNEAYAMKVAQVYRPGDVVWVHDYQLMLLPQLLRMRFGDALIGYFHHSPWPSNEYFRCLPKRKELLDGLLGADRVCFQNEGFARHFVSSCMRLLGAEASGETGADGTVYRISAYGGDVLVDCLPLGVDTEQLLEEAFTEDVDAKVQEIRRAYEGKHIILGRDRLDAVRGVVQKLQAFEMFLTMYPEWKDKVVLIQVSSPTGMERDHRVEVQANELVNSINAQFGDLNFNPVQHYHMRIPKNVYYSLLRAADLCVVTSVRDGMSTTALEYVTVKSRSSSLGCYASPLVLSEFSGSSTVLQDAMIVNPWDSVAVAKAIKKALSLSEEQKGKLERALWQHVPTVQDWTSKFLEGMLTLQDQKDASEHKPSTKVTPALNRPLLLQNYEKAQRRLFLFDYDGTLTPIVQDPAAAIPSARLLSILRKLALDPKNQIWIISGRDQKFLSRWLGDRLPQLGLSAEHGCFMKDVSNSEWINLASKFNMSWQIKVAEIMEKYTKKTPGSFIERKKVALTWHYRRADPELAEYSAAQLKEELEAIASGLELEVMEGKANLEVRPKFVNKGEIVKRLVWHPHGSNQTTEDEFKIDENVSKDKLPDFLLCLGDDFTDEDMFRQLIDIEDKWAEKFPNDRNEWGHYGIYPCTVGPASKKTVAKNHLTEPQQVLDTLGLLVGDVSLFQSAGTVDLDDRGHLKNSESSMKSERAGVAYAMKRSSSYKTDRN

SEQ ID NO: 27036 - protein, 689 aa, Ashbya gossypii ATCC 10895
MSDESSRTLLPRPGVMPASSTMSLRSYRAIKVDKPLRHDTKSYVSYYLPILRWLPEYSWGKMAKDMLAGLTLTSFQIPLAISLTTMAHVSPYAGLYALVIPPLIYAVFGSVPTMVVGPQTVASLVVGQSCDAWAHKSLEPLMTVAVIGCISGVLVFAMGIFRLGFIDNAISKAFLKGFTSALAVVMLITELLPQLQIDDRYKQALKEGKVGSAAWDKLVFALENAREYSNPFSVKLSVAAFSILLLSKYLKKYLTAKYGWTKLTFFPDLLLVVLGSILLSFYYDWDNKYNLPIVGDLPPNKDHIKVPIQSFQEFKDLFDASFLVAILGLFESATAFKSISATFDIDVSSNRELVSLGLINIVGSVFSSLPAFGGYGRSKLNIFCGAQTPMAGIFVSLSAIFCMRFLMGVFHYLPLCILAVIISFIAYNLLEEVPGDMFFYWSVSGYQELITFSAVVLSTLIWSPQFGLVMGLGLTMIRLLKHTTQSRIQILGKDPITKKFRNIYSEHNEEIPLEEIEKTMVIKVPEPLVFWNVPDLMKKVKRLEKYGSLYVHPSYPTSLRPVSGVTTLKDNVYVKYIIMDLLGMTYIDMSALQALVDMVVNYHKRGIYVIFCRSSIRDLKNKFDKSGITRLQADFISRQLLYQEGIPHDHLQFLKLGLYGSVDEAVTAVDMLEVLSSTSSGTAQNGRMA

SEQ ID NO: 27037 - protein, 399 aa, Ashbya gossypii ATCC 10895
MAQRNCWRRSWLGVGGGLCLGAHGAARGPRQLFHLTAKQSSAASDAKCRRWRAAGRGGGAGGVYNGRGAAAGSRQTSGMAHNEHPHYKFFESKKASLVMAPFSGGQGKSGVEDGPKYLLKQGLREGVEGLGWEIEVQRPLDGHDFEERKQRATEVVGRAKNPTLVGEATHLIHDAVRAAAHAGRLPVTLGGDHSIAIGTVSGVLDRYPDAGLLWVDAHADINTLASTESGNLHGCPVSFLMGLERESWPAPLAWVPGTLRPSKIAYIGLRDVDPEEKEILRRLGITAFSMYHVDRYGINKVVEMALAAINPDGTGPVMVSYDVDAIDPMYVPATGTPVRGGLTLREGLFIVERVAETGNLVALDVVECNPELAAHDLHVVDTVQTGCSIARCALGETLL

SEQ ID NO: 27038 - protein, 1030 aa, Ashbya gossypii ATCC 10895
MLLDFVGNPFDLPNEVDDVKGYVRPLAAVNAAIGEQVDAIFSYKSPLDPDLLDTELKRWSERNGDLSLRELDIRSGTGLVALGFCSDAEQLIGIVTPGYAMGCLARSFEKETDGGSRFLLSVGALEYNEDTGALVCDYIKPLEEATRLGLPVVTPLSWKELRATTLLTAALAKFGKAQGAVHLYDALTYSKSVVKIPEGKKRLKLADFNIPKGSSVEDIVARFNQLYGLDLGNFQYYGDSTAETVFVLNGSVEGDLFASMIQDQTQVGLIAVRIPSPFNGPAFVKIVPESATNIVVIGQCQENNTYSWLKSTISAALFYSNKRNIRVSEYIFHPDFFWSPNAVVQILNEFDYSLKLGSDTESKDFIYWSSDYSSEIDVPARLVHALSLIDGVEVTMRTKFDNFTNAGIFQAQFSVAPVGVHSVVSNIDSSNVTFVEDINILRFIDIAGTVRDNGTIILVSRKSLKGIDLQDQDTLVDQLQLPTTFLDTVRNKRIKLVFLDADAIGEREDTKHKTLSFVYQAVFWRFAYGYDIQSTVRAIWSSAGADIELLAAVIADLITDSFQKGLIEVPVVYKKSNTVADASSDSPSSQLPIFMADTAAAPNPRDQKKYPEFELGNAQIIAKKIAFKEAYGVTSEIRPDLSMNNFIVKVKENRRVTPTDYERYIFHIEFDISGTGLKYEIGDALGIHARNNEESVKSFLHAYRLKEDGIIVLPSKNEAGYLESRTVLQVFVENLDIFGKPSKRFYEGLVEFAEDEAERLKLQHLVSPAGASELKRFQDEEYYTYVDIFDLFPSARPPLDRLIELIAPLKRREYSIASSQRVHPNELHLLIVVVDWVDRRGRKRYGHTSKYLSELMVGTEIVVSVKPSVMKLPASPLQPIIMSGLGTGLAPFKALVEEKAWQKSQGQDIGGVYLFMGSRHKREEYLYGELWEAYKDAGIITHIGAAFSRDQPHKIYIQDRIREVLHELSTALIEKEGTFYLCGPTWPVPDITQVLKDIIAADAASRNIEVDLDAAIEELKETSKYILEVY

SEQ ID NO: 27039 - protein, 798 aa, Ashbya gossypii ATCC 10895
MSSVEELSQLFADVGFEEAKVKEIVKNKKVAHSLEELVREAGARAEWDKGKRALLHTLASSLKGATVTGQNLVAEGIRSGELKTSLQVDAALKYVKRAGEGATVAEMHAESGVGVQVTEDQVQARVVQYLEENRAKIESERYKLVPGIFAQIKALPELKWADPRLFKPIIDREVLKILGPKDERDVVKKEKKKEPKTNDKKKAAVEEAPKRTMFSEGFLGDLHKVGENPQAYPELMVEHLKATGGKVHTRFPPEPNGYLHIGHSKAIMVNFGYAKHHGGVCYLRFDDTNPEAEAPEYFESIERMVAWLGFSPWKITYSSDYFDQLYELAEVLIKNGKGYICHCTAEEIRRGRGIKEDGTPGGERLPCAHRERPIEENLAEFRNMRDGKYAPGEAILRMKQDLSSPSPQMWDLVAYRVLNAPHPRTGSKWRIYPTYDFTHCLVDSLENITHSLCTAEFYLSRESYEWLCDQVHVFRPAQREYGRLNITGTVLSKRKIAKLVHEKYVRGWDDPRLFTLEAIRRRGVPPGAILSFINTLGVTTSTTNIQVVRFESAIRKYLEDTTARLMFVLDPIEVIVDNLPEDYEELVSIPYRPGTPEFGERTVPFSKRFYIERSDFSEDTSDKEFFRLTPAQSVGLIKVPYTIAFKSLERDANGKITRIHAHYENDTPDGKPRKPKTYIQWVPIAPRHGSPIPVAETRVYNQLFTSENPSGDPADINPYSEVIYPSAVVEHNFRHVVSNSPWVVESAKQSEFYVPEEHDRKEVCRFQAMRVGYFTLDKDSTHDRIILNRIVSLKDGSK

SEQ ID NO: 27040 - protein, 318 aa, Ashbya gossypii ATCC 10895
MSSNSIKLLAGNSHPDLAEKVSVRLGVPLSKIGVYHYSNKETSVTIGESIRDEDVYIIQTGTGEQEINDFLMELLIMIHACRSASARKITAVIPNFPYARQDKKDKSRAPITAKLVAKMLETAGCNHVITMDLHASQIQGFFHIPVDNLYAEPNILHYIQHNVDFQNSMLVAPDAGSAKRTSTLSDKLNLNFALIHKERQKANEVSRMVLVGDVADKSCIIVDDMADTCGTLVKATDTLIENGAKEVIAIVTHGIFSGGAREKLRNSKLARIVSTNTVPVDLNLDIYHQIDISAILAEAIRRLHNGESVSYLFNNAVM

SEQ ID NO: 27041 - protein, 1510 aa, Corynebacterium glutamicum
MKPQGLYNPAHEHDACGVAFIADIHGRPSRSIVDRALEALRNIDHRGAAGAEKNTGDGAGILMQIPDGFYREVSGIELPEAGEYATGIAFLPRGRMAMMDAQKEIERIAKQEGADVLGWRMVPFDSRELGSMAEEAMPSFAQIFLTVPGKSGEDLDRVMFFIRKRCERELGTTNGRDTVYFPSLSSRTIIYKGMLTTLQLEGFFEDLGDARLESAIAIVHSRFSTNTFPSWPLAHPYRFVAHNGEINTVRGNENWMRAREALIKNDKLGNLSSVLPICTPEGSDTARFDEALELLHLGGYSLPHAVAMMIPQAWEHNKTLSPELRDFYEYHSCLMEPWDGPAALAFTDGRFVGAVLDRNGLRPGRITITDSGLVVMASESGVLDLREESVVKRTRVQPGRMFLVDTAEGRIVEDEEIKQKLSEAQPYGEWIRDNFVHLDRLPQTRYNYMAHSRAVLRQRVFGITEEDVDLLLLPMARQGAEAIGSMGSDTPIAALSQRPRMLYDFFAQRFAQVTNPPLDSIREKPVTSMFTLLGAQSDVLNPGPDAARRIRLESPIIDNHELATLINANAHGEWDSFGAAVISGLYPVAHHGAGMKAAIARVRREVSEAIRNGKTLIVLSDRESDERMAPIPALLLTSAVHQYLVQQRTRTQCSLVVESGDAREVHHLAMLIGFGADAINPYMAFETIDELRMKGQLGDLSLDEASRNYIKAATTGVLKVMSKMGIATVSSYRGAQLADVTGLHQDLLDNYFGGIASPISGIGLDEVAADVEARHRSAFLPRPEEHAHRELDLGGEYKWRREGEYHLFNPETIFKLQHATRSGSYEIFKDYTRKVDDQSTRLGTIRGLFEFSTDRKPISVSEVEPVSEIVKRFSTGAMSYGSISAEAHEVLAIAMNRLGGMSNSGEGGEDARRFDVEPNGDWKRSAIKQVASGRFGVTSHYLNNCTDIQIKMAQGAKPGEGGQLPPNKVYPWVAEVRITTPGVGLISPPPHHDIYSIEDLAQLIHDLKNANPRARIHVKLVAEQGVGTVAAGVSKAHADVVLISGHDGGTGASPLTSLKHAGGPWELGLAETQQTLLLNGLRDRIRVQCDGQLKTGRDVVIAALLGAEEFGFATAPLVVEGCIMMRVCHLDTCPVGIATQNPDLRSKFTGKAEHVVNFFTFIAQEVREYLAQLGFRSIDEAVGQAQVLRKRSGIPADSRAAHLDLSPIFHRPETPHFPTQDVRCTKTQEHSLEKALDNAFIDKASDTITRAAAGVETSIVIDSSISNVNRSVGTMLGSAVSRVAGAQGLPDGTITLNLQGCAGNSFGAFIPRGITINLTGDANDFVGKGLSGGKIVIKPSAQAPKQLKNNPNIIAGNVLGYGATSGELFIRGQVGERFCVRNSGATAVVEGIGNHGCEYMTGGRVLVLGPVGENFGAGMSGGIAYLANSPDLNQKINGELVDVVPLSADDLTWADELIARHRELTGSETKLRAQDLVKIMPRDFQKVLNIIETAHAEGQDPAIKIMEAVS

SEQ ID NO: 27042 - protein, 157 aa, Nicotiana benthamiana
VRAPCCEKMGLKKGPWTPEEDQILISFIQTNGHGNWRALPKQAGLLRCGKSCRLRWTNYLRPDIKRGNFTKEEEDTIIQLHEMLGNRWSAIAGKLPGRTDNEIKNVWHTHLKKKLKDYKPPQNSKRHSKNHDSKGPTTSRSSNNSDLTTQKHIDSPV

SEQ ID NO: 27043 - protein, 171 aa, Nicotiana benthamiana
DQVYGTSEGEEVGDAETIADGNDERESKRRAIEVQTSEAASSASHRAVAEPRIIVQTTSEVDLLDDGYRWRKYGQKVVKGNPYPRSYYKCTSQGCNVRKHVERAPSDPKSVITTYEGKHNHDVPAARNSSHNTANNSVSQMSPHTPVVDKQDATRRIGFSNNEQQPIALLR

SEQ ID NO: 27044 - protein, 518 aa, Lilium longiflorum
ASHQAMEVQSMPVTPRSGTPRVTPPISAPPSQLHSPSLTRSPLLGPATPRASRLTPLASPIRKAIVSMRGYLEEVGHVTRLDPQDEWLPITQSRNGNSYYSAFHTLSSGIGFQALVVPVAFTFLGWLWGIVLLSVGFCWQLYTLWLLVELHESVPGTRYSRYLHLAKDTFGEKLGKFMALVPIIYLSAGTCSALIIVGGSTMKGFFQIVCGPTCRYMPLTTVEWYLVFVCLAVVLAQLPHLNSIAGVSLIGAVTAVTYCTMIWVISVRKGKIPNISYEAVDTSWDVARVLSILNAIGIIAFAFRGHNLVLEIQGTMPSTQKHPARVPMWRGVKVAYVLIAFCLFPVALIGFWSYGNQIPPNGVLTALNQFHSHDTSRTILGLTTLLVVINCLSSFQIYAMPIFDNMEAGYTSKKNKPCPQWLRSGFRAFFGAVAFLISSAFPFLPQLAGLIGAVALPVTFAYPCFMWIVIKKPERFGVMWWLNWCLGCLGMGLSVVLVVAGVWRLVETGVNISFFDPQ

SEQ ID NO: 27045 - protein, 153 aa, Lilium longiflorum
LKPLKSMDSKFEVDHSLIAKLNQLTEFLANRNQPLRAPFVPDARAMPAAATDIKDMPGAYVFIIDMPGVESEEIKIDVEEGNMLVISGERKREEEEERYLEMQRRMGKMMRKFKLLENANSGAISAVCKNGVLTVTVEKLPSQEPKAIEIKIA

SEQ ID NO: 27046 - protein, 281 aa, Physcomitrella patens
MGRGKIEIKKIENTTSRQVTFSKRRGGLLKKAHELAVLCDAEVALVIFSSTGKHFEFASSGSMRDIIERYRKNSDGAVKRGTNTDLLGREVIKLKQQVERLESSQRHMLGEDLSALKVSDLLELEQQLDQGASRVRARKNQLILEEIEDLRRKEHELMIANEALRKKIADAEGAAEAAARANFPDARLESPKPFASDFSRDMSVSSQLAASVYPHPNLLQAQRSQTSLQLGRLSEQQIPSTEEGCAGESSLKWDHPHFHIPNRLHANISPSVRTYKLHVDR

SEQ ID NO: 27047 - protein, 400 aa, Streptomyces sp. 2065
MNPVYIVDAVRTPIGRYSGGLASVRPDDLAAHALRELLARTPDLDPSRIEDVYFGNANGAGEENRNVGRMAALLAGLPTSVPGVTVNRLCASGLEAVIQAARAIAVGDASIAVAGGVESMTRAPYVLPKSDRPFPAGHTELYSTTLGWRMVNPAMNPEWTIPLGESAELIADKHKISREQQDEFALASHRKAADAQAAGLFDGEIAPVAIPQRKGDPVLFAADESVRADASLAAMAKLKPSFRPENGTVTAGNASPLNDGAAALLLVDEEGLKATGRQPLARVSATGVSAIDPQYFGLAPVEAVNRALTKAGKGFDDLSVLELNEAFAAQVLGCVAEWPEFDSAILNPQGGAIALGHPLGASGARLAGTVAHQLARKGTGVGVATLCIGVGQGLALVLER

SEQ ID NO: 27048 - protein, 390 aa, Hordeum vulgare subsp. vulgare
MQDTSSTQHKSLPNNIIEMDMVTSMPLEANSNGQILQAEAELFCHSFGYLKSMALQSVVKLRIPDVLHRYGGAASLPELLSTVPIHPNKLPYLPRLMKMLAAAGIFTAEDVPATVGDGEPTTLYHLNAVSRLLVDDASVNGGASMSPCVLLGTVPLFLGASLKLHEWLQSEEQATTETPFMLAHGGTLYGIGGRDSEFNTVFNKAMGASSEFVAALAVRECRDVFAGIKSLVDVAGGNGTTARTIAEAFPYVKCSVLDLPQVIQGISSHGTVEFVAGDMMEFVPPAEAVLLKYVLHNWSDQDCVKILTRCREAISHGEKAGKVIIIDTVVGSPSQQILESQVTMDLSMMMLFNGKVREEQNWHKIFLEAGFSHYKIHNVLGMRSLIEVQP

SEQ ID NO: 27049 - protein, 192 aa, Nicotiana attenuata
GNNILVICDAYTPAGEPIPTNKRHKAAQIFSDSKVVSEVPWFGIEQEYTLLQQNVKWPLGWPVGGYPGPQGPYYCGAGADKSFGRDISDAHYKACLYAGINISGTNGEVMPGQWEFQVGPSVGIEAGDHIWCARYILERITEQAGVVLSLDPKPIEGDWNGAGCHTNYSTLSMREEGGFEVIKKAILNLSLR

SEQ ID NO: 27050 - protein, 608 aa, Aspergillus fumigatus
MAPAVGIDLGTTYSCVGVFRDDRIEIIANDQGNRTTPSFVAFTDTERLIGDAAKNQVAMNPHNTVFDAKRLIGRRFQDAEVQSDMKHWPFKVVEKGGKPIIEVEFKGETKQFTPEEISSMVLTKMRETAEAYLGGTVNNAVITVPAYFNDSQRQATKDAGLIAGLNVLRIINEPTAAAIAYGLDKKAEGERNVLIFDLGGGTFDVSLLTIEEGIFEVKATAGDTHLGGEDFDNRLVNHFVNEFKRKHKKDLTTNARALRRLRTACERAKRTLSSAAQTSIEIDSLFEGIDFYTSITRARFEELCQDLFRSTMEPVERVLRDAKLDKSSVHEIVLVGGSTRIPKIQRLVADFFNKEANKSINPDEAVAYGAAVQAAILSGDTSSKSTNEILLLDVAPLSLGIETAGGVMTPLIKRNTTIPTKKSETFSTYSDNQPGVLIQVYEGERARTKDNNLLGKFELTGIPPAPRGVPQIEVTFDVDANGIMNVSAVEKGTGKTNKITITNDKGRLSKEEIERMLADAEKYKEEDEAEAARIQAKNGLESYAYSLKNTISEGKLNISDADKEKVSSKVEEIISWLDNNQTATKDEYESQQKELERYVSFLSLLMFT

SEQ ID NO: 27051 - protein, 213 aa, Triticum monococcum
MSMSCGLCGANNCPRLMVSPIHHHHHHHQEHQLCEYQFFAHGNHHHHHHGSAADYPVPPPPDNFDHRRTWTRPFHETAAAGNSSRLTLEVGAGGQHMAHLVQPPARAHIVPFHGGAFTNTISNEAIMTIDTEMMVGPAHYPTMQERAAKVMRYREKRKRRRYDKQIRYESRKAYAELRPWVNGRFVKVPEAMASPSSPASPYDPSKLHLGWFR

SEQ ID NO: 27052 - protein, 212 aa, Triticum monococcum
MSMSCGLCGASDCPHHMISPVLQHQEQHWLREYQFFTQGHHHHHHGAAADYPPPPPPSANCHHCRSWTTPFHETAAAGNSSRLTLEVDAGGQNMAHLLQPPARPRTTIVPFCGAAFTSTISNATIMTIDTEMMVGAAHNLTMQEREAKVMRYREKRKRRCYDKQIRYESRKAYAELRPRVNGCFVKVPEAAASSSPPASPYDPSKLHLGWFQ

SEQ ID NO: 27053 - protein, 408 aa, Methanococcus maripaludis S2
MATADLFADPTNIVTGLSTLATSGDVMFLVLMGVLVFSMQLGFALLEGGQVRKKNVNNVMMKNMADWLIGAVSWLFIGGVLSVSLVPADFFSWWGQIFTTNFANNGIDLANWFFGLVFAATAATIVSGGVAERIKFKSYLLMSIIITAILYPLFVYLGPWGSGMIPFNDYAGSFVVHGLGGFLALGAIAALGPRIGKFVNKKAISIPGHNIPMSVFGAFVLAIGWYGFNVGSSFAVADISGLVCATTTLAMAGGGIGALLASKDDVLFTANGIVAGLVAICSGTDVVSPIGALIIGLVAGIQVPIVYKIVEKMGLDDVCGVIPVHGTAGILGGILTGVFGMAALGGAGGVSLVNQLIAAGLTVVYGTGLGFGLGKLVGGFTGGLRVTEEEEKMGLDLAEHKLPAYPDE

SEQ ID NO: 27054 - protein, 411 aa, Methanococcus maripaludis S2
MVTADLFNNPTNIMDALNTLANSSDVMFLIFTGAFIFIMHLGFAMLEGGQVREKNVNNAMMKNMGDWIIGCISWLLVGSVIARTLNPADFFIWWGKIASATPFLTNNGLELANWFLGLVFAATAATIVAGGIAERIKFKSYILISIVITALLYPFFSYLGPWGAGVIPFHDYAGSLMVHGVGGFLALGLIAAIGPRFGRFVNKKAITIPGHNIPMSILGAYILAFGWYGFNVGSSLALSDISGLVCATTTLAMAGGGLGGCLFSKNDVLYTANGLLAGTVAICAGTDIVSPLGALIIGFIAGSQVPLIFKIVEKMGLDDVCGVIPVHATSGALGAILAGIFGMTAFGGVGGVSLTEQIIATLICAVYGTGAGFILGKLVGAVTGGLRVKESEEKAGLDISIHKLPAYPKEN

SEQ ID NO: 27055 - protein, 397 aa, Methanococcus maripaludis S2
MQEKIAVLAYSGGLDTSCCLKLLEDKYDYKVISVAVDVGQPEDDLKEPEEKAKKFGVLKHYTIDAKEEFAKDYIFRAIKANALYEGYPLSTALARPLIAIKIAELAQEVGASAISHGCTGKGNDQFRFESVMRAKTPEIEIVAPIRDLNLTRTEEIAYAKEKGIPVPVDLEKPFSIDENLWGRSIEGGILEDPMTETPKECFAWTVDPTDAQDKEEYVEIDFEEGVPVAINGDALEAVSLIRKVNEIAGRNGVGRVDIVEDRVLGLKSRENYECPGAMLLITAHKALEQLVLTREELVFKEMVDSKYADLVYKGLWHEPLRLDLDAFIDKTQTRMNGKVVLKLYKGSMRIAGRESKDAIYNEEMVSFENKEMDQREIVGMVKFHGLQAAIYEGLTRK

SEQ ID NO: 27056 - protein, 510 aa, Methanococcus maripaludis S2
MIPSTVPPKYKVFVDPERCMLCERCTTECSWGVYRRQGNKILTYPNRCGACLRCVSLCPRDAITVTLNQSCGREHPVWTPEVKQDVVTQAKSGCILLSGMGNAKEYPIYFDKIVLDACQVTNPSIDPLREPMELRTYVGKKPEKLEFDYVEDEIDGKKVKKAKLKTKIAPNLKLDTPIMIGHMSYGALSLNAHKAMAKAVKECGTFMGTGEGGLHRDLYGYSDNVITQVASGRFGVNSEYLNKGAAIEIKIGQGAKPGIGGHLPGEKVSAEVSMTRMIPQGSDAISPAPHHDIYSIEDLAQLIRSLKEATRWKMPVFVKISAVHNVSAIANGIATSDADAVVIDGFKGGTGAAPKVFRDNVGIPIEVAIAAVDDRLREQGNRHKISIIASGGIRNSADVFKSIALGADAVYIGTAAMVAMGCTVCGRCYTGQCAWGIATQKPELVKRLEVDDAARRVANLIHAWTHEIQELLGAAGINSIESLRGNRDRLRGVGLSEIELNTLGIKQAGM

SEQ ID NO: 27057 - protein, 348 aa, Methanococcus maripaludis S2
MKIIQEIPERNIIKLIPENLDDLWHLSHIIQPYNAIYAVTERRTEDKGDKLRADRGTKRRVFLGIKAEKINFHEDFNRLRVSGKIIHAPDDIPIGSYHTIDIEPFLQVSVQKNWKKWDIERLKEAEDSSKKPKVVVVIMDDSEADIFLVREFGIKELASIKSGVSKKLDYKQNEQAKFSYYSDIINSISEFEGKILFAGPGFGRNNIQNYISEKYKSLAPNVVVESANHTGKSGLSEILKSGIIDKIYGEARISKETQVVEKLLEEISKKGLAAYGIESVNNAMNFSAIDTLLLTDEYLRRNRRSVENLMNSVENINGNIIIVSTEHDAGKQLKALGGISALLRFPIE

SEQ ID NO: 27058 - protein, 501 aa, Methanococcus maripaludis S2
MKYLDFIIDFFENKGVKSVFAYPGEQILPIYRALHENSKINCIDVKHEQASAHAADGYFRITNEVGICLATAGPGATNLTTGIATAFKDSSSVLALTGRCSTNYIGKNYFQEIPMDFLNFEKGYFIENPNYKYLINSYNESYNLKKPISVNIPADIYNQDVNELETDFNDKNTESIENAVSTIKKYKDAKNPVLLMGQGIYGNLKYSEMVEIGEILKKLQIPIITTYPARGVVDENFENAYAMVGRRGSLNSNKLILKSDAVFSIGASLSYNTLPESIRDKILYNVIPLNLGINSTNDIKTIVNTFNENVSSGHVKPSGQNLSRNEFKFGDYSTKIHEILENLPKDTIITTDAGNHTVFVSLLKKCVAPRNIISSHSMGTMGFGLPASIGVKFGCNDYNINREVVSISGDGGFQMNIQELGTVAENNLKILIVVMKNNHLNMFGKINTPDFNKIADAYGIENVYIQNSDEIGENVAYFLKKSIPYVMVVECENEKLPKPFI

SEQ ID NO: 27059 - protein, 788 aa, Methanococcus maripaludis S2
MVDLMVAEAYQGDVGKGIVRIDPLTMEKLSLKAGDAIEIAGKEKTYATVWRGYLEDQGKGIIRMDGILRQNTKAGIGDKVKITVVEVKEAKKITLAPMQAVRFSTGFESYVGSRLVEQVVDKGSKVVIGVLGTAFPFIVTGTTPKGPVKINEYTQIELKTEPVTELKETKVPNVTYEDIGGLKEEVKKIREMVELPMRYPELFDKLGIEPPKGVLLAGPPGTGKTLLAKAVANEAGANFYTINGPEIMSKYVGETEENLRKIFEEAEENSPSIIFIDEIDAVAPKRDEASGEVERRMVAQLLTLMDGLESRGQLVILAATNRPDSIDMALRRPGRLDREITIGIPDRHGRNEILQIHTRNMPLQPDYEKSDVISILNELVGEYDRSKIESLVKLVEKASSEEEIEKILKDGEVEDKVKVKLNQLMVKELADKTHGFAGADLAALSKEAAMKTLRRFLPDIDLEKEEIPREVLDKIKVTKEDFVGGLKEVEPSALREVLVEVPNIKWSDVGGLEDIKQDLKEAVEWPIKNKEMFERMGIRPPKGVLLFGPPGTGKTLLAKAVANESEANFISVKGPEIFSKWVGESEKAIREIFRKARQAAPTVIFFDEIDSVAPKRGMDFGSSGVTEKVVNQLLTELDGLEEPKDVVIIAATNRPDILDQALLRPGRLDRIVLVPIPNETARLEIFKVHTKGMPIGKDVNLEKLAKETKGYTGADIEAVCREAAMIALRENINSEHVESRHFDGAFKRIAPSVKDDDMDEYKDLAKEYGQNAGVSEIEKGPENTGYHG

SEQ ID NO: 27060 - protein, 489 aa, Methanococcus maripaludis S2
MWHYVFLAVYVAMIIGIATVTKKRIKGVSDFLLGGRNVNPWMSAFSYGTAYFSAVIFIGFAGKMGWSFGIPTMWIVVGNTIIGSFLAWQVLGKKTREMTQRLGASTMPSFLEKRYKSKNLESLTAFIIFFFLVPYSASIYKGLNFLFEGFGISPMNAYILMAALTAIYLYFGGFIAATLADFVQGCIMVIGVLLMVFFLGSNPEVGGFSGMLSNLSSIDPMLVTPINEASFIPIMGLALLTSIGSWGLPQMIHKFYTIKSEKAAVSAKWVSTAFAFIITFGAAYIGTVSRLFYPDAASKAAAGLTSPDMIVPKIMEIALPDWVAALILVLVISASMSTLASLVLASSSVVSIDFVKGRLKTDLSDKNTMILMRLLCVLFVVLSFILAIVPNSYVLSLMALSWGLVSGCLLAPYFLGLYWKRTTKEGVWAGITSALAIMLGGAYYFGINSVYMPAVGSLAMIAPIFVVMAVSLITKPFEREHIDYIFNKK

SEQ ID NO: 27061 - protein, 492 aa, Methanococcus maripaludis S2
MISENLSIVLVFILYLLVVMGVGMYFYRRNETISDYVLGGRKLNSWVAALSAQASDMSGWLLMGLPGVAYLSGMSEIWIGVGLAIGTYLNWKFVAERLRRYTEIAKDSITIPVYLENRFRDQSKLLRIVSAFFIMLFFLLYTSSGLVAGGKLFNLVFGVDYTLAVTIGALVIIGYTFLGGFLAVSWTDFIQGSLMFIAIFLIPIMGISQVGGIDATMNAWNSISPDYLNPFTNLDGESLGIMGLASALAWGLGYFGMPHILVRFMAIKSADKVPKARKIATTWVVISLFMAVLVGMVGAVALGAPLDDPEHVFMAMAQGLFPSLIAGLFLAGVLAAIMSTADSQLLVTASAITEDIYALLNKNASQKELLWISRFAVIVVAAIAYYFAIVPGSSVMGLVSYAWAGFGGAFGPVILLSLYWKRMTRNGALAGLLSGGFMVILWKNLSGGIFDLYEIVPAFLLASVMITVVSLMDKEPSLEIQEEFDRAVSEMK

SEQ ID NO: 27062 - protein, 494 aa, Methanococcus maripaludis S2
MAKYRCNVCNVFEYDESRGDSVTNIKPGTKIKDFPNNWKCPICGSDSTHLIQIAETNISKKLKGTFECPECKSKSEIEISMPIKMDSSYLGEWKREYDDMEEHMFDIHKISVTGESIIEPMRTKKPVISWESIFIKGAQLAKFPLNNDEEVITKTIIGPKAKHPLIIETPIFITHMSYGALSKNVKIALSKGSAAVKTAMCSGEGGMLEESFENAYKYILEYVPNQYSITDENLKKVDAVEIKIGQSSKPGMGGHLPAEKVSEEIAKLRGFKVGQDIVSPSKFHDINNKDDLKNKVSNLREKSGGKPIGIKIAAGDIEADLEVATYAKPDFITIDGRPGATAASPKFIKDSTSVPTIFALYRAREFFNKNGITDISLVITGGLRISSDFAKAIAIGADAIAIGTAALMATACQQYRICDTGECPVGVTTQKPELKDRLKIELSAKKLSNYLRVSTEELKTFARLTGNKNIHDLSVDDLCTSDSEISNFTSIKHV

SEQ ID NO: 27063 - protein, 552 aa, Methanococcus maripaludis S2
MKINNNLNYENLKNDLFAGFTIAIVALPLAMAFAIASGVSPEKGLFTAIIAGFLISVFGGSKYQIGGPTGAFVVILYGIIASYGYEGLVIATLMAGVILIIMGLLKLGNIIKFIPYPVTMGFTSGIALIIFSTQVKDFFGLSITNVPATFLGQWITYATNIQLLNPYALLISILSLVILTKSKKVFSKIPSPIIAIIVGIVLVYAFNLPVETIESKFGQIPNSIPFPSLPELNFQKMELLFPSALSIAFLGAIESLMCAVVADGMTGYKHNSNKELIGQGIANIGSVLFGGIPATGALARTATNIKAGATSRLSGIIHSVMLFLFMLLLSPLILKIPLATLSAILVVVAWNMAEVKHFKSILFKSPKRDRIVLLVTFLLTIFVNLNTAIQIGMLLAVIVFMQRLIEVSEISNLKTVPQEEDPDSITLKDVPPCIEVYEINGPFFFGIADKFKSTLNVVAKRKPSAIILRMRNVPIIDSTGIKNLEEFIESSKIQNISLIISGADYKLRAKFEKYGLTDKIGNENICENIDLALVRAREIIKIKHPETGLCPK

SEQ ID NO: 27064 - protein, 587 aa, Methanococcus maripaludis S2
MKGAEAMMKALEAENVKVLFGYPGGQLLPFYDALYQSDLLHILTRHEQAAAHAADGYARASGDVGVCVATSGPGATNLVTGVATAHADSSPVVALTGQVPTKLIGNDAFQEIDALGIFMPITKHNFQIQKTSEIPKIFRKAFEIAKTGRPGAVHVDLPKDVQDDDLDLEKYPIPAEINLQGYKPTKFGHPLQIKKAAELMKIAQRPVIIAGGGVQIANATPELIKLSEYAQIPVCTTLMGKGVFPEEHPLSLGMVGMHGTQASNYSVYESDVLIAIGCRFSDRITGDLSSFAPNTKVIHIDIDPAEIGKNVGVDIPIVGDAKAILKDILIHLMKKEMVNKTEWMENVKKLQKKSMPVMEFDNTPIKPQKVIKEMMAALREVDPGLTNTVLTTDVGQNQMWMAHYFQTSAPKSFLSSGGQGTMGFGFPAAIGAKFARPDANVIAVTGDGGFLMNSQELATIAEYEIPVIVVIFDNRTLGMVYQWQNLYYGKRQCAVHLGETPDFLKLAESYGIGALRVEKPEDINEAFKTALNSGKPYLLDIIIDPSEALHMVPPGGNMTNILFPDRQEPTPKAQCFSEMKKILSPKV

SEQ ID NO: 27065 - protein, 306 aa, Methanococcus maripaludis S2
MHRKAKPFLKWAGGKRRLLTQFEDHYPEGLKNGKIKKYVEPFLGGGAVYLSLQSKYKFKKVVLNDINHELMLSYKTVQNNIDELISILKPIEENFNKMNFESQKMQYYKIRNEYNIEKSNIDKNKSENIIENVARFIFLNKTCFNGLYRLNKKGMFNVPFGRYLRPRIFDEPTLRGVNKALKGVKLLCDDYKNVEKHISIDEETFVYIDPPYRPLPETVSFTSYSKEDFLEKDQVGLSNWFKYLDKKGAYLMLSNSDPTNTNPKDRFFEEHYGGFKIDKVCAGRIINSRVNGRRKITELVIKNYPK

SEQ ID NO: 27066 - protein, 513 aa, Methanococcus maripaludis S2
MCSISGIIAKDEEGSGSRSLLKNIQKHVINMMKILKHRGPDYSGMMFDDEVLYFENFDDITENTETISRMAMGHNRLAIVGTAVQPIPNTDESIWIICNGEIYNHVELRDELSVDHEFKTDTDSEAIIHTYEDELVDVLDGDYAYAIYDKEKNIIELRRDLMGVKPLYYIDTDEYFAFASEKKALYGLLMEINEMDYKSAFNYDISRLNPNSRLIYELDENSWYIEEDLEKVNPDYFEENDYELCKNELETTILDSVLKRVKGLERVGIIYSGGVDSTLVSKLASENCDVTLYSVGSANSEDLIYAERAAKDMGLKFRKKIILEDEFEEYVIKVAKAIDELDVMKLSVGIPIFAASEMAKEDGIKVVLSGQGADELFAGYNRYQRILNEKGEEGLKKSIISDVFDIHKVNLERDDHCTMANGVELRVPFLDKFVIDVGLSIPVEYKIEEPRKKILRDIASKYVPDYIAQRPKKAAQYGSGSEKMVYAVAKKHGYSKKEINKFFEEYLIEKIKF

SEQ ID NO: 27067 - protein, 555 aa, Methanococcus maripaludis S2
MKDTVMTYLLENSIKFKGKPNPKAAMGKILGENPDLRSKVKEVNQVISEVLKEIETMSLEEQQAKLDELAPEGLGQKTERKRKEIELKNVKGNVVMRFAPNPSGPLHIGHARASVLNDFFSKKYNGKLVLRLEDTDAKRVLPEAYEMIQEDLKWLGVKVDEVIVQSERLETYYEYGRKLIEMGHAYVCDCDADEFRTLREQGLPCKCRDTTPEENIALWEKMLAGELDNVAVRLKTDIAHKNPSIRDFPIFRIERTPHPKNGTKYHVYPLMNLSVTVDDHLLGMTHVLRGKDHIVNTEKQEYIYNYFGWEIPEYVHYGILKIEGPVLSTSKMHAGILSGEYSGWDDARLGTLRALRKRGIRPEALYKLMVEIGIKQADVRFAWENLYAANKDIIDKDARRFFFVESPKKLVISGAENRKIDLRMHPDRSELGNRELLFDGEIYVSDDLEAGKMYRLMELFNIVVEKVENDIIYAKYDSDDFKVAKTNKASIIHWIPVKDSIPVTVIDENAEKIEGFAEKDFAVVKEDDFVQFERFGFVRIDEKLDNKYTCYLTHK

SEQ ID NO: 27068 - protein, 468 aa, Methanococcus maripaludis S2
MVTVMKFGGTSVGNGDRIRNVAKIVVNKTNEDNDVVVVTSAMTQVTNSLVEISAQALDVRDIAKINNFIEDLRRKHEIAIEQAIENHEIRVEVSKTIESSINELEKVLVGVSYLGELTPKSKDFILSFGERLSAPILSGAIRDMGKHSLYLAGRDAGIITDDNFTCAKVLRLEVSEKIKPLLKDGFIPIVTGFVAGTEEGHITTLGRGGSDYSAALVGLGLTADMVEIWTDVSGVLSADPRMVENVKQIPKMSYIEAMELAYFGAKVLHPRTMEPVMEKKIPLRIKNTFEPENEGTLITDSSETSNGIIKAITTIKDVILINIFGGGMVGVSGTAARIFNVLGKSNANVILITQGSSETNISIVIYDGELEAKKCVRELRDEFGECHLIKDITFDKEVCVVSVVGSGMKGAKGIAGKLFEAVSESGANIKMIAQGSSETNISFVINEDKLEPCLKTLHKTFVEDEINF

SEQ ID NO: 27069 - protein, 375 aa, Methanococcus maripaludis S2
MIAERCLGTEQSEIRKIFNMATENSINLGIGEPDFDTPKNIVEAAKLALDAGKTHYVPNAGILELTSAISEKLKKDNNLDISQKNIVTTCGASEALMLSLFTLVNRGEEVLVPDPGFVSYKGLTELCEGKMVPIDLDDKFRIDLESVKNSITDKTKCIVLNSPSNPTGSVMTKEELKGICEIADEKNICVISDEIYEKIIYGKKHYSAMEFTDNCILINGFSKAYSMTGWRVGYLAVNENFDNKYQILENMMKIHQYGFACATSFAQFGAVEALKGDQNCVSEMVSEFERRRDLIYSGMKDIFSVQKPEGAFYIFPDVSEYGNGMDVATKLIQNRILCVPGSAFGKNGENSVRFSYATKYEDIKRALEIMKNVLL

SEQ ID NO: 27070 - protein, 248 aa, Methanococcus maripaludis S2
MLQIEDLSVKVGDKEILKDIHLYIEKGESHVLFGPNGAGKSTLLNTILGNPKYEVVRGNIYFKGKDITDMPMHERAQLGIGISYQSPPAISGVRLETMINAISKRSDEEMEEMAKRLNIRHFYQRDLNVGFSGGEVKRSELLQIFAQNPDLVMFDEPDSGVDVENVELLGGIINHLLDKDRKPSERNKSGLIITHLGYILNFMEVDKAHVLLDGVIACSGTPDEILNEIIKNGYQRCVSCCQKKSCNK

SEQ ID NO: 27071 - protein, 274 aa, Methanococcus maripaludis S2
MDVNPPDKMVELAGNAGQVKGNLSPSQLLVRGVMGGAYIAMGGGLATVVGTGIGAAMGAGLGKFMAAAVFPVGLILIILTGMELVTGDMMLLPVAVFQRKASYAQLIKVWIYVYIGNLIGSLIYASMMAFGPLRSFDSATGEAAVNAFGQSAINTAQAKVLPYMAAGSMGWLAALVKGIGCNWLVNLAVIGSMASTSILGKFFMIWFPIMAFVATGFEHCVANMYFIPTGMMLGATVSVADWWLWNIIPVTIGNIIGAVVFVAMIYQFAYGKKI

SEQ ID NO: 27072 - protein, 215 aa, Methanococcus maripaludis S2
MKFFLDTANVEKIKEFNALGLVDGVTTNPSLIKKEGRDFYEVIKEICSIVDGPVSAEVIALDSEGMVKEARELVKLAENVVVKIPMTKEGMKAVNILSKEGIKTNVTLIFSANQALLAAKAGASYVSPFVGRLDDVGQDGMFLISEVMQVFGAYGIETEVIVASVRHPIHVLESAKMGADIATIPFDVLDKLFNHPLTDNGIAKFLSDWEAHMNR

SEQ ID NO: 27073 - protein, 434 aa, Methanococcus maripaludis S2
MRTDIVSSGVGELSYEIREIVKVAKKAESSGLEVVWENIGDPIAKGEKLPLWIKEIVSETTMDDSSYGYCPTRGLLETREFLTDLNNSRNGAQITPDEIVFFNGLGDAITNIYGLMRKECRVIGPTPAYSTHSSAEGLYSNCRPVMYELDKDDGWNPDIDDLRNKVKYNPSIASILLINPGNPTGAVYSKKILSEVVDIANEYDLFILADEIYSNLVYNGKKHNYLSEVLDDVPGISLKGISKDLPWPGSRCGWTEFYNTQSDELFKKYTENICKFKMIEVCSTTLPQKVIPKIMSDKRYNKYLEERKSYYETASKYAYNKMKNIDGLNVNRTDGAFYNTIVLEKEYLNENQSLKIQDSELKNYVESISKGIPEDKRFVYYLLASTGICGVPLTSFCSEHNGMRFTLLERDEEKRNWVFETIAEKVEEYFNSSN

SEQ ID NO: 27074 - protein, 373 aa, Methanococcus maripaludis S2
MLIGVPKEIKNNENRVAITPAGVEAFVLAGHKVYIEKGAGLGSAITDEEYVAAGAEILATAKEVFDTAEMIIKVKEPLKSEFELFKEGQILFTYLHLAPEPQLTKALLDKKITGIAYETVQLADRSLPLLTPMSEIAGRMSIQLGAQYLEKQEGGKGVLLGGVPGVEPAEVVIVGGGIVGTNAAKIAVGMGAKVTILDVNTRRLAYLDDIFGNKVTTLMSNSFNIAKAVKKADLLVGCVLIPGAKAPKLVSEEMVKSMQPGSVIVDVAIDQGGSIETIDRITTHDNPTYEKFGVIHYAVANIPGAVARTSTYALTNDTLPYALQIANKGYKQAVIENPALLKGLNTLNGKVTYEAVAKAHDLPYTPAEKALNE

SEQ ID NO: 27075 - protein, 282 aa, Methanococcus maripaludis S2
MYFEDYSKFLTAYDTFNDADFVIFGIPFDATTSYKPGARFGPDEVRNASWGLETFSPILKKDLIDVKICDKYNLLMEGNQSEIINRAYSASKDILEAKKIPVMIGGEHSVTYPVVKAVKSVYDDFAVIHFDAHCDLREEYMGNEQSHASVIRRTYDLTKDIFQFGIRSGDQDEWEFGWENTNISMEMPTKDDIKKIKELEKPIYVTIDIDVLDPAFVPGTGTPEPCGFTPKELINSLYLLEEIKEKIVGFDVVEVSPHYDIGKITSVTAAKIIRELILTISK

SEQ ID NO: 27076 - protein, 523 aa, Methanococcus maripaludis S2
MSKILITDPLHESAVEILKQAGEVEVATGLTVEELKLKIKDVDALVIRSGTTATREIIEASENLKVIARAGVGVDNVDLDAATEKGIVVVNAPDASSISVAELLFGMMLAAARNIPQATASIKSGKWDRKSFKGMEIYGKTLGIVGLGRIGQQVAKRAQAFGMTIVAYDPYIPEDVASELGIKLLTVDELCTVSDFITLHVPLTPKTKHMIGKEQIALMKSNMVIMNCARGGLIDEAALYDALNSGKIKAAALDVFEQEPPKESPLLTLNNLIGTPHQGASTEEAQLSAGTIVAEQTVKILKGESAENVVNLPMVPTEKMKKLKPYMVLAEKMGSMAIQYLDNSIELLEITYMGGLAKEKTEILKRSFLKGILAPILLAGVNLVNAPVIAKSRNIKIAEGTMSESDYGNSIKISAKGENDEISIIGSIEHNEVVFREINGYRMDIKPEGTICIIKHIDRPGMVGKVGVLLGEHGINIAGMQVGRREPGGHSIMFLDIDHMISDEVLDEIRKMENVRAAKSINI

SEQ ID NO: 27077 - protein, 533 aa, Methanococcus maripaludis S2
MNILLLNVIVLIYLLVIGYLGYKGWKGTSSAEDYMVGGRKIHPFVMAMSYGATFISTAAIVGFGGFSGLFGMSLLWLTFLNIFLGIFIAFVFFGKRTRKMGHNLNALTFPELLAKRFESKFIQWFSGLLIFCAMPIYAAAVLIGAARFIETTLNISFDVALLVFSIIIAVYVVMGGLKGVMYTDAFQGTIMFFGMLFLLYMTYDILGGVTTAHQAISNMSGLVPANLASVGHAGWTSMPTFGSPMWWTIVSSIILGVGIGVLAQPQLIVRFMTVKSNRELNRAVLIGAVFILIATGTAYVVGTLSNVYFMNTEGVLSIGATVSEAFPTGNSDSIMPLYINKAMPEWFIYIFLVSLLAAAMSTISSQFHAQGTSIGRDVYETICGKKGLNSVIITRLGIIVAIVIAAILGYILPGGIVARGTALFFGLCSAAFLPAYALGLFWKRTTKEGAIAGLLTGTFVSLFCLVFIHQAESAALGISKMLIGRDVLISAMPWPYVDPMVISLPLAFIATVIVSLLTKAPSKEHLKKCFKGI

SEQ ID NO: 27078 - protein, 213 aa, Triticum monococcum
MSMSCGLCGANNCPRLMVSPIHHHHHHHQEHQLCEYQFFAHGNHHHHHHGSAADYPVPPPPDNFDHRRTWTRPFHETAAAGNSSRLTLEVGAGGQHMAHLVQPPARAHIVPFYGGAFTNTISNEAIMTIDTEMMVGPAHYPTMQERAAKVMRYREKRKRRRYDKQIRYESRKAYAELRPRVNGRFVKVPEAMASPSSPASPYDPSKLHLGWFR

SEQ ID NO: 27079 - protein, 212 aa, Triticum monococcum
MSMSCGSCGANNCPRLMVSPIHHHHHHHQEHQLCEYQFFAHGNHHHHHGSAADYPVPPPPDNFDHRRTWTRPFHETAAAGNSSRLTLEVGAGGQHMAHLVQPPARAHIVPFHGGAFTNTISNEAIMTIDTEMMVGPAHYPTMQERAAKVMRYREKRKRRRYDKQIRYESRKAYAELRPRVNGRFVKVPEAMASPSSPASPYDPSKLHLGWFR

SEQ ID NO: 27080 - protein, 213 aa, Triticum monococcum
MSMSCGLCGANNCPRLMVSPIHHHHHHHQEHQLCEYQFFAHGNHHHHHHGSAADYPVPPPPDNFDHRRTWTRPFHETAAAGNSSRLTLEVGAGGQHMAHLVQPPARAHIVPFHGGAFTNTISNEAIMTIDTEMMVGPAHYPTMQERAAKVMRYREKRKRRRYDKQIRYESRKAYAELRPRVNGRFVKVPEAMASPSSPASPYDPSKLHLGWFR

SEQ ID NO: 27081 - protein, 213 aa, Triticum monococcum
MSMSCGLCGANNCPRLMVSPIHHHHHHHQKHQLCEYQFFAHGNHHHHHHGSAADYPVPPPPDNFDHRRTWTRPFHETAAAGNSSRLTLEVGAGGQHMAHLVQPPARAHIVPFHGGAFTNTISNEAIMTIDTEMMVGPAHYPTMQERAAKVMRYREKRKRRRYDKQIRYESRKAYAELRPRVNGRFVKVPEAMASPSSPASPYDPSKLHLGWFR

SEQ ID NO: 27082 - protein, 213 aa, Hordeum vulgare
MSMSCGLCGASNCAYHMMSPVLLHHHHHQEHPLHEYQFFAQGHHHHHSAAADYPPPPPPPDNCHHHRSWTTPFHETAAPENSTRLTREVDAGGQHMAHLLQPPAPPRATIVPFCESAFASTISNATIMTIDTEMMVGPAYNPTMQEREAKVMRYREKRKRRRYDKQIRYESRKAYAELRPRVNGRFAKVPEAVVSPSPPTSPHDPSKLHLGWF

SEQ ID NO: 27083 - protein, 214 aa, Hordeum vulgare
MSMACGLCGASNCPYHMMSPVLLHHHHHQEHRQREYQFFAQGHHHHHHGAAADYPPPQPPPANCHHRRSWATLFHETAAPVNSTRLTQEVDAGGQQMAHLLQPPAPPRATIVPFRRSAFTNTISNATIMTIDTEMMAGTAYSPTMQEREAKVMRYREKRKKRRYDKQIRYESRKAYAELRPRVNGRFVKVPEAAASPSPPASPHDPSELHLGWF

SEQ ID NO: 27084 - protein, 206 aa, Triticum turgidum
MSMSCGLCGANNCPRLMVSPIHHRHHHHQEHQLRQHQFFAQGNHHHHHPVPLPPANFDHSRTWTTPFHETAAAGNSSRLTLEVGAGGRPMAHLVQPPARAHIVPFYGGAFTNTISNEAIMTIDTEMMVGPAHYPTMQERAAKVMRYREKRKRRRYDKQIRYESRKAYAELRPRVNGCFVKVPEAMASPSSPASPYDPSKLHLGWFR

SEQ ID NO: 27085 - protein, 212 aa, Triticum turgidum
MPMSCGLCGASDCPHHMISPVLQHQEQHRLREYQFFTQGHHHHHHDAAADYPPPPPPSANCHHCRSWTTPFHETAAAGNSSRLTLEVDAGGQNMAHLLQPPARPRTTIVPFCGAAFTSTISNATIMTIDTEMMVGAAHNLTMQEREAKVMRYREKRKRRCYDKQIRYESRKAYAELRPRVNGRFVKVPEAAASSSPPASPYDPSKLHLGWFR

SEQ ID NO: 27086 - protein, 573 aa, Arabidopsis thaliana
MANSLTIDPNFNVSWNFPSNPSFNYLIRLHFCDIVSKSLNDLYFNVYINGKTAISGLDLSTVAGNLAAPYYKDIVVNATLMGPELQVQIGPMGEDTGTKNAILNGVEVLKMSNSVNSLDGEFGVDGRTTGMGKHGMVATAGFVMMFGAFIGLGAMVYKWKKRPQDWQKRNSFSSWLLPIHAGDSTFMTSKGGSQKSNFYNSTLGLGRYFSLSELQEATKNFEASQIIGVGGFGNVYIGTLDDGTKVAVKRGNPQSEQGITEFQTEIQMLSKLRHRHLVSLIGYCDENSEMILVYEFMSNGPFRDHLYGKNLAPLTWKQRLEICIGSARGLHYLHTGTAQGIIHRDVKSTNILLDEALVAKVADFGLSKDVAFGQNHVSTAVKGSFGYLDPEYFRRQQLTDKSDVYSFGVVLLEALCARPAINPQLPREQVNLAEWAMQWKRKGLLEKIIDPHLAGTINPESMKKFAEAAEKCLEDYGVDRPTMGDVLWNLEYALQLQEAFTQGKAEETENAKPDVVTPGSVPVSDPSPITPSVTTNEAATVPVPAKVEENSGTAVDEHSGTAMFTQFANLNGR

SEQ ID NO: 27087 - protein, 585 aa, Yersinia pestis biovar Microtus str. 91001
MFAVTNGCFRAGLVGLYAVMFVAFALRNRTMSEAEARPSNFIRQIIDEDLASGKHTSVHTRFPPEPNGYLHIGHAKSICLNFGIAEDYQGQCNLRFDDTNPVKEDVEFVESIKRDVEWLGFTWSGDVRYSSDYFDQLYQYAVELINKGLAYVDELTPEQMREYRGTLTAPGKNSPYRDRSVEENLALFEKMRAGGFAEGTACLRAKIDMASPFIVMRDPVLYRIKFAEHHQSGNKWCIYPMYDFTHCISDALEGITHSLCTLEFQDNRRLYDWVLDNISIDCHPRQYEFSRLNLEYTIMSKRKLNQLVTEKVVEGWDDPRMPTISGLRRRGYTAASIREFCRRIGVTKQDNNVEMMSLESCIRDDLNEHAPRAMAVLDPIKVVIENRAAGEEWLTMPNHPNNPEMGSRQVPFDSEIYIDRADFREEANKQYKRLVLGKEVRLRNAYVIKAERVEKDAEGNVTTLYCSYDAETLNKDPADGRKVKGVIHWVSVAHALPAEIRLYDRLFNVPNPAAAEDFLSTINPESLVIRQGFVEPSLADAVSDKTYQFEREGYFCADSRYSRPGALVFNRTVGLRDTWAAKATQ

SEQ ID NO: 27088 - protein, 265 aa, Yersinia pestis biovar Microtus str. 91001
MKPMLFSNKNILIRITLSILYSSMIAAYGFSSIRSLNYPDPEAFMELYLDTADVAAVKRLARVLPLQGVTTNPSILAKAGKSLWEVLPALRDALGGTGKLFAQVLASDSERMVSEAVQLSEQIPGLVIKIPVTAEGLAAIKKLKTMSIPTLGTAVYGAGQGLLSVLAGAEYVAPYVNRLDAQGSDGIAMVRELQQLLTLHAPKAKVLAASFRTPRQVLDCLLAGCQSVTIPVDVAEQFISTPAVKAAIEQFEQDWQGAFGTTMLS

SEQ ID NO: 27089 - protein, 817 aa, Yersinia pestis biovar Microtus str. 91001
MLKFGGTSVANAERFMRVADIIESNARQGQVATVLSAPAKITNHLVAMIDKMVAGQDISPNISDAERIFAELLRGLADTQPGFDYDRLKALVGHEFAQLKHLLHGISLLGQCPDSINASIICRGEKLSIAIMEALFQAKGYHVTVINPVEKLLAQGHYLESTVDITESTRRIGASGIPSDHIILMAGFTAGNDKGELVVLGRNGSDYSAAVLAACLRADCCEIWTDVDGVYTCDPRTVPDARLLKSMSYQEAMELSYFGAKVLHPRTIAPIARFQIPCLIKNTSNPQAPGTLIGGESIDEDSPVKGITNLNNMAMINVSGPGMKGMVGMAARVFAVMSRSGISVVLITQSSSEYSISFCVPQGELLRARRALEDEFYLELKDGVLDPLDVMEHLAIISVVGDGMRTLRGISARFFSALARANINIIAIAQGSSERSISVVVNNDAVTTGVRVCHQMLFNTDQVIEVFVIGVGGVGGALIEQIYRQQPWLKQRHIDLRVCGIANSKAMLTNVHGIALDNWRQELAEVQEPFNLSRLIRLVKEYHLLNPVIVDCTSSQAVADQYADFLTDGFHVVTPNKKANTSSMNYYRQMRAAATKSCRKFLYDTNVGAGLPVIENLQNLLNAGDELMRFTGILSGSLSFIFGKLDEGMSLSEATRQAKALGYTEPDPRDDLSGMDVARKLLILAREAGYKLELADIEVESVLPASFDASGDVDTFLARLPSLDAEFTRLVANAAEQGKVLRYVGVIEDGRCKVRMEAVDGNDPLYKVKNGENALAFYTRYYQPIPLVLRGYGAGNDVTAAGVFADLLRTLSWKLGV

SEQ ID NO: 27090 - protein, 338 aa, Yersinia pestis biovar Microtus str. 91001
MKYDGYNWLECVMKPSIVLYKSIPTDLHQRLAQHFTVNSFDGLTPDNQPELLAALQQAEGLIGSGGKIDQDFLQLAPNLRAASTISVGYDNFDVEALSQRGIALMHTPTVLTETVADTMMALMLSTARRVVELAERVKAGEWQESIGDDWFGVDVHHKTIGILGMGRIGMALAQRAHFGFSMPVLYTSRRPHEAAEQRFGARHCSLDTLLAEADFLCITLPMTEQTYHMIGREQLAKMKSSAILINAGRGPVVDEQALIAALQDGTIHAAGLDVFEQEPLPVDSPLLTLRNVVAVPHIGSATHETRYNMAACAVDNLINALTGTVKENCVNPQVLITH

SEQ ID NO: 27091 - protein, 152 aa, Casuarina glauca
MALTEKQEALLKQSWEVLKQNIPAHSLRLFALILEAAPESKYVFSFLKDSNEIPENNPKLKAHAAVIFKTICESATELRQKGHAVWDNNTLKRLGSIHLKNKITDPHFEVMKGALLGTIKEAIKENWSDEMGCAWTEAYNQLVATIKAEMKE

SEQ ID NO: 27092 - protein, 470 aa, Yersinia pestis biovar Microtus str. 91001
MKLHLAISSGLGRSGASRNMSFDSLGLNADILRAVEEQGYLVPTPIQRQAIPVVLEGRDLMASAQTGTGKTAGFTLPLLQLLSQDQQPIKGRRPVRALILTPTRELAAQIDENVQSYSKYLKLRSLVVFGGVSINPQMMKLRGGVDILVATPGRLLDLEHQNAVDLSKIEILVLDEADRMLDMGFIHDIRRVLAKLPAKRQNLLFSATFSDEIKGLASKLLHNPASVEVARRNTASEQIAQSVHFVDKNRKRELLSQMIGEGNWQQVLVFNRTKHGANHLAEQLNKDGITAAAIHGNKSQGARTRALADFKDGKIRVLVATDIAARGLDIDQLPHVVNYELPNVPEDYVHRIGRTGRAERTGEAISLVCVDEHKLLRDIERLLKREIPRIALDGYEPDPSIKADPIQNGRQGRGAQRPGMGRGSSAGRPQNGGGAAGRGDSRNSRPRSQADGQRRPAGPSSRGRSRNPGE

SEQ ID NO: 27093 - protein, 733 aa, Yersinia pestis biovar Microtus str. 91001
MVFSSPITSAHQKLAVSALSGSPASSLLICAKGRLPTKCDEPYFFKNAGETMVTSDIDTKPQKDTLNPVVFFTSAGLILAFCLMTIFYTDLSNRWIGITLNWVSATFGWYYLLAATLYIVFVIYIATSRYGSIKLGPEQSKPEFSLVSWAAMLFAAGIGIDLMFFSVAEPVTQYMMPPEGQGQTLEAARQAMVWTLFHYGLTGWSMYALMGIALGYFSYRYNLPLTIRSALYPIFGKRIDGPIGHSVDIAAVIGTIFGIATTLGIGVVQLNYGLNVLFHIPESLAVQAGLILLSVVMAAVSVTSGVNKGIRILSEVNVLLALGLILFLLFWGNTEFLLNALVLNVGDYINRFLGMTLNSFAFDRPTQWMNSWTLFFWAWWVAWSPFVGLFLARISRGRTIRQFVVGTLIIPFVFTLLWLSIFGNSALYQILHGNIAFANEVMEFPERGFYSLLAQYPGFTLSASVATITGLLFYVTSADSGSLVLGNFTSRLADINNDSPNWLRTFWSITIGLLTLGMLMTDGVAALQNATVIMGLPFSFVIFFVMVGLYKSLKIEDYRKASSQQTPTPTLISGNEVLNWKQRLSRVMNYPGTTYTAKILDTICRPAMEEVAQELAVRGVKVEFNELPPKEDEQLNRLNHLELLVHLGDEQNFVYQIWPQRYSVPAFTYRARSGKSHYYRLETYLLEGTQGNDLMDYSKEQIINNILDQYERHMNFLHIQSEAPGNIMTFPDQ

SEQ ID NO: 27094 - protein, 539 aa, Yersinia pestis biovar Microtus str. 91001
MLSLLKPLLDDGFGNSNSSILKWMPLAVIGLMVVRGVTGFVSSYCISWVSGKVVMHIRRRLFSHMMGMPVSFFDQQSTGTLLSRITYDSEQVAASSSSALVTVVREGASIIGLFIMMFYYSWQLSLILIVIAPIVSISIRLVSKRFRNISKNMQNTMGEVTTSAEQMLKGHKEVLIFGGQKVETERFDAVSNRMRQQGMKLVSASSISDPIIQLIASFALALVLYAASFPSVMETLTAGTITVVFSAMIALMRPLKSLTNVNTQFQRGMAACQTLFSILDMEQEKDEGKLEVERAKGDIEFRHVTFYYPGKDTPALNDINIHLEAGKTVALVGRSGSGKSTIANLLTRFYDVSEGSILLDGHDLRDYRLGALRNQVALVSQNVHLFNDTVANNIAYARNEQYSRAEIEEAARMAYAMDFINKMEHGLDTVIGENGIMLSGGQRQRIAIARALLRNCPILILDEATSALDTESERAIQAALDELQKNRTSLVIAHRLSTIEKADEIVVIEDGRIVERGVHAELLVQQGVYAQLNRMQFGQ

SEQ ID NO: 27095 - protein, 880 aa, Yersinia pestis biovar Microtus str. 91001
MTTHSAHLLRRLNPYCAQALAGAATLCQTRAHAEITVEHWLLKLLEQGEGDITVIARRYEWDMDSLWQGLLSHLDTLPRTVQGKPQLSAALQQLIKNAWLDASLQENADAVRSVHLMAALIATPSLLVAEAAWPLLSLSTTQLQRLLPLLDNQSDERPEVQQAAALADSPVNLTDEAATVTSASGQPQLNDALQAALDKFTLDVTAKARANQIDPIFGRDSEIRQMIDILSRRRKNNPILVGEPGVGKTALVEGLALRIADGNVPDSLKTVSVRTLDLGLLQAGAGVKGEFEQRLKNVIEAVQQSPSPVLLFIDEAHTIIGAGNQAGGADAANLLKPALARGELRTIAATTWSEYKQYFERDAALERRFQMVKVDEPDDDTACLMLRGLKERYATHHGVHILDAAITAAVTLSRRFLTGRQLPDKAVDLLDTAGARVRMSIDTLPTALMEINAELAALAMEQQAIEQDLLLLPNVSSTRLPEIEQRRAALAVGQHTLEQQYKEEKRLTTLIIEARQDIANAAHLVALQEELVQIQGNAPLLSLDVDVRTVAAVIADWTGVPLGSLLKDEQTNLLSLENRLGERVIGQDAALGALAQRLRAAKTGLTSENGPLGVFLLVGPSGIGKTETALALADSLFGGEKSLITINLSEYQEAHTVSQLKGSPPGYVGYGQGGVLTEAVRKRPYSVVLLDEVEKAHRDVLNLFYQVFDRGFMRDGEGREIDFRNTVIVMTANLGSDHLMQLLDEQPDAPDSTLHELLRPILRDHFQPALLARFQTLIYRPLQVDALKRIVAIKLNQVAQRLHCHYGLSCQIEDSLTDTLVAACLLPDTGARNIDSLLNQQILPVLSQQLLSRMSEQQRTTSLTLGWHEEDGITLTFEGE

SEQ ID NO: 27096 - protein, 363 aa, Yersinia pestis biovar Microtus str. 91001
MSANAIRVQVGPANYFSFPGAIDKLSEFYPQAALDKALWIYGERALAAAQDYLPKAFHGPQAVRAKFSTHCSQSTVADLVSAAGGDRQVVIGIGGGAVLDTAKVVARQLGVPLVAIPTIAATCAAWTPLSVWYNEAGQALNFEIFNDANHLVLVEPRIMLHAPVEYLLAGIGDTLAKWYEAVVLSPQPETLSLTVRLGLQAALEIRNVLLKQSEAALQAVAQGELTQDFLDVVDAIIAGGGMVGGLGERYTRVAAAHAVHNGLTLLPQTEHFLHGTKVAYGILVQTALLGQDEVLRSLIVAFNQLGLPTHLAALDVDINDREAIDRVIGRILKPGESIHYLPIALNSEKVWAAIEQVEIAAQH

SEQ ID NO: 27097 - protein, 239 aa, Yersinia pestis biovar Microtus str. 91001
MKPAILVVDDDTAICEVLRDVLNEHVFDVLLCHSGNEALQITATQPSIALILLDMMLPDINGLLVLQQVQKLRPSLPVVMLTGMGSESDMVVGLEMGADDYIAKPFNARVVVARVKAVLRRSEVLAIESSSVKACGLQFNGWRLNTDRCQLMNPQQQQIDLTQGEYGLLLSLMQNARKVLSREKLLELTHRESLDVFDRTIDVLIMRLRRKIEVNPHQPTLIRTIRGVGYVFAADIIHA

SEQ ID NO: 27098 - protein, 882 aa, Yersinia pestis biovar Microtus str. 91001
MTTHSAHLLRRLNPYCAQALAGAATLCQTRAHAEITVEHWLLKLLEQGEGDITVIARRYEWDMDSLWQGLLAYLDTLPRTVQGKPQLSAALQQLIKSAWLDASLQENADAVRSVHLMAALINSPSLLAADAAWPLLSLSTTQLHRLLPLLDSQSDERPEIQQAAALADSPVNLTDEAATVTSASGQPQLNDALQAALDKFTLDVTAKARANQIDPIFGRDSEIRQMIDILSRRRKNNPILVGEPGVGKTALVEGLALRIAEGNVPDSLKTVSVRTLDLGLLQAGAGVKGEFEQRLKNVIEAVQQSPSPVLLFIDEAHTIIGAGNQAGGADAANLLKPALARGELRTIAATTWSEYKQYFERDAALERRFQMVKVDEPDDDTACLMLRGLKERYATHHGVHILDAAITAAVTLSRRFLTGRQLPDKAVDLLDTAGARVRMSIDTLPTALMAINAELAALAMEQQAIEQDLLLLPNVSSTRLPEIEQRRAALAVGQHTLEQQYKEEKRLTTLIIEARQDIANVAHLVALQEELVQSQGNAPLLSLDVDVRTVAAVIADWTGVPLSSLLKDEQTDLLQLENHLATRVVGQDTALGALAQRLRAAKTGLTSENGPLGVFLLVGPSGIGKTETALALADSLFGGEKSLITINLSEYQEAHTVSQLKGSPPGYVGYGQGGVLTEAVRKRPYSVVLLDEVEKAHRDVLNLFYQVFDRGFMRDGEGREIDFRNTVILMTANLGSDHLMQLLDEQPEATHSDLHELLRPILRDHFQPALLARFQTLIYRPLNAIALRTIVEMKLAQVAKRLNKHYGLHCTIEESLYDTLVAACLLPDTGARNIDSLLNQQILPVLSQQLLSRMSEQQRTTSLTLGWDEADGITLEFEGGEK

SEQ ID NO: 27099 - protein, 70 aa, Yersinia pestis biovar Microtus str. 91001
MSNKMTGLVKWFDAGKGFGFITPADGSKDVFVHFSAIQSNDFKTLDEGQNVEFSIENGAKGPSAVNVIAL

SEQ ID NO: 27100 - protein, 231 aa, Brassica oleracea
SSTGQAPGDDSEVILCPQAIFRDPFRKGKNILVICDCYAPTGEPIPTNKRYNAAKIFSHPDVKAEEPWYGIEQEYTLLQKDTNWPLGWPLRGYPGPQGPYYCAAGADKSYGRDIVDAHYKACLYAGINISGINGEVMPGQWEFQVGPAVGISAGDQLWVSRYIVERITEIAGIVVTFDPFPISGDWNGANAHANYSTKSMRSDGGYEVIKKAIKKLGMRHKEHIAAYGEGN

SEQ ID NO: 27101 - protein, 289 aa, Bacillus halodurans
MRFDEAYSGKVFIMSRSNYEKSKAVIFGMPMDWTVSFRPSSRFGPNRIREASLGLEEYSPYMDKHLEEVAYFDAGDMLLPFGNPQRSLEMIESYVDKLLADQKMPIGLGGEHLVSWPIFKAMHKIYPDMAIIHIDAHADLREEYEGEPLSHSTPIRKACSLIGPENVYSFGIRSGMREEFQYAKDSGMYMAKFEVATPLKEVLPKLAGRNVYVTIDIDVLDPAFAPGTGTAEAGGISSKELLEAIVAIAHSDVNVIGADLVEVAPAYDPSEKTPIAASKFVREMLLGWV

SEQ ID NO: 27102 - protein, 145 aa, Casuarina glauca
EALLKQSWEVLKQNIPGHSLCLFALIIEAAPESKYVFSFLKDSNEIPENNPKLKAHAAVIFKTICESATELRQKGQAVWDNNTLKRLGSIHLKNKITDPHFEVMKGALLGTIKEAVKENWSDEMCCAWTEAYNQLVATIKAEMKE

SEQ ID NO: 27103 - protein, 324 aa, Euglena gracilis
MPNHVKAVDVLEGAINAGVMKAHMPFMDMAIRGLYAGFFLGVTASFNFQLTALYGNAMIGGLLFFAGFMMIIFYGFELVTGNMLVLPLALMARRAPWLGCPKNLLTVYTGNFLGCALYLAFFYGSSLILDCGWTAIKVAQLYCSWKTKTADYYMMWTGWPPAFQGCHVQLLVSFAVLGSLASTSTTGKVIACWFPVALFAVMRYEHVVVNMYTVPCSMALGSGVSWGLFWGWSIAPSTLGNMVGASLLVAFPMWVTHGHEYRQKQREAKQIDDKLTGSSSSDGLMNAEEAIPPTYPDGSFVDEAPEALYSGNNAAPNTPDVRHY

SEQ ID NO: 27104 - protein, 298 aa, Micromonospora echinospora
MLTGHQEGVIGAVFHPDDHLVATSGEDGTVRLWDATTGEQVGRTLTGHTDTVWLVVFDPEGRLLASASEDRTARIWDVSTGEQVGEPLTGHTAGVYGVAFHPDGGLLATGSADHTVRLWKVPGGEPVGEPLTESTDEIDGVAFHPDGHLVASTGDAVRLYDTATGRPVGTPLVGHTKGAVSVAFSPDGRLLASGSDDLTVRIWDHAAGGAAVEPLVGHTDAVDGVVFHPNGRLLVSAAEDCTVRVWDVATGRQVGEVETGHTAPVWNIAFDRSGERIVTASQDGTARILPFPAYPAAG

SEQ ID NO: 27105 - protein, 391 aa, Solanum lycopersicum
MLKKENSNNWARVCDSCHSATCTVYCRADSAYLCAGCDARIHTASLMASRHERVWVCEACERAPAAFLCKADAASLCASCDADIHSANPLARRHHRVPIMPIPGTIYGPPAVHTITGGSMMIGGTTGEGTEDDGFLSLNQDADDTTIDEEDEDEAASWLLLNPPVKNNNKNNNYGMLFGGEVVDDYLDLAEYGGDSQFNDQYSVNQQQQHYSVPQKSYVEDSVVPVQNGQRKSLILYQTPQQQQSHHLNFQLGMEYDNSNTGYGYPASLSHSVSISSMDVSVVPESAQSETSNSHPRPPKGTIDLFSGPPIQIPPQLTPMDREARVLRYREKKKNRKFEKTIRYASRKAYAETRPRIKGRFAKRTDVEAEVDQMFSTQLMTDSNYGIVPSF

SEQ ID NO: 27106 - protein, 341 aa, Solanum lycopersicum
MLKNENSGVFYGSRNNWSRVCDSCRSTACAVYCRADSSFLCAGCDTRMHAANLLASRHKRVWICEACERSPAAFLCKADAASLCTSCDADIHSASPLACRHHRVPIMTILGSLYGPPAVETIGSGSIMIGGPTGEKPEDYGFLSFTQNADDMTVNEEDEDEAASWLLLNPPVKKNNKNNFDNDNNDQNNNYGTLFGGEVVDDYLDLAEYGGDSQFNDQYGVNQQQHHYSVPQKSYHGDSVVPVQEGQGKSLILYNQQQQQQIHHLNFQLGMEVPISSMDVSVIPESALSETSNSHLRPPKGNMDLFLGPPIQIPPSLLQWTEKPESLSTERRRRTVNLRKP

SEQ ID NO: 27107 - protein, 409 aa, Solanum lycopersicum
MLKKENSGGLDGSSNYWARVCDSCRSVTCTIYCQADSAYLCADCDARIHAASLVTSRHKRVWVCEACERAPAAFLCKADAASLCASCDADIHSANPLAHRHHRIPIITIPGTLYGPPAVETVGGDSMMISGSTGEGTEDDGFLSLTQDADDTIIDEEDEDEDEAASWLLLNHPVKNNNKNNVNNNNNQTNNYDMLFGGEVVDDYLDLAEYGGDSQFNDQYNVNQQQQQYFVPQMSYGGDSVVPVQDGQGKPLIFYQQQQQQQQSHHQNFQLGMEYDNSNTRLGLPASMSHSVSVVSMDVSVVPESALCETSNSQPRPQKGTIELFSGHPIQIPLLTPMDREARVLRYREKKKNRKFEKTIRYASRKAYAETRPRIKGRFAKRTDVEAEVDQMFSTQLMTDSSYRIVPSF

SEQ ID NO: 27108 - protein, 414 aa, Emericella nidulans
MSFANMFNKLSGQPESYEKKSLYRFGRTLGAGTYGIVREADCSSGKVAVKIILKRNVRGNERMVYDELDLLQKLNHPHIVHFVDWFESKDKFYIVTQLATGGELFDRICEYGKFTEKDASQTIRQVLDAVNYLHQRNIVHRDLKPENLLYLTRDLDSQLVLADFGIAKMLDNPAEVLTSMAGSFGYAAPEVMLKQGHGKAVDIWSLGVITYTLLCGYSPFRSENLTDLIEECRSGRVVFHERYWKDVSKDAKDFILSLLQVDPAQRPTSEEALKHPWLKGESASDRDLLPEIRAYIARSRLKRGIEIIKLANRIEALKMQEEDEEDIPSAVDVQASEASDKSGLSPFPALSTENSNTHPASTGNGESGGTKKRSLSKIARGAIFREVVLAKVREMKENEEREKVERERRERAHS

SEQ ID NO: 27109 - protein, 353 aa, Oryza sativa Japonica Group
MEEGGRGVKRPFFTTPDELLEEEYYDEQLPEKKRRLTPEQVHLLERSFEEENKLEPERKTELARKLGLQPRQVAVWFQNRRARWKTKQLERDFDRLKASFDALRADHDALLQDNHRLHSQVMSLTEKLQEKETTTEGSAGAAVDVPGLPAAADVKVAVPDAEEPALEEAAAAFEEQQEQQVKAEDRLSTGSGGSAVVDTDAQLVVGCGRQASRRRGQQRGVVLPGRRRVPRLRDGPHGPRRGGHPVGGGRRRRQRRGLQLLRRRRRRPLRRPRPPPPPPTRGRRRGGRPADQLLVDVELDFSRARVVVHSILVLKKSFSFSFFRFFVCNVEFRSAMRRKEVYACAWYGRVTHR

SEQ ID NO: 27110 - protein, 66 aa, Oryza sativa Japonica Group
KQKVALAKQPNLRPRQVEVWFQNRRARTKLKQTEVDCEYLKRCCETLTEENRRLHKELAELRALKT

SEQ ID NO: 27111 - protein, 57 aa, Bacillus subtilis
VKWFNSEKGFGLIEVEGQDDVFVHFSAIQGEGFKTLEESQAVSFEIVEGNRGPQAAN

SEQ ID NO: 27112 - protein, 571 aa, uncultured marine gamma proteobacterium EBAC20E09
MLIQSLINEGVEYIFGYPGGAALHIYDSIFKQSEMQHILVRHEQGATHAADGYARATGKPGVVMVTSGPGATNAITGIATAFMDSIPMVVISGQVQSHLIGTDAFQETDMIGISRPIVKHSFTVDHQSNIPQIVKEAFHIATSGRQGPVVIDIPKDLTNPDDLFDYEYPEEVNIRSYNPPVKPEATQIERVVDAIFNSKKPVIYAGGGTISSNASKELIELNSYINVPVTNTLMGLGVYPATDDKFMGMLGMHGTYQANMAMHNADLILAIGARFDDRITNTPEKFAPKAQIVHFDVDHSSVSKIIEADIAVFGQVKDSLQAINELIKDRLSELDITKFDEWHAQISKWRSEHGLNHNLYKDNSDENPILPQAAVQHIYQESKGKAFVTSDVGQHQMFAAQYYHFDEPRKWINSGGLGTMGFGLPSAMGVKLAYPDEEVICITGEGSIQMCIQELSTCAQYKLPIKIFNINNLALGMVKQWQDMNYDGRHSSISYEDSLPDFKELVESYGHVGIKITKNSDLKKGIEEAFSIKDKLVFVDIYVDPNEHVYPMLVAPNGSLKDMWLAKGSKT

SEQ ID NO: 27113 - protein, 338 aa, uncultured marine gamma proteobacterium EBAC20E09
MNFIDEAYLEIKAGDGGSGASSFRREKYIPFGGPDGGDGGKGGDIYFKVSLNINTLVDFQNKKVFNAQNGQRGAGKNKFGAAGDDLIIEIPKGTVIYDNNTNEELIDCTDESSNYLIAKGGDGGLGNAKFKSSTNQAPRKCTPGFEGERRSLRLELKSLADVGLVGFPNAGKSTFLNTVSSAKPKIGDYPFTTLRPHLGAIKGKESSYVIADIPGLIEGASDGAGLGIKFLKHISRTGILLIFVDLFSLENIEPIDQVILLKKELDSFGDNLTQKVSWIVCNKIDLLQETKINEISKEIEEKLQVTKEEIFFISAATGEGTEFLLKSLESEIYKNTRS

SEQ ID NO: 27114 - protein, 640 aa, uncultured marine gamma proteobacterium EBAC20E09
MSKIIGIDLGTTNSCVAVVEGQQQKVIENSEGARTTPSVIAYTDNDEVLVGLPAKRQAVTNPENTLYAIKRLIGRRFDDEVVSKDADMVPYKIIKADNGDAWVEAANKQLAPPQVAAEVLKKMKKTAEDYLGHEVKEAVITVPAYFNDSQRQATKDAGKIAGLDVKRIINEPTAAALAYGLDKGKGDSTVAVYDLGGGTFDISIIEISDVDGEHQFEVLSTNGDTFLGGEDFDLRLIDYFVDKFKEESGFDLKSDPLALQRLKEAAEKAKIELSSSEQTEVNLPYITADSSGPKHFVHKITRAKLEALVEDLVDKSLEPLKLALKDAKVAKKDIDEILLVGGQTRMPLVQKKVADFFGKDPRKDLNPDEAVAVGAAIQGSVLSGDTTDVLLLDVTPLTLGIETLGGVATPLIEKNTTIPTQKSQIFSTAEDNQTAVTVHVIQGERTQAAQNKSLGQFNLTDIPAASRGVPQIEVSFDLDANGILNVSAKDKNTGKEQSIVIKASSGLSDEDIEKMVKDAEANAEDDKKFEELVKTKNNADMLVHATRKTIQESEDKLDEDEKKQVEDAVVSLEEAIASEDTSSIESATKNLNDVLTPLTQKLYKQENAEAQGEAGVDDESSAENENTVDAEFEEVKEEDK

SEQ ID NO: 27115 - protein, 550 aa, Leptospira interrogans serovar Copenhageni str. Fiocruz L1-130
MIKIFLAKHFPKVQNYRMQNSMILQFISEHPWYSLFYTIGTYLFFALLHDIFQRRHAIKHNFPLVGRIRYIFETIGPELRQYWVANDKEEMPFNRAERSWVYATAKKQNNNFGFGTTELLYEAGYPIIKHSAFPFPESKVKHLKNDTSMIPCLKVIGEFHNRKKPFRPPSVVNISAMSYGSLGKNAVSALNKGAMMAHCYQNTGEGGISPYHKLGGDIVWQIGTGYFGARDEKGNFSLEVFGQKIQENPQIRMIEIKLSQGAKPGKGGILPGKKVTKQIASIRGVPIGKDCVSPNAHSEFGNVNELIDFIERLHFASGLPVGIKSAIGEIHFWNELAERMKQTNKGPDFITIDGGEGGTGAAPLAFADHVSLPFKVGFARVYQIFQKEKLSERMAWIGSGKLGFPDRAIVAFAMGCDLINVAREAMMSIGCIQAQRCHTDHCPAGVATQNRWLQAGLDIELKAERNANYIKGLRKEVLSVTHAAGYEHPLQFRGSDIEISAGLNIFKTLETILGYERDHVHFTKMLDYTDHTYLEEYMQGTTKQEHPKTV

SEQ ID NO: 27116 - protein, 322 aa, Leptospira interrogans serovar Copenhageni str. Fiocruz L1-130
MDPIFEKIEKAIDTEIESILYFRKNLDPSIKQAIELILECKGKLIVTGVGKSGDVGKKISSTLSSTGTPSVFLHPADAAHGDAGIISCEDIIIAIGKSGESEELLNLIPTIKNIGAKLVSMTANVDSKLAKESDVVLITPVLKEACPLELAPTSSTTIALILGDAIAMCLMELKNFKRENFALYHPAGRLGKRLSLKIDDVMRKDKDLAKVLPDTKLENILTEITVKRQGATGVTDLNGTLLGIITDFDIRKKLKEGKLDSSISAEQLMNPSPTMFLSGSNAYDVLKQMESRPNPISVAPIVDNSKRLIGIVSIHDLLQKGL

SEQ ID NO: 27117 - protein, 627 aa, Leptospira interrogans serovar Copenhageni str. Fiocruz L1-130
MEDRQTRLFLALILSMGIWMGVNYFFFPNTSTKKNTETKQTQSDKTSENTKQQITSGKTKESNSADPVVQKEKITPFDTKKSFIVTDSYIVEFSSLGGKISKFYMKDFTGPNGELIQVARKNPETVVVDGKSYQAVELSRDKGFDFNFSDSLVEISDSPWNYIQFSLTEDKINHSISFSAVSPDRSYQLKKEFRFYPSENYFKLSISIINFSKEKLSFASQKNVRYLRTFGSLGPYPKDRPLSDRDTANFFRFYYLGGSFQDTLDGSSSVGFWSSVGNFFTGNSGTDESFSIKTDKESGVDFAGTGSRYFIAVADPLDHKPHGIVLDNRPKNESGAVLVYDNILLNPGENYNLDFASYIGIRESEGMAFKNPEFDPSQSKNSPFVGLSSDLNKSFNQGITTPFRNGIIWILKQIYRFTIPNYGWSIIIFAILFKLVFYPLNQKQADSMKKMQELSPQLKTINEKFANDPKMRQQKTMELYKKNNVNPVGGCLPMVIQIPIFIALYTAFSDTIDLWNSPFLWVKDLSEPDVIWTSPAIPYFTQTGIGLNLLALLMVGTQVFQTRMTSVSMDPNQKMLMYVMPVMMLYIFWNMPSGVTLYWTFQNVLSIGQQWITNHLKKTEEKKKAKV

SEQ ID NO: 27118 - protein, 312 aa, Leptospira interrogans serovar Copenhageni str. Fiocruz L1-130
MNGDIAVFAGNSNKQIAEEICTHLGIQSGKINLKKFSDGEISVKIEDNVRGKEVFIVQSTSAPANDHLMELILIMDALRRASVSSISVVIPYYGYGRQDRKVEPRVPISARVVADLIEVVGLDRILTMDLHADQIQGFFRVPVDNLHFAPVLAEYVNTKKIDDLVIVSPDSGGAERARAFGKKVNGSLAIIDKRRPKANVSEVMNVIGEIEGKNCILLDDMIDTAGTICKAADVLLKHGAKSVYCAATHGVLSGEAVDRINSTQFSEVVLANTIAIPESKKINKLKSLSVAPLFANAIQRIHTNQSVSTLFD

SEQ ID NO: 27119 - protein, 646 aa, Leptospira interrogans serovar Copenhageni str. Fiocruz L1-130
MSKEKIIGIDLGTTNSVVSVMEGGDPVVIQNSEGARTTPSIVAFTAKGETLIGQFAKNQAITNAVNTIRSAKRFIGRRLNECESEMKHVSYKVIRSGNEGVKFETSAGEFTPQEISARVLMKMKQTAEDYLGQKVTKAVITVPAYFNDEQRQATKDAGRIAGLEVERIINEPTAAALAYGFDKKNVNSKIAVYDLGGGTFDISILELADGVFEVKSTNGDTHLGGDDFDMAIMEWMISEFKNQTGIDISADKNTVQRLKEAAEKAKIELSGTMSTQINLPFITADASGPKHLDMTLTRAKFDQLTKSLVDRTRIPCENALRDAGLKASDINEVILVGGSIRIPAVQELVKQVFGKEPNKSVNPDEVVAIGAAIQGGVLAGEVSDVLLLDVTPLSLGIETLGGVMTKLIERNTTIPTKKSQVFSTAADNQSAVSIHVLQGEREMASANRTLGRFDLIGIPPAPRGVPQIEVTFDIDANGIVHVSAKDLGTGKEQKIRIESSSGLSEDEIQKMVKDAEAHAAADKAQREVIEAKNELDTLTYSLEKTVNEAGDKIGANEKQLATDEIKRAREAIESNDKARIESAKASISKIATDIASKVYSQSAPGAEQAAAGGPNGGAGSNDQGNSTNNGEKVVDADYTVVDDEKK

SEQ ID NO: 27120 - protein, 626 aa, Leptospira interrogans serovar Copenhageni str. Fiocruz L1-130
MNIYKRLLKYSFKYKYRLTLGIVLSFLVSILNGASLTSLIPIFDSLGTGEKTNFEISLTKKDKILLQRLEEKESFTSVESIELKLAQWKIQLNSSLKKMSHDELVLLFCFIVFPVYLLKLIFLAAAVYCINSAGYLAIRDLRSELYAKAQTLPINHFVQEKTGILMSRIINDVEVLGKLISSDLKDAITDFFYIVTHLLLLLYLSWKMFLAVFIVVPIVMGPVSAFADKIRRATRNQQERLSLLNGHLQEVISGIRVIRAFSMEKTEAKRFWEFNQDLSDKTFKGHFYHQVGPSLTELFSSIVAVIFLSFGAYLMEDGTFSRGMFMAFFLTLIFLMRPFKQMSMLSNSIQSAISAGDRVFELLDQETDIRNPANPKFLKKMEKGLSFNNVTYMYPGAKNPAIQEINLEIAKGETIALVGASGAGKSTLVDLVPRLIDPQEGKVLIDGIDLRDLDLSNLRKRIGIVSQQVFLFNGSIRENICYGNQNVTEEQLRTACEQAFAMEFILSFEEGLDTIVGERGVMLSGGQRQRIAIARALLLNPEILILDEATSALDTESERLVQEALESLYKNRTVIIIAHRFSTVQIANRIFTMEDGKIVESGTHTELLQLDGKYKKLYDIQFSENV

SEQ ID NO: 27121 - protein, 631 aa, Leptospira interrogans serovar Copenhageni str. Fiocruz L1-130
MKFFFRLLSYSVHYKYRFTLGIVFALLTAILNAVSLTALIPLFDSLGNDKQTRFQLQMTLPEQRIILKQKVFGKDSLDGLEKTKLLLIEVKEWVNGRTKGLEPKEVVWSICIIVMPLYLLKLITYLLSVFCIATAGYKAVRDIRQELFEKNQLLPLTYFFKEKTGLMMSRIINDVEVIAAVISSNFRDATINFFYVITHLMVLLYLNTELLLIACLTVPVIILPVTLFTRKITKSTARSQEKMADLNANIQEMISGIKVIRVFNSEKYEQEKFGKINQNVYRRNFKGQFYLQIAPSLVELTSSVVVLGFFAAGASLIYNGRFTQGEFMAFLLTLLFLLRPLTQLSQMVGKVTQSIASGKRIFEIIDLETEDHSEESKITASPLSQNIEFKNLFFSYPGTGSAVLKDINLKVKKGETIALIGASGCGKSTLMDLIPRFFDPTSGSIEFDGIDIRDLSLGDLRKKIGIVTQDIFLFHGSVADNIAYGKPGATRKDVIRAARLAHAHDFIKKMDNGYDSILGVRGLNLSGGQRQRLVIARALLRDPEIMILDEATSALDVESERLVSDALRRLYANRTTFVIAHRLSTIKDIPRIIVMDNGKIVEEGDHNSLYDKNGIYRKLSDNQFANNGVLP

SEQ ID NO: 27122 - protein, 818 aa, Leptospira interrogans serovar Copenhageni str. Fiocruz L1-130
MERIYFGIYPTTRNSKKRSPRKTSPIKLRKNESFGNFMKNRVANRIVLILFLGINLPLFSESPALELSKTVDPIWLILCAALVFFMQAGFLMLETGLSRLKNTINVAVKNLMDYIVGTIAFFSVGFALMFGLSYEGWIGTNHFFLTGLKTGKDFSFFLFQVAFMGTAATIVSGAVAERIKFSAYLIVSVVVSLFIYPVFGHWTWGGGWIAKIGFVDFAGSTVVHSLGGWIALAGVIVLGPRKDKFKEDGTPRKIHGHNLTFSVLGVFILWFGWFGFNGGSALSFTDQVPLIILNTSLAGSVGGIFAITFSWIFYRVASVEDCMNGVLGGLVAITAGCHAFQPYASLIVGALAGISVVITSWVLEKILKLDDVVGAFPVHGVCGIIGTLLLPILSENQDIRIYPQFIGVLTCSFWAFGLGMILFLLLKISIGIRVNEEFEEKGLNVTEHGAGSSWIDLIHSLKDLAKGGGDLTRKIHVDSGTEAGAIAFLMNRYLANLGQMIYTIKEKSIELEYSSSEISVAWGKMSQGIQQQAANLGEVTSIFDSFRESFQTISSSAAQQKEMETSASELLNELVFGFQKFDSDLKNSSEKSEESVKAIDLSRKELNQLETDINDIGSSAKKVEGLVKLLNDISTKLGMLSINASIEAARSGAAGKGFGVVAEEISKLASSTQESTKKASEILGEIQSTVSRGKTTVQTSVEFFKNLTEEFRFLAETYITIRKSSLHYSNLIGNLNRLNTSITNQSEIIMTDIDKRFSEIGNLYESVDLINGAFHEISAQSEELNATGEFLKQLAEILNSLVRNFRVEQNSSQELIPG

SEQ ID NO: 27123 - protein, 498 aa, Leptospira interrogans serovar Copenhageni str. Fiocruz L1-130
MHSFYIPFGSSLVVLNLEPILPLCFWPHSLRQPGPKTKVLSPREGEILTVYQLETTVQANSDGEFEIFHEGNKLFSFQSTPSSPQTSPTFKPKNGHNTIQIRFKKSNGFVLSQEIHFYFGTKLSAGGAHSGFLINGELYTVGRNNFGQLGTGISTGDGINDRIVKVDPIRDIFSIHFNQNNSMAISQNGRVYTWGANSKGQLGIGNNNTDPARASDPGNRQPPTEIPGINDAVMGAYGFNHALVLKSDGTVVAFGQNNVGQLGNGENNLNRNSFSSNPVNVVQLRNVIQVIAGSEHSAALTENGEVYIWGRNQYGNLGNGIISPANTVQSVPVKVEGLSKIKQIANGRDHILALTSDGKIYSWGLNASGQLGIGGNGNPPPTPIPTQILNIQDVASIWAGGTQSFAILKNGEVKGWGANGNMASLALGESNTQKVYEPNKAVVGIDNVVHFGCGATHNFALLGNGEIYGWGWNFKGSLGRTDLQNNWGAPNPVYIKFP

SEQ ID NO: 27124 - protein, 404 aa, Leptospira interrogans serovar Copenhageni str. Fiocruz L1-130
MDLSAKRLNVIEPSPTLVITAKANELKKKGEDIVSFGAGEPDFETPSHIRDAAKNAIDRGMTRYTAVSGTVELKEAIVHKFKRDNGLDYDKSQVIVGTGGKQVIYNYFLATLNAGDEVIIPAPYWVSYADIVRLAEGVPVIVNTTPEANFQITPEQLKKVITPKTKCLILNSPSNPTGAGYTKKDIEALGEVVLSTGIQVMSDDIYEKIVYDGFVFSNLAMLSPELKKQTFVINGVSKTYSMTGWRIGYGAGDLNIVKNMETIQSQSTSNPSSISQAAAQAAIAGDQSCVEEMRKAFQVRRDLIVSLLNAIPGVKCNNPQGAFYVFPYLTDVYKTTGFIKLKQGSSETSLSKIFCSTLLEKYKVAAVPGIAFGEDQALRLSYAMGENDIRRGVERIAEMIRDLN

SEQ ID NO: 27125 - protein, 296 aa, Leptospira interrogans serovar Copenhageni str. Fiocruz L1-130
MINKYTISIIGTGIMGRGMAVNLAKAGHSLRLYTRNLSKIQDLKKDNVQIFDSPVEAAKNSDLVVLCLTEDQIVEKETISSGLLDTKPPILIDCGTTSLSLTLKLSKLCSEKKIRFYDSPMTGSKNAARDGQILFMIGAKQVDIKDIQFFFEVCGKNAVYCGSIGGGQKAKLALNMIQAGIFQVYMEGFELAKNSELDPSILKEILLQSAAKSGIAEFKFPYVFSGDYETHFSLKNMRKDVYHAIELAKENKTNLSLCKNLPEIYDLGMNAGYAENDFCSLNEVTAKIRPPKSENL

SEQ ID NO: 27126 - protein, 384 aa, Leptospira interrogans serovar Copenhageni str. Fiocruz L1-130
MFQKDGFNVRLLPAAFSEKELLDEIENIHVLGIRSKTNVTSAVLEKAKRLLTIGCFCIGTNQVDLVGAEKKGIPVFNAPYSNTRSVAELVISEIIMLARRVPDHIRNTHSGIWNKISKNCFEVRGKTIGIVGYGHIGSQVSVLAEAMGMKVIYYDIQTVLPLGNATPVSSYEELLKNSDFISFHVPETPQTMNLYGKKEIEVTKKGAYMINLSRGKVVDLEALAKAIQSGHIAGAGIDVFPEEPESNNDPFLTPMQNLPNVILTPHIGGSTEEAQRNIGSEVASKLLKFINNGSTTFSVNFPNLEITPLPAGQYRILNVHKNQPGFLKDINSMVSAIGANISSQHLGTSAEIGYLSMVIDKSVGDELKEKIEKHPFSIKTRILY

SEQ ID NO: 27127 - protein, 860 aa, Leptospira interrogans serovar Copenhageni str. Fiocruz L1-130
MKLDKLTSKLNEAIYNAQASAEKLGNPEISEEHILKEVLSQPDGLVPLLISKLNLSPKSFLESTENALGKQPKVGGNTSADVGFSRSAVSLLKAADEVRKELKDEYLSTDHILLGLMKNGTGSLKTEFLKLGLEYHKLLKITLENRKGKTIMDDSPEGKTDALAKYAKNLNELAKQGKLDPVIGRDEEIRRTIQVLSRRTKNNPVLIGEPGVGKTAIVEGLANKIVQGEVPEGIKNKTLYTLDLGSMIAGAKYRGEFEDRLKALLDEVKSSDGEVILFIDEIHTLVGAGATEGALDASNMLKPMLARGELRCIGATTLKEYQKYIEKDAALERRFQPVYVKEPSVEETVTILRGLKGRYELHHGIRILDSALIAAATLSNRYISDRFLPDKAVDLIDEASSKMRIEIDSMPEELDRANKRIQSLKIEREALKKEQDTASKERLKTLERDLSEQEQNFQTLKARWDLEKSKIGRLKQIKEEIEKYKNLEAEAERRGEINRVAEIRYGKLVDLQKELESANEELKKQESASRLLKEEVSEEDIANIVSRWTGIPVSKMLQGERAKLLLMEDVLKTKVIGQDHALRLVSEAVQRSRAGIADPNRPIGTFLFLGPTGVGKTETAKALAEFLFDDVNAMTRIDMSEYMEAHSVARLIGAPPGYVGYDEGGQLTEAVRRRPYSLILFDEIEKANPEVFNIFLQILDEGRLTDGKGRNVDFKNTVIILTSNIGSEILGSSEYTSEEKERLVEQRLKKHFKPEFLNRIDEVILFHSITDSVIHKIADIQLEGLRQKAKENGLDVSFTNELKDYVSKAGFDAEYGARPLKRLIQREVGNALSRYILDGKFTNGQNVTVDYRQGKVVVVV

SEQ ID NO: 27128 - protein, 116 aa, Leptospira interrogans serovar Copenhageni str. Fiocruz L1-130
MQITVMKGKIHRATVTDADLNYEGSLTVDMDLVDAAGMRVYEKVSVVNVNNGARFETYIIEGKRGSGEICLNGAAARLGMKGDKIIIITYAQVEEKELASDYTPKVVHVDEKNRKR

SEQ ID NO: 27129 - protein, 1498 aa, Leptospira interrogans serovar Copenhageni str. Fiocruz L1-130
MNDLKEQLQLQKYLEENGLYEKSFEHDNCGVGFVASYQGENSHRIVSMGLKAVACLTHRGAVDADMVTGDGAGIMIQIPKKLFATYIEEMGHRRPDEDSIGVGMIFLPREDIDKQDMCRSLVESALMEFNFKLYAWRYVPVNPEVLGPKANQSRPQIEQVLIGKPEGMSNEDFETKLFLIQKKLMRDADRHSLAGDLYICSLSSERIVFKGLFNGNQVSQFYDDLNSEEMVSPYCIFHQRYSTNTFPSWALAQPFRILAHNGEINTIAGNRIWMLAREEELECKKWGEYQKEIHPIIRPHMSDSASLDNAMEAIVRSGKDVLQAKAMLVPNAWSKNLTMSEELKSFYEYNNTLIEPWDGPAALAFAEGDWIGGALDRNGLRPARYAVTEDGLLVMGSEAGLVQVEEELVIKKGRLGPGEMIGINLKEKKLYYNEDINSLFEKKYDYREWSKENVSYLNQDLDSSINETITYKGDDLRRRQILFAYSPFKQKSVIKPQAHQGKEAISSMGDDTPLSILMLSRIGLYTYFRQRFAQVTNPPIDYMREKGVTSLYTRLVKKMNLFGDEKPQNCLVLSHPYLTNLDLKRIREMEGKPYKILTLDATFEAHLETEASQSRNYLETALDALLDQALKAATSGTNILILSDKKLSKERAPIPMELAVAAVHNHLIRSKTRSAVSILVETGSAFEIHNVAVLLGYGASGVNSYLIWDTLFDLWEKGEFDGEDGARPEFYKICGNYRYGVDDGLLKIMSKMGISILSSYVGGQVFEAIGLSRTLVSKYFPGTYSRISGIGIGGIEQNILRNHEQAFYKEINPEDFISEKDDQPHRWSPRVVKFLRKAAVDNDYEAFKEATKILKESDPINIRDLFDFVAKKPIPIEEVETVTEIQKRFLTPGMSHGALSIEAHTDLAIAMNRLGAKSSSGEGGENPSRYVVNEKGDLANSSIKQIASGRFGVTSEYLNSATEIEIKIAQGAKPGEGGQLPGKKNNEEIATNRHTPMGIDLISPPPHHDIYSIEDLSQLIYDLKMANHKAQVSVKLVSEAGVGTIAAGVAKANADVILISGHVGGTGAAPITSIKYAGSPWELGLSETHQVLVMNGLRDRVVLRTDGGIVSGRDVIIAACLGAEEYGVGTASLVALGCIMARKCHLNNCPTGIATQDIKFRAKYKGSPDQLVNLFTCLALEVREYLAELGFRSIDEIIGRTDLLKQITRYERDRLDSLDLNPILVRLPLFYDPTKQKKDRSIRKEPVGEVLDDRIIKDAEKALEGKSSMALSYLVRNTNRTVGAKISGLIARKYGSKGLPGKLEIILEGTAGQSLGAWLVKGVQITLHGDANDYVGKGLCGGVIVIKKHRKSKFKAYENTIIGNTCLYGATSGKLFCSGRAGERFGVRNSGAEAVVGGAGDHFLEYMTSGTIVCLGSVGKNMGAGMTGGTAYFFQKGWDIQPLLNKEYVRTVDLENVDYEIIKNLISEHSKLTSSDLSEGILKDFEANKNYFVKVVPK

SEQ ID NO: 27130 - protein, 560 aa, Leptospira interrogans serovar Copenhageni str. Fiocruz L1-130
MNLNGAELMIRFLEFAGVEIVSGIPGGASLPIYDALYESKIRHILARHEQGAGFIAGGMARANGKPGVCFASSGPGVTNLITAVADAKMDSIPLIVITGQVPVSMIGTDAFQEIDTFSLSVPITKRSYLVKKIEDLIQILPQAWKTAIEGRPGPVWIDVPKDVASAKIDWDISREKEIWNIQKIEFKDTIDLEWKKTFKELLSKAKKPVFYIGGGLNRPLAAELFCILLEKLNFPTVSTLMGLGICPYEHPRFLGMLGMHGSRAANLVLEEADLLVALGVRFDDRATGKLNEFCPNAKIVHVDIDATEIGKLKNPNLFLKHGVENFITQILEEDLSSEHLSSEEWLNQVQTLKTLYGFSIPKENQILHPVSILQSISNILGEKAIITTDVGQHQMWVAQYYPFRKQGSFLTSGGLGTMGFGLPAAIGAALVFPEKRIVCISGDGSILMNIQELDTLRELNLDVTILLINNGHLGLVRQQQELFFSSRFSASKFVIPANFIKIASSFGIPSFELSNECSQVEILEQALIRKGPSFVLLQVEPDLQVLPMVPPGKANREMIY

SEQ ID NO: 27131 - protein, 493 aa, Leptospira interrogans serovar Copenhageni str. Fiocruz L1-130
MFMVTELSYCQKMTQLKRSLNLFDSISLMFSSMVGPGIFITTGYILHQVPNPNIVLLAWILGGFLAVAGAMSYAKSASLFPYAGGDYVYLKEAYSPIVAFASGWLSLSINFSASISLSALAFSKSFFSLINPSWDIYFFEIPFLGLTISIGTAQILAMSAILVFTIVNFFGISTASRIQNLFTSVKILGLVSFVILGFVIGNYDISRFKSFSLFPSDLKGFELLFAGVIPVTYSYLGWNMITYVAEEVKDPDKNIYKAVLYSCALVTILYILMNFLFLSSGTLSELSGDKIGITASSALFGPKATVFITVFICWAFLASISAYIIGGSRIYFAMARDGFFFQNMAKLHSKHKSPYMSLLFQCGYACLFCFVKEIESLLYLITCSTLLLATITAYTPILFEKRNYKLKFRIPGYPYTTYLYIASNFGIIATLLWNKPTEAFWGVGFTFLSIPMYYYFKIMQNTLSKNSTPLETPEVLATSLLPENEPVPIASGE

SEQ ID NO: 27132 - protein, 507 aa, Leptospira interrogans serovar Copenhageni str. Fiocruz L1-130
MQKFMESKFTSVLVIDDEFEIRIVLERVISKEGYQVLSAKDSDSALEIIRNQKVDVVISDIVMNGKSGIEVVKEIRKINENIPVILMTGNPDLNSAEEAVRNRAFDYISKPIRRRNILEILERAKIEKETRDKRAENLIKSETENTKLAQRAKDLYLQNYNILNATSDCVITLDRELKFSGLNRAALDAFGYVEEEIVGKHFEVLIPVGKEKLYMERLNRLLKRKNKKQISRISRADLKSKNGEVRAYEISICYYDIEGQTYYTGIARDITSKLLISEKLIDAERRAFLSILASSIGHEINNSLTAIQGHIEIAKLPDATDPIRQKAIQITWSQLVKLKTLTNNLLQLGKPGENFKRASEPIDLNECVESVIDVFQKTSRLKNCKIHFKPEPIPVIVESNQDQLSLLLSNIVLNSADATGNQGNIQISVYIKNHHPVVSVLDDGVGMDEEVIQKIYQPYFTTKGIGKGTGLGMFVAKEIADQHKIKIEIESEPNFGTEFRLIFPNKV

SEQ ID NO: 27133 - protein, 338 aa, Leptospira interrogans serovar Copenhageni str. Fiocruz L1-130
MKGEAILIDWLKDYRDSYGSGVLSWAVKNSDQEAIELLLEAGAEPDETNARGETPLLNALDQNNEDLIRIFLEAGADTEKKDFAGNTPLTKAVSTGNVSIVEMVLENEYSTPDLEERNGEGYTPILLAVDLGHLDIVEYLLDQGADFLKKNSEGRTILHLTALHNDFEILDLFLEKEETKIILEDKDADGNTALLLASSHDSVECLEKLIQVGANILQLNASGKTGLEEAERQKYHHVTKILKKVLTEKLFFAAKHGEDELCKNILQIGISPNPIDQEGNTPLHVAVIHDQISTTELLIQWNASPFLKNLNGKSPLDIAKAAEKIELVRILEPEPEND

SEQ ID NO: 27134 - protein, 403 aa, Leptospira interrogans serovar Copenhageni str. Fiocruz L1-130
MAQNKPVKKIVLAYSGGLDTSVILTWLKDTYGCEVIAFTADIGQKEELSGLEEKGIKTGASKVYIQDLRLEFARDFIFPAIQGNAIYEMRYLLGTSLARPLIAKAMVEVAEKEGADAFAHGATGKGNDQVRFELGVKSLAPEKTIIAPWRIWSFGGRSDLIEYAKSKGIPVPVTAEKPYSMDRNLMHISYEGGILEDPYKEPDEKMFLLTTSPEKAPDAPEYLELDFEEGNCVAINGKKMNPLEIMETLNTIAGKHGVGRVDIVENRLVGIKSRGVYETPGGTILFLAHRDLESITIDRDTQHHKDKLSIEFAELIYNGHWFSSRMKAVRAFITETQRYVSGTVRIKLYKGICSVVGRKSQVSLYNPEMATFEKEELYNQKDAEGFINIYGLPAQETARLRKK

SEQ ID NO: 27135 - protein, 314 aa, Leptospira interrogans serovar Copenhageni str. Fiocruz L1-130
MHSLMKPTREPQINLFKKSNPYKAKVISNVLLTPETGTGKRPKKEGEALVHRIVLAIDHSAYPYVIGQSGGVIPPGEDPEKKAKGLADVGYTVRLYSIASPSYSFGMKEDNIEFIIKRDNIYDENGNIQFKGVCSNYMCDLKPGDEVTMTGPSGKKFLLPNTDFSGDIMFLATGTGIAPFIGMSEELLEHKLIKFTGNITLVYGAPYSDELVMMDYLKGLESKHKNFKLVTAISREEKNSFDGGRMYISHRVREQAEAVKKILNGGGRFYICGGPKGMEKGVIEEIQKISGNTGTYEEFKHHLEGAHQLFVETY

SEQ ID NO: 27136 - protein, 399 aa, Oryza sativa Japonica Group
MKWKDFFPNKELKEPPYFDGRVVCYPNLKTIRDYLAWRQVDCHINNQYNTCFWSLVKSGKTEKEAQQALKGTFSKDKNELLSQQFQINYDDEPAIFRKGSCVYRDKVETMVKTDRCGNPIKRTRLVITNANVDIIGPEFWENHPYILREALRLMNASASLMMESFPDIVFGYGFSNEYSFVFQDKTELYQRQESLILSSCTSRFTLFYMMKWKDFFPNKDLVEPPHFEAELLCYPKQKILCDYLSSRQAECHTTNQYSTCFWMLVKSGKSENEAREILKGTLSKDKNELLFQQFHLNYNNEPAVFRKGSCTYRQKVEESADAEGRENTTRERVVYALSTLVEKWLASLHWPFISFISFMCKTCAPKMQFQLTELRIVMIYLYLAEWKIRLKQRRGTPVW

SEQ ID NO: 27137 - protein, 677 aa, Brassica oleracea var. acephala
MKERDSESFESLSQVLPNTSNSARMIQMSMANSGSAAPAPAGQDHLDRSKWLLDGPEPPSPWHELKTQVKESYLTKAKKFKSLRKQPLPKRILFILQAVFPIFGWCRNYKLTMFKNDLMAGLTLASLCIPQSIGYATLAKLDPQYGLYTSVVPPLIYALMGTSREIAIGPVAAVSLLVSSMLQKLIDPETDPLSYKKLVLTTTFFAGIFQASFGIFRLGFLVDFLSHAAIVGFMGGAAIVIGLQRLKGLLGITNFTTNTDIVSVLRAVWRSCHQQWSPHTFILGCSFLSFILITRFIGKKNKKLFWLPAIAPLISVVVSTLMVFLTKADEHGVKTVKHIKGGLNPISINDLEFNTPHLGHIAKIGLIVAIVALTEAIAVGRSFAGIKGYRLDGNKEMVAIGFMNVIGSFTSCYAATGSSSRTAVNFAAGCETAMSNIVMAVTVFIALECLTRLLYYTPIAILASIILSALPGLIDIDEAIHIWKIDKLDFLALIGAFFGVLFGSVEIGLLVAVVISFAKIILISIRPGIETLGRMPGTDTFADTDQYPMSVKTPGVLIFRVKSALLCFANASSIEERIMGWIRQEEEGDENTKSDAKRNILFVVLDMSNLINVDTSGITALVELHNNLIQNGVELVIVNPKWTVIHKLNQTKFINKIGGKVYLTIGEALDACFGLKV

SEQ ID NO: 27138 - protein, 322 aa, Brassica oleracea var. acephala
GHASTSTSPVFVQAPSEKGFSSFAIDFLMGGVSAAVSKTAAAPIERVKLLIQNQDEMLKAGRLSEPYKGIGDCFGRTIKDEGFGSLWRGNTANVIRYFPTQALNFVFKDYFKRLFNFKKDRDGYWKWFAGNLGSGGAAGASSLLFVYSLDYARTRLANDSKAAKKGGERQFNGLVDVYKKTLKSDGIAGLYRGFNISCVGIIVYRGLYFGLYDSLKPLLPADLQDSFFASFALGWLITNGAGLASYPIDTVRRRMMMTSGEAVKYKSSMDAFQQILKKEGPKSLFKGAGANILRAIAGAGVLSGYDKLQLLLLGKKYGSESG

SEQ ID NO: 27139 - protein, 202 aa, Oryza sativa Japonica Group
MALLLLAFFAAAATANGGAAPAASNFIRKLCRATQYPAVCVQSQASYGGAPLPRSPPELVHAVLSVSVDKAQSVSMYVGRICGPGGSRGVAGPVRDCLENMADSVGHLCDAAQELGGNMGRAGSPGFKWHLSNVQTWCSAALTDKNTCLDGLSRGVDAATRSATRGKIVVGVHRRRPPSSSTAWRGCGGRRLLVAGRARTRA

SEQ ID NO: 27140 - protein, 402 aa, Oryza sativa Japonica Group
MVLFAGVTLVQSSLLADCYIFHDPDNGVVRNRSYVDAVRFYLGEKSQWFCGFFLNINFFGSGVVYTLTSATSMRAIQKANCYHREGHDAPCSVGGDGYYMLMFGLAQVVLSQIPGFHDMAWLSVLSAAMSFTYSLIGFGLGVAKVITNGVIKGGIGGIAMVSATQKVWRVSQAIGDIAFAYPFASVLLEIEDTLRSPPPESETMRTASRASIAVTTFFYLCCGCFGYAAFGDATPGNLLTGFGFYEPYWLIDFANLCVAVHLLGGYQVYSQPVFAAVERRMGGAGAGVVEVAVPAAVAWPSRWRRGCRVNVYRLCFRTAYVAATTALAVWFPYFNQVVGLLGAFTFWPLSIHFPVEMYLVQKKVAPWTPRWLAVRAFSAACLATGAFASVGSAVGVFSSKTS

SEQ ID NO: 27141 - protein, 540 aa, Staphylococcus xylosus
MEKNKVMDWTTFIGSSIILLIAVIPMMVFPKASQDIITKMNDAVSSSIGSIYLLIGLATLIFVLYIAFGKYGNVTLGKATDKPEFNNFSWAAMLFCAGIASDILYWGIIEWAFYYQDPPHGGKGMTDSALNYATMYGMFHWGPIAWATFVLPALCIGYLVFVKNKPVYKISQTLRPILKGQTDGIVGKIVDIIFIFGLLGGAATSLALGVPMITAGIERLTGIDGDNMLMKSIILLVITAIFAYSSYSGLKKGIKVLSDGNVILSFILLGFVLVVGPTVFIMETTITSMGNMFKNFFQMATWIEPFGGIGGREETMFPQKWTIFYWAWWIVYAPFIGLFIARISKGRTLKELVLGTLVYGTLGCMLFFGIFGNYAVYLQISGQFNVIEFLNSHTTEATIIEVLHHLPFPNLVIVLFLISAILFLATTFDSGSYILAAASQKKVIGEPLKANRLYWAFALCLLPFALMLVGGERALDVLKTASVLASVPVLIVFVMMMISFLRTLSEDRLKLEHRADKYREVERRSLRITQVREKKEDDNL

SEQ ID NO: 27142 - protein, 382 aa, Pinus radiata
MDSNMNGLAKSNGCEISRDGFFESEEEELQGQAEAWKCTFAFAESLAVKCVVLLGIPDMIAREGPRATLSLGEIVAKLPTESPDAACLFRIMRFLVAKGIFRASKSAREGGAFETRYGLTPASKWLVKGRELSMAPMLLMQNDETTLAPWHHFNECVLEGGVAFQKANGAEIWSYASDHPDFNNLFNNAMACNARIVMKAILSKYQGFHSLNSLVDVGGGTGTAVAEIVRAYPFIRGINYDLPHVVATASSLSGVQHVGGDMFETVPTGDAIFMKWIMHDWNDEDCIKILKNCRKAIPDTGKVIIVDVVLDADQGDNTDKKRKKAVDPIVGTVFDLVMVAHSSGGKERSEKEWKRILLEGGFSRYNIIEIPALQSVIEAFPR

SEQ ID NO: 27143 - protein, 355 aa, Clostridium acetobutylicum
MYRLLIINPGSTSTKIGIYDDEKEIFEKTLRHSAEEIEKYNTIFDQFQFRKNVILDALKEANIEVSSLNAVVGRGGLLKPIVSGTYAVNQKMLEDLKVGVQGQHASNLGGIIANEIAKEINVPAYIVDPVVVDELDEVSRISGMADIPRKSIFHALNQKAVARRYAKEVGKKYEDLNLIVVHMGGGTSVGTHKDGRVIEVNNTLDGEGPFSPERSGGVPIGDLVRLCFSNKYTYEEVMKKINGKGGVVSYLNTIDFKAVVDKALEGDKKCALIYEAFTFQVAKEIGKCSTVLKGNVDAIILTGGIAYNEHVCNAIEDRVKFIAPVVRYGGEDELLALREGGLRVLRGEEKAKEYK

SEQ ID NO: 27144 - protein, 246 aa, Mesembryanthemum crystallinum
EFLARRKKISRAQTETQILRMLDHPFLPTLYCQFTSDNLSCLVMEYCPGGDLHVLRQRQPGRCFTEQAARFYLAEVLLALEYLHMLGVVYRDLKPENILVREDSHIMLSDFDLSLRCAVSPTLLVSSSMSATSKKMSGPCVDSRCVQPLCIQPSCQVTCFTPRLLASSSKLRKMKSDLEMKPLLQLVAEHTDAMLTNSFVGTHEYLAPEIYKGEGHGSAVDWWTFGISSTSFYMENSPLKEGNDRT

SEQ ID NO: 27145 - protein, 572 aa, Mesembryanthemum crystallinum
SFDGNGNTDDEDDFYDDDDDDGRPDSVDDKVRKKEMRKGIDLATTLERIEKNFVITDPRLPDNPIIFASDSFLELTEFSRAEILARNRRFLQGPETDPATVAKIRDAIDNETDVTVQLINYTKTGKKFWNVFHLQPMRDQKGEVQYFIGVQLDGSEHVEPVQNSIPVASVMDSEKQVKETATNVDVAVRELPDANKKPEDLWANHSKVVQPKPHRKECSSWKAIEKIKESGEQIGLKHFRPVKPLGAGDTGSVHLVELCGTGEYFAMKAMDKNVMLNRNKVHRACAEREILDMLDHPFLPALYASFQTNTHICLITEYCPGGELFLLLDRQPTKVLKEDAVRFYAAEVIIALEYLHCQGIIYRDLKPENILLQSNGHVSLTDFDLSCLTSCKPQLLIPEIRDKKKQQKAQHQQTPIFMAEPMRASNSFVGTEEYIAPEIIAGAGIQGAVDWWALGILLYEMLYGFTPFRGKTRQKTFSNVLRKDLKFPATKQVSLDASQLIYQLLQKDPKDRLGACEGANEIKRHPFFRGANWALVRCMKPPVLDAPPLLGDPEKEANIVDPDMLDLQTNVF

SEQ ID NO: 27146 - protein, 724 aa, Spinacia oleracea
LTVTPIRDDKGCVIKFIGMQVEVSKFTEGINDKALRPNGLPKSLIRYDPRQKEAALGSIIEVVQTVKHPRSLSQPLSNNDADRREVAGKFNLDYMLPKLAEIDNVGTPGRLSSPSRLSTPGRQTPKIDASSRDSDKSSRKSARISLLGFKGRSSAKHERPPSPEPEFLIPKDIDRDDSWERAERERDVRQGIDLATTLERIEKNFVISDPRLPDNPIIFASDSFLELTEYTREEILGRNCRFLQGPETDQTTVQKIRDAIKEQRDITVQLINYTKSGRKFWNLFHLQPMRDQKGELQYFIGVQLDGSDHVEPLRNRLSERTEIQSAKVVKATAENVDEAVRELPDANSRPEDLWAIHSEPVYPRPHKRGSSSWAAIQKITAAGEKVGLEHFNPIKPLGCGDTGSVHLVELKVPENWFAMKAMDKSVMLNRNKVHRACVEREIISTLDHPFLPTLYASFQTSTHVCLITDFCPGGELFALLDKQPLKIFKEESARFYAAEVVIGLEYLHCLGIIYRDLKPENILLQKDGHLVLTDFDLSFLTSCNPHIINHPQPKKRRSRSQPPPTFIAEPVTQSNSFVGTEEYIAPEVITGASHTSAIDWWALGVLLYEMLYGRTPFRGKNRQKTFANIMHKDLTFPSSIPVSLSARQLIYALLNRDPATRLGTQGGASEIKEHPYFRGINWPLIRCMDPPTLEAPFKLIGRDPNAKEVKWDDDGVLASPMDFF

SEQ ID NO: 27147 - protein, 262 aa, Capsicum annuum
MNTAIIAKSSGVRKGAWTEEEDFLLRKCIQNYGEGKWHLVPIRAGLNRCRKSCRLRWLNYLRPHIKRGDFGWDEIDLILRLHKLLGNRWSLIAGRLPGRTANDVKNYWNSHLQKKLITAPHRQEKKYNTALKITTKNVLRPRPRTFSSSAKNNISWCTNKSTVITNTLDKDERDKEIGLNICQKLTSETSSTIDDGVQWWTSLLENCKEIEEDVAAVGIFEEKNKLVPSLLHDEINSLTMQQGQSDGWDDFSADIDLWNLLN

SEQ ID NO: 27148 - protein, 47 aa, Oryza sativa Japonica Group
LSKEQSAFLEESFKEHSTLNPKQKLALAKQLNLRPRQVEVWFQNRRA

SEQ ID NO: 27149 - protein, 114 aa, Oryza sativa Japonica Group
TKLKQTEVDCEFLKRCCETLTEENRRLQRELQELRALKFAPPPPSSAAHQPSPAPPAPFYMQLPAATLTICPSCERVGGPASAAKVVAADGTKAGPGRTTTHHFFNPFTHSAAC

SEQ ID NO: 27150 - protein, 110 aa, uncultured bacterium
MADIMEQIESAVKKNKVMIFMKGNRSFPQCGFSAATVAIFDQLGVPYETADVLSDPELRDGIKRYSNWPTIPQVYIDGKFVGGCDIIRELHETGELEPLVKAALAESATQ

SEQ ID NO: 27151 - protein, 325 aa, Frateuria sp. ANA-18
MERTTFSVRVDSVRDEQHGVRSFSVSRLDGQPFERYEPGAHIDVTGPSGVTRQYSLCGDPDHRETHLFAVKREEASRGGSRSLHEDVTVGCELTIGAPRNLFQLAPGAIEHILIAAGIGVTPLLSMAYRLLKQEQRFVLHYFARSAEHAAFLPLLSRAPFNDFVRFHFGVARDQLDAALAGCVANARDGSHVYTCGPAPFMERVVAIGEQHVAADAIHLERFAAEPAAAAGDESNTLDSFDVRIASSGATVHVDKHTTIVAALASIGIEVDTSCGEGVCGTCMVDVVSGTPEHRDHCLSKAERASGKVICCCVSRARSPLLVLDL

SEQ ID NO: 27152 - protein, 270 aa, Sinorhizobium meliloti
MGLITPILVAPEAKIRNVAAEHRLDLGRREIVDVPHSHAAAAKAVALIREGRGELLMKGSLHTDELMHEVAASATGLRTQRRISHVFVMDVPGHTDTLFITDAAINIFPDLEAKRDIVQNAIDLWVAIGLGEPRVAILSAVETVTAKIPSTIEAAALCKMAERGQITGGVLEGPLAFDNAIDQEAARIKGINSPVAGHAQILVVPDLEAGNMLAKNLTFLTHADAAGLVLGARVPIVLTSRADSVRTRLASCAVAALYAARRRAAQVAAV

SEQ ID NO: 27153 - protein, 276 aa, Mesorhizobium chacoense
WGFDGSSTMQAEGRSSDCVLKPVALYPDPARTNGVLVMCEVMMPDGVTPHASNSRATILDDEGAWFGFEQEYFFYKDGRPLGFPESGYPAPQGPYYTGVGYKNVGDVARKIVEEHLDLCLAAGINHEGINAEVAKGQWEFQIFGKGSKRAADQIWMARYLLLRLTEKYGIDIEFHCKPLGDTDWNGSGMHANFSTAYMRETGGKEYFEALMAAFEKNRADHIAVYGPDNHMRLTGKHETQSIHTFSYGVADRGASIRVPHSFVNNGYKGYLEDRRP

SEQ ID NO: 27154 - protein, 276 aa, Mesorhizobium sp. ICMP 11708
WGFDGSSTMQAEGRSSDCVLKPVALYPDPARTNGILVMCEVMMPDGVTPHESNSRATILDDEDAWFGFEQEYFFYKDGRPLGFPESGYPAPQGPYYTGVGYKNVGDVARKIVEEHLDQCLAAGINHEGINAEVAKGQWEFQIFGKGSKKAADQIWMARYLLLRLTEAYGIDIEFHCKPLGDTDWNGSGMHCNFSTKFMREVGGKAYFEALMAQFDKNLMDHIAVYGPDNDKRLTGKHETAPWNKFSYGVADRGASIRVPHSFVKNDYKGYLEDRRP

SEQ ID NO: 27155 - protein, 276 aa, Mesorhizobium sp. ICMP 12685
WGFDGSSTMQAEGRSSDCVLKPVALYPDPARTNGILVMCEVMMPDGVTPHESNSRATILDDEGAWFGFEQEYFFYKDGRPLGFPESGYPAPQGPYYTGVGYKNVGDVARQIVEEHLDLCLAAGINHEGINAEVAKGQWEFQIFGKGSKRAADQIWMARYLLLRLTEKHGIDIEFHCKPLGDTDWNGSGMHCNFSTKFMREVGGKAYFEALMAQFDKNLMDHIAVYGPDNDKRLTGKHETAPWNRFSYGVADRGASIRVPHSFIKNDYKGYLEDRRP

SEQ ID NO: 27156 - protein, 132 aa, Mesorhizobium plurifarium
KGSRKAADQMWMARYLLLRLTEKYGIDIEFHCKPLGDTDWNGSGMHCNFSTKYMREVGGKTYFEALMAQFEKNLMDHIAVYGPDNDKRLTGKHETAPWNKFSYGVADRGASIRVPHSFVKNDYKGYLEDRRP

SEQ ID NO: 27157 - protein, 276 aa, Bradyrhizobium sp. ICMP 14291
WGFDGSSTQQAEGHSSDCVLKPVAVFPDAARTNGVLVMCEVMMPDGKTPHASNKRATILDDAGAWFGFEQEYFFYKDGRPLGFPASGYPAPQGPYYTGVGFSNVGDVARKIVEEHLDLCLAAGINHEGINAEVAKGQWEFQIFGKGSKKAADEMWMARYLMLRLTEKYGIDIEFHCKPLGDTDWNGSGMHANFSTEYMRTVGGKEYFEALMAAFDKNLMDHIAVYGPDNDKRLTGKHETAPWNKFSYGVADRGASIRVPHSFANNGYKGYLEDRRP

SEQ ID NO: 27158 - protein, 132 aa, Bradyrhizobium sp. ICMP 14753
KGSKKAADEMWMARYLMLRLTEKYGIDIEFHCKPLGDTDWNGSGMHANFSTEYMRTVGGKEYFEALMAAFDKNLMDHIAVYGPDNDKRLTGKHETAPWNKFSYGVADRGASIRVPHSFVNNGYKGYLEDRRP

SEQ ID NO: 27159 - protein, 276 aa, Bradyrhizobium sp. ICMP 14752
WGFDGSSTQQAEGHSSDCVLKPVAVFPDAARTNGVLVMCEVMMPDGKTPHASNKRATILDDAGAWFGFEQEYFFYKDGRPLGFPASGYPAPQGPYYTGVGFSNVGDVARKIVEEHLDLCLAAGINHEGINAEVAKGQWEFQIFGKGSKKAADEMWMARYLMLRLTEKYGIDIEFHCKPLGDTDWNGSGMHANFSTEYMRTVGGKEYFEALMAAFDKNLMDHIAVYGPDNDKRLTGKHETAPWNKFSYGVADRGASIRVPHSFVNNGYKGYLEDRRP

SEQ ID NO: 27160 - protein, 276 aa, Bradyrhizobium sp. ICMP 12835
WGFDGSSTQQAEGHSSDCVLKPVAVFPDGARTNGVLVMCEVMMPDGKTAHSTNKRATILDDAGAWFGFEQEYFFYKDGRPLGFPASGYPAPQGPYYTGVGFSNVGDVARKIVEEHLDLCLAAGINHEGINAEVAKGQWEFQIFGKGSKKAADEMWMARYLMLRLTEKYGIDIEFHCKPLGDTDWNGSGMHANFSTEYMRSIGGKEYFEALMAAFDKNLMDHIAVYGPDNDKRLTGKHETAPWNKFSYGIADRGASIRVPHSFVNNGYKGYLEDRRP

SEQ ID NO: 27161 - protein, 276 aa, Bradyrhizobium sp. ICMP 14533
WGFDGSSTQQAEGHSSDCVLKPVAVFPDGARTNGVLVMCEVMMPDGKTPHASNKRATILDDSGAWFGFEQEYFFYKDGRPLGFPASGYPAPQGPYYTGVGFSNVGDVARKIVEEHLDLCLAAGINHEGINAEVAKGQWEFQIFGKGSKKAADEMWMARYLMLRLTEKYGIDIEFHCKPLGDTDWNGSGMHANFSTEYMRSIGGKEYFEALMAAFDKNLMDHIAVYGPDNDKRLTGKHETAPWNKFSYGIADRGASIRVPHSFVNNGYKGYLEDRRP

SEQ ID NO: 27162 - protein, 276 aa, Bradyrhizobium sp. ICMP 14754
WGFDGSSTQQAEGHSSDCVLKPVAVFPDGARTNGVLVMCEVMMPDGKTPHASNKRATILDDSGAWFGFEQEYFFYKDGRPLGFPASGYPAPQGPYYTGVGFSNVGDVARKIVEEHLDLCLAAGINHEGINAEVAKGQWEFQIFGKGSKKAADEMWMARYLMLRLTEKYGIDIEFHCKPLGDTDWNGSGMHANFSTEYMRTIGGKEYFEALMAAFDKNLMDHIAVYGPDNDKRLTGKHETAPWNKFSYGIADRGASIRVPHSFVNNGYKGYLEDRRP

SEQ ID NO: 27163 - protein, 276 aa, Bradyrhizobium sp. ICMP 14755
WGFDGSSTQQAEGHSSDCVLKPVAVFPDGARTNGVLVMCEVMMPDGKTPHASNKRATILDDSGAWFGFEQEYFFYKDGRPLGFPTSGYPAPQGPYYTGVGFSNVGDVARKIVEEHLDLCLAAGINHEGINAEVAKGQWEFQIFGKGSKKAADEMWMARYLMLRLTEKYGIDIEFHCKPLGDTDWNGSGMHANFSTEYMRTVGGKEYFEALMAAFDKNLMDHIAVYGPDNDKRLTGKHETAPWNKFSYGVADRGASIRVPHSFVNNGYKGYLEDRRP

SEQ ID NO: 27164 - protein, 276 aa, Bradyrhizobium liaoningense
WGFDGSSTQQAEGHSSDCVLKPVAVFPDAARTNGVLVMCEVMMPDGKTPHPSNKRATILDDAGAWFGFEQEYFFYKDGRPLGFPASGYPAPQGPYYTGVGYSNVGDVARKIVEEHLDLCLAAGINHEGINAEVAKGQWEFQIFGKGSKKAADEMWMARYLMLRLTEKYGIDIEFHCKPLGDTDWNGSGMHANFSTEYMRTVGGKEYFEALMAAFDKNLMDHIAVYGPDNDKRLTGKHETAPWNKFSYGVADRGASIRVPHSFVNNGYKGYLEDRRP

SEQ ID NO: 27165 - protein, 276 aa, Bradyrhizobium elkanii
WGFDGSSTQQAEGHSSDCVLKPVACYPDAARENGVLVMCEVMMPDGKTPHPSNKRATILDDDGAWFGFEQEYFFYKDGRPLGFPEEGYPAPQGPYYTGVGYKNVGSVARKIVEEHLNLCLAAGINHEGINAEVAKGQWEFQIFGKGSKTAADQMWMARYLMLRLTESYGIDIEFHCKPLGDTDWNGSGMHANFSTKYMREVGGKEYFEKVMGAFEKNLMDHIAVYGPDNDKRLTGKHETAPWNKFSYGVADRGASIRVPHSFVNNGYKGYLEDRRP

SEQ ID NO: 27166 - protein, 276 aa, Mesorhizobium sp. ICMP 11719
WGFDGSSTQQAEGHSSDCVLKPVAVYPDPARSNGVLVMCEVMMPDGVTPHASNKRATILDDEGAWFGFEQEYFFYKDGRPLGFPESGYPAPQGPYYTGVGYSNVGSVARQIVEEHLDLCLAAGINHEGINAEVAKGQWEFQIFGKGSKKAADQMWMARYLMQRLTEKYGIDIEYHCKPLGDTDWNGSGMHANFSTAYMREVGGKAYFEALMAAFDKNLMDHIAVYGPDNDKRLTGKHETAPWNRFSYGIADRGASIRVPHSFIKNDYKGYLEDRRP

SEQ ID NO: 27167 - protein, 184 aa, Mesorhizobium amorphae
WGFDGSSTMQAEGRSSDCVLKPVALYPDPARTNGILVMCEVMMPDGVTPHESNSRATILDDEDAWFGFEQEYFFYKDGRPLGFPESGYPAPQGPYYTGVGYKNVGDVARKIVEEHLDQCLAAGINHEGINAEVAKGQWEFQIFGKGSKKAADQIWMARYLLLRLTETYGIDIEFHCKPLGDTDW

SEQ ID NO: 27168 - protein, 184 aa, Mesorhizobium sp. ICMP 13190
WGFDGSSTMQAEGHSSDCVLKPVAVYPDPTRTNGVLVMCEVMMPDGVTPHASNKRATVLDDEGAWFGFEQEYFFYKDGRPLGFPETGYPAPQGPYYTGVGYKNVGDVARQIVEEHLDLCLAAGINHEGINAEVAKGQWEFQIFGKGSKKAADQMWMARYLLLRLTEKYCIDIEFHCKPLGDTDW

SEQ ID NO: 27169 - protein, 276 aa, Mesorhizobium sp. ICMP 11541
WGFDGSSTMQAEGHSSDCVLKPVAVYPDPTRTNGVLVMCEVMMPDGVTPHASNNRATILDDEGAWFGFEQEYFFYKDGRPLGFPETGYPAPQGPYYTGVGYKNVGDVARQIVEEHLDLCLAAGINHEGINAEVAKGQWEFQIFGKGSKKAADQMWMARYLLLRLTEKYRIDIEFHCKPLGDTDWNGSGMHANFSTSYMREVGGKAYFESLMAQFDKNLMDHIAVYGPDNDKRLTGKHETAPWNKFSYGIADRGASIRVPHSFIKNDYKGYLEDRRP

SEQ ID NO: 27170 - protein, 276 aa, Mesorhizobium sp. ICMP 11722
WGFDGSSTMQAEGHSSDCVLKPVAVYPDPTRTNGVLVMCEVMMPDGVTPHASNKRATILDDEGAWFGFEQEYFFYKDGRPLGFPESGYPAPQGPYYTGVGYKNVGDVARQIVEDHLDLCLAAGINHEGINAEVAKGQWEFQIFGKGSKKAADQMWIARYLLLRLTEKYRIDIEFHCKPLGDTDWNGSGMHANFSTAYMREVGGKAYFESLMAQFDKNLMDHIAVYGPDNDKRLTGKHETAPWNKFSYGIADRGASIRVPHSFIENDYKGYLEDRRP

SEQ ID NO: 27171 - protein, 276 aa, Mesorhizobium sp. ICMP 12635
WGFDGSSTMQAEGHSSDCILKPVAVYPDPTRTNGVLVMCEVMMPDGVTPHASNKRATILDDEGAWFGFEQEYFFYKDGRPLGFPETGYPAPQGPYYTGVGYKNVGDVARQIVEEHLDLCLAAGINHEGINAEVAKGQWEFQIFGKGSKKAADQMWIARYLLLRLTEKYRIDIEFHCKPLGDTDWNGSGMHANFSTAYMREVGGKAYFESLMAQFDKNLMDHIAVYGPDNDKRLTGKHETAPWNKFSYGIADRGASIRVPHSFIKNDYKGYLEDRRP

SEQ ID NO: 27172 - protein, 276 aa, Mesorhizobium sp. ICMP 14319
WGFDGSSTMQAEGHSSDCVLKPVAVYPDPTRTNGVLVMCEVMMPDGVTPHASNKRATILDDEGAWFGFEQEYFFYKDGRPLGFPESGYPAPQGPYYTGVGYKNVGDVARQIVEDHLDLCLAAGINHEGINAEVAKGQWEFQIFGKGSKKAADQMWIARYLLLRLTEKYRIDIEFHCKPLGDTDWNGSGMHANFSTAYMREVGGKAYFESLMAQFDKNLMDHIAVYGPDNDKRLTGKHETAPWNKFSYGIADRGASIRVPHSFIKNDYKGYLEDRRP

SEQ ID NO: 27173 - protein, 244 aa, Clostridium tyrobutyricum
ELRKHKGMTPDKANKIVRDPLYFATMMVKLGDADGLVSGSIHTTGDLLRPGLQIVKTAPGTSVVSSIFMMEVPNCDLGDNGFLLFSDCAVNPVPNTEQLAAIAISTAETAKSLCGMDPKVAMLSFSTKGSAQHENVDKVREATKLAKQMQPDLKIDGELQLDASLIQEVANLKAPGSPVAGKANVLIFPELQAGNIGYKLVQRFAKAEAIGPICQGFAKPINDLSRGCSSDDIVNVVAITAAQA

SEQ ID NO: 27174 - protein, 662 aa, Hypocrea jecorina
MSWKLTKSMSLLFPLSPTFRPPTSPSPSPFDWQNETDWPCAELKDTHLGPLSAFSRSPSTSTITDKDEKGTSPGATTPTSENAIAASEALSQAPVVKKPGILVVTIHEGQGFSLPEQHRSAFASSHQSSRSSGGALAGSVRPDGQRVAGSYTNGARPHSSGGGFGSLPTNHGRISGKYMPYALIDFDKVQVFVNSVEGSPENPLWAGGNTQYKFDVSRVTELVIHLYMRNPAAPPGSGRSQDIFLGVARINPRFEERQPTTDDAKSSKKDREKAADAQRQKGEGHSGVEWVDVQYGTGRIKVGVEFVETRAGKLKIEDFELLKVVGKGSFGKVMQVRKKDTNRIYALKTIRKAHIISRSEVAHTLAERSVLAQINNPFIVPLKFSFQSPEKLYFVLAFVNGGELFHHLQKEHRFDVNRSRFYTAELLCALECSHGFSVIYRDLKPENILLDYQGHIALCDFGLCKLDMKDEDRTNTFCGTPEYLAPELLLGQGYNKTVDWWTLGVLLYEMLTGLPPFYDENTNEMYRKILSEPLHFSDVVPPAAKDLLTKLLNRDPKKRLGANGSAEIKAHPFFHDIDWRNVLQRKYEPTFKPSVTDAMDTANFDPEFTSEAPQDSYVEGPMLSQTMQDQFQGFSYNRPIAGLGDAGGSVRDPSFVGSLQDN

SEQ ID NO: 27175 - protein, 497 aa, Staphylococcus aureus
MLTMGTALSQQVDANWQTYIMIAVYFLILMLLAFTYKQATGNLSEYMLGGRSIGPYITALSAGASDMSGWMIMGLPGSVYSTGLSAMWITIGLTLGAYINYFVVAPRLRVYTELAGDAITLPDFFKNRLNDKNNVLKIISGLIIVVFFTLYTHSGFVSGGKLFESAFGLDYHFGLILVAFIVIFYTFFGGYLAVSITDFFQGVIMLIAMVMVPIVAMMNLNGWGTFHDVAAMKPTNLNLFKGLSFIGIISLFSWGLGYFGQPHIIVRFMSIKSHKMLPKARRLGISWMAVGLLGAVAVGLTGIAFVPAYHIKLEDPETLFIVMSQVLFHPLVGGFLLAAILAAIMSTISSQLLVTSSSLTEDFYKLIRGEEKAKTDQKEFVMIGRLSVLVVAIVAIAIAWNPNDTILNLVGNAWAGFGASFSPLVLFALYWKGLTRAGAVSGMVSGALVVIVWIAWIKPLAHINEIFGLYEIIPGFIVSVIVTYVVSKLTKKPWCIC

SEQ ID NO: 27176 - protein, 231 aa, Pseudomonas stutzeri
MAMLTGSAVLNTLRRHHLFSGLAEAALQDIAAHTTVKRLPAGCTLFHQGDAAEHFHVLINGQVKLHRVTCDGQEKVIEVVRPGEAFAEAMLFNKLPEHPLSATTLKESLVLNVQNSHYLRLLETQPQLCMQLLSSLSARLNQRLHQIDSLTSSNVSQRVVRYLFQELQAARSGVIDLDMPKRLIASQLGIQPETLSRILHRLTDAGLIAVQRRRIEILDHLSLSAYLDAAA

SEQ ID NO: 27177 - protein, 225 aa, Pseudomonas stutzeri
MLTEKTLVAELCRLHLFSRLPEAALQEVCASANLKRLPAGASLFHQGDKADRFYFLFSGQIKLHRVVCDGQEKLVEVMRAGESFAEALLFKGAPCYPVSATALKASLVASLNGPHYRRILEQHPDICLDILATLSIRLHQRMTEIDTLTLANASHRVVRFLAQSQQDDSGVVVLDVPKRLIASKLGIQPETFSRILHRLIDAGTISVQRRRIEILDNRKLAAYDE

SEQ ID NO: 27178 - protein, 244 aa, Triticum aestivum
MRRKQNMHENGTIMIQLGQQVPNCESSASDSPQEVSGMSEGSFNEQNDQSGNRDGYTKSDEGKMMSALSLGNSETAYTPPKPDRTHPFAISYPYADPYYGGAVAAYGTHAIMHPQMVGMVPSSRVPLPIEPAAAEEPIYVNAKQYHAILRRRQLRAKLEAENKLVKSRKPYLHESRHQHAMKRARGTGGRFLNAKEKSEAASGGGNASARSGHAGVPTDGGGMFSKHDHTLPSGDFHYRARGGA

SEQ ID NO: 27179 - protein, 244 aa, Triticum aestivum
MRRKQNMHENGTIMIQFGQQVPNCESSASDSPQEVSGMSEGSFNEQNDQSGNRDGYTKSDEGKMMSALSLGNSETAYAPPKPDRTHPFAISYPYADPYYGGAVAAYGTHAIMHPQMVGMVPSSRVPLPIEPAAAEEPIYVNAKQYHAILRRRQLRAKLEAENKLVKSRKPYLHESRHQHAMKRARGTGGRFLNAKEKSEAASGGGNASARSGHAGVPTDGGGMFSKHDHTLPSGDFHYRARGGA

SEQ ID NO: 27180 - protein, 242 aa, Triticum aestivum
MRRKQNMHENGTIMIQFGQQVPNCESSASDSPQEVSGMSEGSFNEQNDQSGNRDGYTKSDEGKMMSALSLGNSETAYTPPKPDRTHPFAISYPYADPYYGGAVAAYGAHAIMHPQMVGMVPSSRVPLPIEPAAAEEPIYVNAKQHHAILRRRQLRAKLEAENKLVKSRKPYLHESRHQHAMKRARGTGGRFLNAKEKSEASGGGNASARPGYAGVPADGGMFSKHDHTLPSGDFHYRARGGA

SEQ ID NO: 27181 - protein, 242 aa, Triticum aestivum
MRRKQNMHENGIIMIQFGQQVPNCESSASDSPQEVSGMSEGSFNEQNDQSGNRDGYTKSDEGKMMSALSLGNSETAYTPPKPDRTHPFAISYPYADPYYGGAVAAYGAHAIMHPQMVGMVPSSRVPLPIEPAAAEEPIYVNAKQYHAILRRRQLRAKLEAENKLVKSRKPYLHESRHQHAMKRARGTGGRFLNAKEKSEASGGGNASARPGYAGIPADGGMFSKHDHTLPSGDFHYRARGGA

SEQ ID NO: 27182 - protein, 244 aa, Triticum aestivum
MRRKQNMHENGTIMIQFGQQVPNCESSASDSPQEVSGMSEGSFNEQNDQSGNRDGYTKSDEGKMMSALSLGNSETAYTPPKPVRTHPFAISYPYADPYYGGAVAAYGTHAIMHPQMVGMVPASRVPLPIEPAAAEEPIYVNAKQYHAILRRRQLRAKLEAENKLVKSRKPYLHESRHQHAMKRARGTGGRFLNAKEKSEAASGGGNASARSGHAGVPTDGGGMFSKHDHTLPSGDFHYRARGGA

SEQ ID NO: 27183 - protein, 318 aa, Paracoccus denitrificans
MKPLDRIHEAAKALDRHIILPEGEDPRVAKAARRLLAGGLARVTLMGGPEIPGAGRIDPAGAPDLAELADHWHRMRAARGMTAERALTEMRDPIRQAAMRVRLGQADGTVGGAVATTADTVRAALQIIGKAPGAGIVSSFFLMLSCGPGAPVRGGMIFADCGLVIQPDARELAAIALSAADSCRRILAEEPRVALLSFSTAGSAEHPSLGRIREALALIRAAAPGLEVDGEMQFDAALDDAIRARKAPESPLTGRPNVFVFPDLAAGNIGYKIAERLAGLTAIGPILQGLAKPANDLSRACSVQDIVNATAITAMQTK

SEQ ID NO: 27184 - protein, 152 aa, Paracoccus pantotrophus
MKPLDRIHETARALDRHIILAEGDDPRVAEAARRLLAEGLARVTLMGGPRIPGAGRIDPAGAPDLAELADHWHRLRAARGMTAERARDEMRDPIRQAAMRVRLGQADGTLGGAVATTADTVRAALQIIGRAPDAGIVSSFFLMLSCGPDAPI

SEQ ID NO: 27185 - protein, 342 aa, Alcaligenes faecalis
MSPQSFQVRIGAGDTPVFQCSTDETLLAAALKAGLGFPYECQSGSCSSCRFQLLEGDVKDLWSNAPGLNAEARECGMHLGCQSTPGSDCRIKLRLKPGYVPQWIPTRQHAALVDVVPLTQDMFEFQFRTEAPAEFLPGQYALLRLPGVVGTRAYSMSNLPNGIGEWHFIVKRKPGGCGTAVLFDVLKRGDAIELEGPYGAAYLRTETGRDVVCIGGGSGLSPMLSILRGAVCNPAMTERRLLMFYGGRTPLDHCVADVFAGEPELKRRVELFSAISDVNAESANWDGERGLIHEVLAKHIGPNPGQYDFYFCGPPPMTDAVHKLLVLNYRVPSEQLHFDRFV

SEQ ID NO: 27186 - protein, 755 aa, Agrobacterium tumefaciens
MSASPLLDNQCDHFSTKMVDLIMVDKADELDRRVSDAFSEREASRGRRITQISGECSAGLACKRLADGRFPEISTGEKVAALSAYIYVGKEILGRILESEPWARARVSGLVAIDLAPFCMDFSEAQLLQTLFLLSGKRCASSDLSHFVAISISKTARSRTLQMPPYEKGTTKRVTGFTLTLEEAVPFDMVAYGRNLMLKASAGSFPTIDLLYDYRSFFDQCSDIGRIGFFPEDVPKPKVAIIGAGISGLVVASELLHAGVDDVTIYEASDRVGGKLWSHAFKDAPSVVAEMGAMRFPPAASCLFFFLERYGLSSMRPFPNPGTVDTNLVYQGLRYVWKAGQQPPKLFHRVYSGWRAFLRDGFHEGDIVLASPVVITQALKSGDIRRAHDSWQTWLNRFGRESFSSAIERIFLGTHPPGGETWSFPHDWDLFKLMGIGSGGFGPVFESGFIEILRLVINGYEENQRMCSEGISELPRRIASQVVNGVSVSQRIRHVQVRAIEKEKTKIKIRLKSGISELYDKVVVTSGLANIQLRHCLTCDTTIFRAPVNQAVDNSHMTGSSKLFLLTERKFWLDHILPSCVLMDGIAKAVYCLDYEPQDPNGKGLVPPTYTWEDDSHKLLAVPDKKERFCLLRDAISRSFPAFAQHLVPACADYDQNVVQHDWLTDENAGGAFKLNRRGEDFYSEELFFQALDMPNDTGVYLAGCSCSFTGGWVEGAIQTACNAVCAIIHNCGGILAKDNPLEHSWKRYNYRNRN

SEQ ID NO: 27187 - protein, 154 aa, Cicer arietinum
IAPTTRHYRSVSMDSFIGKLNFNDESSKLPPSPGLMSPGNSVDGNSAAAFSLEFGNGEFSGPELKKIMANEKLAEIAMADPKRAKRILANRQSAARSKERKMRYISELEHKVQTLQTEATTLSAQLTLLQRDSVGLTNQNSELKFRLQSMEQQA

SEQ ID NO: 27188 - protein, 631 aa, Aquifex pyrophilus
MGQVTRGSHSGEVLFAPDAKRVIEFAVEEARILHHQFVGPEHLLIGVVREKTGLGGRILRSFGLDEYSVRREVLQLLGELPPQESQRYVSTPNLDRFSRDLTQMAREGKLDPVIRKEREIERVIQILVRRRKNNPVLLGDPGVGKTAIVEGLAQRIANREVPEPLLNKRVVALDLAALVAGTKYRGQFEERLKNILKELEKANNVILFIDELHTLVGAGSAEGSIDASNMLKPALARGEIQVIGATTVDEYRKYIEKDGALERRFQPVYVEQPSPEDTIQILYGLKPKFEEFHKVEYTPESIEKAVELSVKYITDRNLPDKAIDVMDEAGALVKLKASQLPPELKELEEKIKEYEKEKEKAVKEQDYEKAAKIRDEELRLRAKFETMKAKWKEEMEKNRPKVTEEDVAEVVARWTGIPVKRVHESDAEKLLHIEEELKKRVIGQDEAIKAVAKAIRRSRVGLKGKHRPIGVFMFLGPTGVGKTETAKALAEYLFGTEDALIRFDMSEYMEKHTVSRLIGAPPGYVGYEEGGQLTEAVRRRPYSVLLFDEIEKAHPDVFNVFLQIFDDGRLTDGLGRTVDFSNTIIIMTSNLGARLITGGTMGFEKKQGLLDFEEMKKNVLDQVKKTFSPEF

SEQ ID NO: 27189 - protein, 1293 aa, Emericella nidulans
MVRKDSRDNLELFVHRGRYDWRNLVAFMSSGLGEKARTVLDVKDDDPDRQSGTKAYFRVWGYSSVQDHVIRVTGLFAAIACGAALPMMTLVFGTLIDNFNDWGAGKLSPDEFRSHVSQNALWFTYLFISIFVLSSFNTACLRLTATRCVRALRHDFIRSILRQDLSYFDNCLPGTVATVLSNNADLVEIGLGEKLGIAIEGVAQLCAAFVVAFARQWKLTLVVAATLPLAMLVIVVTVILETRITTKILAIYSKAGGIAEEALASTHIVKAYNAASKLQARYDSYLERATQLGVKRGPIRGIQYGAQFAIMFCAYALAWFYGIRLLVKGEIESGGYLITVLTSVLIGSQSLTLIGPFIGEVSKTAAAAQELFQVIDRKPNIDSLSSDGRTLTGVTGHISFRNVSFAYPSRPSVRVLDDVTVDFEAGKTTAIVGSSGSGKSTILALVSRFFDPVSGSVLLDGHPIHELNIRWLRGQIGSVQQEPVLFSESIFANVCHGFFRTDMDLLPEHERRIRVQEACEAAFAHHFIQGLPEQYDTPVGAGDGLLSGGQKQRIAIARSIIRNPPILLLDEATSALDPNAEGTVQAALNNVSKTRTTIIVAHRLSTVQRADNIVVLRKGRVVEQGSHRELLAKKGTYFDLVAAQTEDGIISTAGDQTGTSEADSVLVKKAAVEDYNSAMSSQSSKATAHEKRVPLLKCLFILLRGRLQLWPLFFCGLIVLYRCRQCLPCSSGRFQQSHLIFQFPLPAMASEMLHKGNFWGIIYIVLAVSVLICYAGLGFFFTVAASFLSGTYRSRYFAAMLNQDVSFFEEEDQSAGVMTGQLSTDPQRIEDLISLCLGFILLVVVNVLASCILALAVGWRLALVAIFGCLPPLFLAGYVRVRLEITCQERTTRLYLESARFATEAISAIRTVASLTLEEKVIQMYDERLSHTSPKFIRITLVSAILLGLCESLYLATLGLIFWYGVKLLSQGEYNVETFFMVFVAVIFGGQAAGFLLGYTVNTAKAHTAANNIIHILGSRPSINASTGKQETVQLDSDTAIEFKDVHFSYPARPTVPVLQGLSFKVKKGEHIGLVGASGCGKTTVISLLERFYEAGSGEIFINGIPLHDIDVHSHRARIGLVTQNPTLYQGSIRDNVLIGISISHQNEELDSQIEEKLTKAYKDANIQDFIQSLPEGQQTDPGTRGLALSGGQRQRIAIARALIRDPELLLFDEATSALDTENERLVQEAIERVSHGPGRTTISVAHRLTTVRRCDRILVLHEGRVEEEGTHAELMARGGRYYQMVLAQGLDR

SEQ ID NO: 27190 - protein, 278 aa, Actinobacillus pleuropneumoniae
MKLSTTLKTLLATAITAFALTACDNANNAQSSTAKDSVAQIKEKGVIRIGVFGDKPPFGYVDANGKSQGFDVEIAKEIANDLLGSSDKVEFVLTEAANRVEYLKSNKVDLILANFTKTPERAEVVDFAAPYMNVALGVVSPKVRLISDLKQLEGKTLLVNKGTTADAYFTKNHPEINLLKFDQNTETFDALKDGRGVALAHDNALVWAWAKENPTFDVAIGSVGPAEQIAPAVQKGNQALLDVINKEIAEFKTNGKLKAAYEKTLVPVYGDKPELLAQ

SEQ ID NO: 27191 - protein, 582 aa, Zea mays
AFERRFQQVFVAEPSVPDTVSILRGLKEKYEGHHGVRIQDRALVVAAQLSARYIMGRHLPDKAIDLVDEACANVRVQLDSQPEEIDNLERKRIQLEVELHALEKEKDKASKARLIEVRKELDDLRDKLQPLTMKYRKEKERIDEIRKLKQRREELQFTLQEAERRMDLARVADLKYGALQEIDAAISKLESETGENLMLTETVGPEQIAEVVSRWTGIPVTRLGQNDKERLVGLADRLHQRVVGQTEAVSAVAEAVLRSRAGLGRPQQPTGSFLFLGPTGVGKTELAKALAEQLFDDENLLVRIDMSEYMEQHSVARLIGAPPGYVGHEEGGQLTEQVRRRPYSVILFDEVEKAHVAVFNTLLQVLDDGRLTDGQGRTVDFRNTVIIMTSNLGAEHLLAGMVGKNSMKVARDLVMQEVRRHFRPELLNRLDEIVIFDPLSHEQLRKVARLQMKDVAVRLAERGIALAVTDAALDIILSLSYDPVYGARPIRRWIEKRVVTQLSKMLIQEEIDENCTVYIDAAPGKDELVYRVDRSGGLVNAETGMKSDILIQVPTSSTRSDAAQAVKKMRIMEEDEDGMDEE

SEQ ID NO: 27192 - protein, 542 aa, Chlamydomonas reinhardtii
MSEACLLAAKSALVGVANGDSLASAICAAMEAAAPVARHLQETTVDLTTLQETVDTIGLNLQGTMDGLNTLLLLYGGALVFLMHGGSAMLEAGAIRSKNAMNILLQTVLDASCSALMWYFVGFAFAFGIGDKPNKFIGNAMFALVDIDTHNTGSGTGKWIDWFFQWAFAATAVTIPAGAVAERFNFNAYLGYSMFIGGWVYPIIAHWVWCIEGWLGYGVIKPFINAGMIDFAGSGVIHMTGGLAGLIGAIMVGPRLGRFDADGKPVDMPGHSAILVVLGTVLLWFGWYGFNPASVLLINSSTYAIVCGRAAVCTTLAGAAGGVSCLIFGFARHRGWDLVGLCNGILCGFVAVTACPHVIYPWAAIICGLVAGLWFEFLCWLLLKLKIDDPLSAGPMHFGCGMWGVFFTGLFARQQYIQEYYVHGPSAAGELSKPYPWGAFYKGYNADGELVMSDGKLLASQIVGILVIIGWVIGMMVPFFGIFQFFGALRIPPEEEEMGLDRSKHGGSAYNGTGANTLGGLSPGNDVMRNNSPLGKVLPVTA

SEQ ID NO: 27193 - protein, 320 aa, Ustilago maydis
MTDLEYFSEISSLASQIQMMLPSVPRTSPAAPRSTYFLPLSLEGPNKQALSRELSKRSVGGVCRDTLVEIFIGYLKKLQRVYEAQYKDVFVIWQQENLYEEAHDQAFRNLLNRLFSIRSRKLWYTLLKEASKYTQRGSSPPGIHNDDASDEEAPLKTGRGHDSEAVRILEQAFKHSPNITPAEKFRLSEVTGLKPKQVTIWFQNRRNRKGKKNLNVEPTDSTQTDLSPSRPESPPPSSPSRDFTLSEKKRKSYGVLGRSSPDCTDPDSDSPSSSLKKPRVSSVCSKLSDGSSSSYEYNGVFTQWGSPSSHSTSSSSESSG

SEQ ID NO: 27194 - protein, 633 aa, Acetobacter aceti
MSKVIGIDLGTTNSCVAVREGNETKVIENSEGARTTPSMVAFTEVGEMLVGQAAKRQAVTNPANTFYAVKRLIGRRFDDPTVQKDKEMVPYAIVQGDNGDAWVEARGKKYAPSQISAFVLGKMKETAESYLGEKVSQAVITVPAYFNDAQRQATKDAGKIAGLEVLRIINEPTAAALAYGLEKKSGGTVAVYDLGGGTFDVSVLEISDGVIEVKPTNGDTFLGGEDFDNRIIGYLADEFKREQGIDLRSDKLALQRLKEAAEKAKIELSSSKETEINLPFITADASGPKHLVLKLTRAKLESLVDDLVQRTLEPCKAALKDAGLSASQIDEILVGGMTRMPKVIETVKGFFGKDPARNVNPDGVVAIGAAIQGAVLKGDVKDVLLLDVTPLSLGIETLGGVFTRLIDRNTTIPTKKSQVFSTAEDNQSAVTIKVYQGEREMAADNKLLGNFDLTGIPAAPRGVPQIEVTFDIDANGIVSVSAKDKATGKEQQIKIQASGGLSDTDIDKMVKDAEANAEADKAKREQVELRNNAEALVHQTEKSLTEAGDKVPAAEKVATESPIAAVKAAMEGTDAEALKRATERLTQAAMKVGEAAYKAGQAGEAAPEAEAAKPDEKEIVDADFEDVNDTKKS

SEQ ID NO: 27195 - protein, 292 aa, Klebsiella pneumoniae
MKLGFIGLGIMGTPMALRLAKADHALHVTTIGPVADELLKHGAQHLACAEQVAEQSDIIFIMVPDTPQVAEVLFGGHGCAKAVLKGKIIVDMSSISPIETKRFAQQVRDLGADYLDAPVSGGEIGAREGTLSIMVGGDENIFARVKPLFDILGKNITLVGGNGDGQTCKVANQIIVALNIEAVSEALVFASKAGADPARVRQALMGGFASSRILEVHGERMLNRTFNPGFKISLHQKDLNLALQSAKALALNLPNTATCQELFNTCAANGGSELDHSSLIQALELMANHQIA

SEQ ID NO: 27196 - protein, 756 aa, Gibberella zeae PH-1
MFNKKTATTSKPDMITKCPFSNPNSLFQDLATVRQTDGIEYNEKLKGYLVTRFDDIVDVLNRPDEFSSRPTVPDFPPPVKPLFKDKVPEKGTLLAWDNPDHDRLRKSVASFFVPRRLKRFEPMLHDAANELIDSFIDKGTADMKSAFALPLPLRSIVTIAGLDPERWQWIGQCLTLFGGIARRDDEEEVSIQQKIQDVLDLHEYIRQVIEERRLDRRDDLISHIWNERDAGTVIMTDFEHLSMIPGLLLAGHETTTNVLTMGLAHILHNGLWEQISQSDETRKAAIEELLRFESAITGMPRQVTSDGVQLCGMKLNAGDRLFVAYNSGSRDESKFENPNKLDISRQSKTQHLGFGRGVHACLGAPFARLLLRTELAVLYTRLPNLRLVTPYEELAYGEVHEARSIGATFYAWDIPSPGTARKVHVQSNGNATSRSAAVQNIPMVVQSLGSVAQNIMQISLQPKDTAKQIEWTPGAHIDINVGTFGYRQYSVCSDPTDTQQLKIAVLREDQGTGGSRYLHENLKVGDKISIRGPRNNFKFTPGTRRTFLIAGGIGITPMIPMAEEAAASGIDYKIIYLGRSRAGMAYIDKITQRHGERAMIWVTDEHDGARLELAKLLQAEDPNGLRVYCCGPESLLTAVGESMSHAPLGTVHVERFANPVSPLSSSNTAFDVLMAKSGRVLHVPEDKTVLEVINEAGGNVLSTCNKGLCGTCEVGVLEGTPEHRDVVLTAAERAENSSMMTCVSRCRGKSLVLDLW

SEQ ID NO: 27197 - protein, 582 aa, Gibberella zeae PH-1
MGFSFNQKSQATSQATSPGEVSESDSIIRDGELAFVRQTAGNGTSGYQEAVGAPVETRSPLGYNVNWITIIFLNLNHMVGTGIFSTPATILKLTGSIGLALVYWVIGFILAVAGLAVHMEFTSYFPNRSGSEVVWLEQGYPRPKHFFPVAFAVQSVLLSFSSSNAIVLSNYLWRIVGRAPDAWELKGVAIAAYTLAVITVLVHNRYSLWAINVFGALKLLLLLFIAISGLVILGGNFGSIPDPSLNFRNGFEGTTSSGYNLSQAMVNISFAFSGWQNAFSMANEIKNPIPTLKKNASASLLIVFVLYFLCNIAYFAAVPKDIFLESSELAAAVFFRTAFGKSAESALNFCVLLSSFGNLLAVLVSQSRQIREIARQGVLPWTEFWVSTKPFGTPVGPYLLKWAFTFLMIVAPPAGDAFQFVVSLKTYPDAIFFAAMGVGLLLIRRRRSRSNTPPSDFRAWHALVILYILSQIYLLVMPWIPPVGGIYGGTVSFLWCTYMIVGIAILGVCGLYYYVWMKLLPRWGGYKIRSQVISVDDNGANTHRLLKVPNDEVAEWDATHDDLGRDLPAGQRVTTEISNISK

SEQ ID NO: 27198 - protein, 380 aa, Gibberella zeae PH-1
MDSAARQQPQVQPCRYKVGKTLGAGSYSVVKECVHIDTGRYYAAKVINKRLMAGREHMVRNEIAVLKKVSMGHQNILTLVDYFETMNNLYLVTDLALGGELFDRICRKGSYFESDAADLVRATLSAVAYLHDHGIVHRDLKPENLLFRTPEDNADLLIADFGLSRIMDEEQFHVLTTTCGTPGYMAPEIFKKTGHGKPVDLWALGVITYFLLCGYTPFDRDSDFEEMQAILNADYSFTPIEYWRGVSAHAKDFIQRCLTIDSTKRITAHEALQHPFVAGFINAEGESQNLLPNIKKNFNARRTLHAAIDTVRAINKLREAQSGLMDGARSKEPSRGAAQQTPTNRKHPTSHPRCNPATTEIELSKLPKVSGAQRRAVRIR

SEQ ID NO: 27199 - protein, 307 aa, Gibberella zeae PH-1
MDYSQYQQQGQNTNSGYTNSAAANNITSPTNNISQHPVQSSPIIASQQQQGQTQGHGMYQPPYGVPQQGMQQVHYGMPGIQAAAMAATAAASGANYPYMPSDPNMPQSSPRTGANAKNDGRQSPRMNSMSQLPGRRMSQVTSPGVATAPMMSHAGARPGVAPPQMPTAQMQHPQSPDMPAASGAEESPLYVNAKQFHRILKRRVARQKLEEQLRLTSKGRKPYLHESRHNHAMRRPRGPGGRFLTAEEVAAMERDGEKSADGKDNSAAENSGNAGTKRKSEAGSATSNKKAKTDTASPGDDEDEDEG

SEQ ID NO: 27200 - protein, 513 aa, Gibberella zeae PH-1
MSYVVPGPPTPFNGTNEELGGDSTTENLNQWYQSGDQAFILVSACLVLLMVPGIAFLYSGLARRKSALSMLWVVMMSFSVIVFQWYFWGFSLAFSTTSNNPFIGDLKHFGLRHVWGAPSVGSALIPALLYSFYQMMFCAVTAALTIGAVAERGRVIPSMVFIFFWATLVYCPLAYWVWNPSGWGFVNGVLDYAGGVPVEIGSGMSALAYSWVLGRRNEKMMMNFRPHNISLITLGTIFLWFGWLGFNGGSAFGANLRAVMACWNSCLTAMFAAMTWCILDFRLARKWSMVGWCSGTISGLVAATPASGFIDPWASIILGVVAGVACNFATKVKFLIRIDDSLDVFAEHGVGGIVGLIFNAFFARGSIIGLDGVNTGATGGFMDGNYVIIGWQIAAIVGASSYAFVMSAIIAKIIDLIPGLKLRASEEAELLGMDDDQHGEFSYDYVEVRRDFLAWSPQRGEPAEDGDVLEPTHGIHEHQSMMNPSESDDARKTPSLNTPDVIAPDAVINEKHA

SEQ ID NO: 27201 - protein, 463 aa, Gibberella zeae PH-1
MNVNDWYEFFSLITRERLFFYSGLARRKSALSLIWLSVMSAAVTTFQWFFWGFSLTFSHTAGPFIGDLANFGFRDVLARPSVGSAHLPDMMFAVYQGMFSALTVALATGAVAERGRMLPCIIFIFVWATIVYDPIACWTWNPNGWSNKMGGLDFAGGTPVHIASGSAALAYSMMLGKRSGHGTHELNYRPHNATHIVTGTVFLWVGWFGFNAGSALSANLRGVMAAVVTNLAACVGGITWCLLDYRLERKFSTVGFCSGVVAGLVCITPGSGYVPPWAAVIFGVLGAAGSNYATKVKFLLGIDDALDIFAVHGVGGLIGNICTAFFASPTIAALDGYSRIKGGWVEHHWAQMGYQLADSICGGLYSFTVTCLILFLMNLIPGLRLRVDGEAELQGIDDAEIGEFAYDYVELTREVVSDMDNESGSRYSADPTAFQHYEKNHIPMIDARMFGGQPAHAPVAFPQ

SEQ ID NO: 27202 - protein, 457 aa, Gibberella zeae PH-1
MALSYQQTKLIRGTIPALTDHGERITTIFYRNMLRDHPELNDYFNTVNQANGRQPRALTAVILSYANNINHITELIPKMERMCHKHCSLGIKPEHYAIVEKYLIAAFAEVLGPTMTTQIREAWTKAYWMLAKMLIGREAQLYRDFGKWQGYRKFRIEKKVEESDDIYSFYLVPVDGKRLPSFQPGQYVSVQIPIVDKGYVQSRQYSLSDAPRPDYYRVTVKRDEGIHMTRSGRYLGGDALNPGVVSNLLIDMKDEGDVVELAHPAGEFYLDMSNTSNVPIVLISAGVGVTPMMSILNTVSERQPHRPVSWIHGSRRSVPFYDQVRRIARNRSNFRTNIFKTHLAESDIFGVTYDHDFRMDLAKVSKDDLYLCHSSTEYYICGPEQFMLEMAEYLKAQKVDASRMHFELFSTGDMEFKVDNLSISSASKSPSIASAEQRCPSTGAVSADGATCPFSAV

SEQ ID NO: 27203 - protein, 209 aa, Gibberella zeae PH-1
MAQQYSQGPNVQNQEWQSNLCNCSPCDSCMLSTFCPCILLGKTSDRMRDPTMQTADTCNSDTLIFTAIQCVTGCGWIYSMMKRGEIRERFGIKGSGMSDCCVSYWCLCCALIQQDNEVKARLSHGPIMQGYQAQKEGMHMPTTQQQQYQDQKPNPEQHTPQPDYQLPQHQHQHQQGYQSPQQGYQSPQPQGSFPPPQQTYNPHQPQPQY

SEQ ID NO: 27204 - protein, 253 aa, Gibberella zeae PH-1
MCAKYAFEKPNDRRALDLMNTAAKAVVTELPDITIAYGVSDEYSFVFHKACTLFERRASKLVSTVVSTFTANYVYFWSTHFPDTPLSPPLPSFDGRAVCYPSVQNLRDYMSWRQVDCHINNLYNTSFWSLIQVKGLDNKEAEKRLAGTYAADKNEILFSECSINYNNEPEIYKKGSVIFRDYELVDPDSHNITQTIDSQAEPTQQSKTQKEKDKKSRAKARVVVEHVDIIKDDFWDRRPWLLSNKPGKIPKQT

SEQ ID NO: 27205 - protein, 776 aa, Gibberella zeae PH-1
MAASVRARSAWPLTRVLATQPLKPTSLRLIPSLAIRTYANGRPHPPGGTHRMNMGGEEEKPALEQFGIDLTARAKDGKLDPVIGRDAEIQRTIQILSRRTKNNPVLIGNAGTGKTAILEGLALRIVRGDVPESVKNKRVISLDLGSLVAGAKFRGDFEERLKKVLTEVEQAEGEVILFIDELHTLLGLGKAEGSIDASNLLKPALARGELQCCGATTLNEYRQIEKDVALARRFQPIIVSEPSVEDTISILRGIKDKYEVHHGVRITDGALVAAATLSNRYITDRFLPDKAIDLMDEAASHLKLQHESKPEDIMRLDHKIMTIQIELESLRKESDVASKERREKLENDLKKLNEEISGLNARWEKERAEIESVKKIQEDLDKAKFALEQAQREGNFGRASELRFGVIPDLEQKLPKEGEAQESTSSETLIHDSVSPDDIANVVSRITGIPVTKLTSGHIEKLVHMEDSLSQAVKGQDEAIKAVSDAVRLQRAGLSGENKPLASFFFLGPTGVGKTELCKKLAGFLFSTESAVVRFDMSEFQEKHTISRLIGAPSGYVGYEDAGQLTEAVRRKPYAVLLFDEFEKAHRDISALLLQVLDEGYLTDAQGHKVDFKNTIIVLTSNLGADILVGQNHLHPYSETADGEIDPSVRKAVMDVVASAYPPEFLNRIDSFIVFKRLARSALRDIVDIRLKELQQRLDDRRIVLNVPSDVRDWLAERGYDPKFGARPLNRLITNEIGNGLADKIIKGQLKMGETAEIKVREDKEGLDIAIKSKEA

SEQ ID NO: 27206 - protein, 812 aa, Gibberella zeae PH-1
MTGQNTLGHGLAKILGIKLEGQKRDQCAQMGDHSVLSSQNGGSFYETEPTSAEWVKEQIPSKEDLITYGASLFPFSNWIGHYNLQWFAGDLVAGITIGAVVVPQGMAYAMLANLEPQFGLYSSFIGALIYWIFGTSKDISIGPVAVLSTVVGNVVHDIQNSGQEIPAHVIASALSISAGFVVLVIGLLRCGWIVDLISITSLSAFMTGSAITICVGQLPALLGLSGFSTRDSPYKVFKNTIEHLGEANSDAIVGLSALAILYCFRQGLTIAAERYPKHKRLLFFTNTMRTVFVIIMYTTISWALNKHRRDNTLFNILGAVPKGFQNIGVPKISPDLISGFSPYLPATVIVLLVEHIAISKSFGRVNNYTIDPSQEMVAIGMANLIGPFLGAFPSTGSFSRTAIQSKAGVRTPAAGIVTGLVVLLATYLLTAVFFYIPNAALAAVIIHAVGDLVTPPNTVYQFWRVSPIEVFIFFTGVIVSIFAHIEAGLYATVLFSGAVFLYRILKAHGRFMGKVKVHSVIGDHVIGDHHRKVVGRFGTTENLDISARNVFLPLDHDDGSNPEVEVGHPYPGIFIYRFSEGFNYPNANSSLDYLTDFIQSNTQRSSPEAFERPGDRPWNNPGPRKSAKRPVHVDADSTLPTLKAVVMDFSSVNNVDITSIQRLIDIRNQLDSYASPDGVDWHFACINNRWTKRALIAAGFGVPCRPEEEGLQRRWKSIFSVAEIGDRDSALAEETDFHGITPRDFDITEEEPLVGGMPSVRSYGSMSHRELEKQRRRGAVVHGQNKPLFHVDLTSALQSAIANVEERPAQEE

SEQ ID NO: 27207 - protein, 690 aa, Gibberella zeae PH-1
MLRSRPTRQAIRAFGHARARTTLPATQRTKATATTSAAPQTRPVPSPAFNLEPESRRHVQPLVNRSNPEMDESFIGKSGGEIFHEMMLRHDVKHIFGYPGGAILPVFDAIYNSKHFDFILPRHEQGAGHMAQGYARATGKPGVVLVTSGPGATNVITPMQDALSDGTPIVVFTGQVVTSAIGSDAFQECDTVGISRSACKWNCMVTSIAELPRRINEAFEIATSGRPGPVLIDLPKDITAGILRKAIPTQTRLPSIPSMASQTAKQVMEKQLNASLSRAADLIKIAKQPIIYAGQGIIQSEGGTELLRELADKCSIPVTTTLQGLGAFDERDEKSLQMLGMHGMAYANMSMQEADLIIALGARFDDRVVLNTSKFAPNAKAAAAEKRGGIIHFDILPKNINKVIQATEAIEGDVATNLKMLMPMLTPTSMEQRSGWFNKISEWKAKWPLSNYEHSDAPGGSGLIKPQTLIEELSDLTSKIDKKTIISTGVGQHQMWVAQHYLWREPRSFVTSGGLGTMGFGLPSAIGIAVAKPDALVIDIDGDASFNMTLTELSTAAQFNIGVKVIILNNEEQGMVTQWQNLFYEDRYAHTHQKNPDFIKLADAMGVQARKVTKPDDVRASLEWLINTDGPALLEVVTDKKVPLLPMVPAGAGLHEFLVYDKAFDYREGQGSTSANARANQWSSRFLIKK

SEQ ID NO: 27208 - protein, 884 aa, Gibberella zeae PH-1
MATASPTPMGNGLVRRTSQRQALRRLPSRPAANHNESFSAPTNQPLPNGYHPKPQQFHDDSSEDEIPVPMKLSALTKALLNDGDPAPAERPVSPPRTRRRTSALNASTSSTSETRRQRRSGSVQPHDTRSSRPTSPAQVQSREISPVRKRVVRLSNTPQSLNQLKPTKRRSTSTSRSTQRSRPQSRPDSRDMSSDERYDSKQDSKDSKQDSQLDVNTPAQGGRVVRINAGSPSNRSRLGSTGPSSGRSADRSFVDRSTIEDNDHPEEPATVARNPPPFHHGSVSRYPSTTTRTRPEDNGNLQNSMRVRRVSKVAGSFLSGPARRGRRRQSEEEGEGHADGDILSSHEADGQPAEDQHAASYYGDGIRDFNSGSPVSGQAAARAIHRRNASNIDLRLGAARQYSRETSPRESTPEVQVPEPEAKPEPEEEIHYRLPAPRPELPSGRDQENDQPSLKRNKPSMDAILDKMPKRPMSADPAPVRPSSPDRKPLASMARNTPLRHAPPPPPKMSVLEAATATAGAATTTQAKQRRNILRVNGVAYTRLDCLGRGGSGKVYRVAAENGKMFALKRVSLENADDSTIKGYLGEIDLLKKLGEVERVIKLFDCEMNTEKQVLTLLMEIGELDFNTFLRKRYNPEAAKFDPVFVRFYWKEMLECLQAVHQCDIVHSDLKPANFVLVKGQLKLIDFGIANAIQTDETVNVHRETQVGTPNYMSPESLMDSNNPRGGRAPGRPKLMKLGKPSDIWSLGCILYQMVYGLPPFGHIANQMSRCQAIINWDHEIEFPSRGMGGMSVPPSLIRTMRRCLHRDHHMRPNCEELLHESDPFLYPAELTDKALPIDEELLGRIIQSVVTRCRERMPTEAEILSVWPQAYWSSVKKAMAGRM

SEQ ID NO: 27209 - protein, 283 aa, Gibberella zeae PH-1
MPSPRRVRLLILATIGTFIFILFYTSGFDGHHDAETSTGQEFIKKTQNAMSANEMPAPIVDFATGEKAGSAHSDKDGDGDIDEEDKKMAEEMQQRLKAAEAEAKGKANEKGGLRPDPPKKVVGVGSSAEGQNKDKIVKPAAGEKGAAAAPDAAAADKKPVTETRTKEELEARAELDSILKKSPVIIFSKTYCPHSKRAKAILIEKYAITPEPYIVELDVHPQGSALQDQLLETTGRRTVPNVMVNGVSLGGADDITEMDHAGNLVGKIVDLGNKRVEVTARTK

SEQ ID NO: 27210 - protein, 419 aa, Gibberella zeae PH-1
MKVILAINAGSSSVKISVYTADKNAEPRQIAEASVGGLTAPPATLAYSRGSEKVLKAKEVSESVKTQGDAFDLILKTFINDSELKEISSKEDIAIASHRIVHGGDYDRSQVITQDTYHHLEELSDLAPLHNGVALSIVDTCISALPSTVNVACFDSQFHQTLPPHIYTYPIDPKIAKSNRLRKYGFHGISYAFITRSVANYLQKDVSSLNMIALHLGSGASACAIKGGKSWDTSMGLTPLAGLPGATRSGSVDPSHPYSLVFHYASDVGKLSPASTKHLHISRAEEILNKESGWKSMTGTTNFGVVADSDEPSHRLAFDIFVDRIAAFVGSYFVTLEGRVDALVFAGGIGEHSAKLRSAVVNRVACLGFALNDASNQEPIKDIVQELGERDASQRVLVCQTDEQLEMARLCAEKEDIWE

SEQ ID NO: 27211 - protein, 253 aa, Gibberella zeae PH-1
MPTITEITSITEWEQLLGSVPPTTLVIVSFHAPWAAPCAQMATVLSTLASEYPDTEPPTTKWVSINAEELSDLSETYDVTAVPFLVLLRNGQVVETVSGSSAVKVRTAIETQAKQSGENAAASGPNGVAADDAVVEEEQDPEKKKEELFKRLGDLVKAAPVMLFMKGTPSSPQCGFSRQLVGLLRDNSVKYGFFNILADDEVRQGLKEFADWPTYPQLWIDGELVGGLDIVKEEMSNDAEFLTKYSVSAPAAP

SEQ ID NO: 27212 - protein, 599 aa, Gibberella zeae PH-1
MADFANFDGTPSSLGSDTNHRKAAILERHLPDGYSAEPDVAFGPANPSGSASASAANADDDSQAEPVESSLLLQGGDMHRDMFKIKARASSLRRAATFSHHAVPRLASEDELSHSEQREPGGFRRYHIQRRARQRRMSGYTIVAKNFVDFLDLYGSFAGEDLEDNDSEDESAIDDREDGDVEQPPELRPLLGRRRSSKRLRKTGDATTTKTFFTLIKAFIGTGIMFLPKAFRNGGILFSSITLIVLSLVNCGCFRLLLDCRQIYGGGYGELGEAIIGPRFRSLVLASIAISQLGFVCAGLIFTAENLYAFLDAVTANHRELMFSVPTLIALQLVALVPLALIRNISKLGPAALLADVFILIGIVYIWYYDIAALSQHGMDSTVKLFNPRDFTLTIGSGIFTFEGIGLILPIQSSMKRPEHFPGLLYLVMFIITIIFTSVGALCYATFGEDTKIQVISNFPQDSPLVNAVQFLYSIAVLAGDPVQLFPAARIIETSIFGERATGKKSIAIKWKKNALRTFIAGVCVGVSILGASDLDKFVALIGSFACVPLVYIYPALLHYKGAAQTTRAKVIDVIVMVVGFIAMVYTTLVTVYQWIDSV

SEQ ID NO: 27213 - protein, 426 aa, Gibberella zeae PH-1
MSNQTQKLQPAGRVQGQKKDVWSMINEAAASSPIQPIVNLGQGFFGYNPPDFILNAAKEALDRVECNQYAPAKGRPRLRQALADAYSPSWGRQLDPETEIIITTGANEGMLSAFMGFIEAGDEVIVFEPFFDQYISNIQMPGGKVVYVPLHPPKTGATKNSSAADWTIDFEELEKAFTPRTKMIVINTPHNPVGKVFSKEELQGIADLAVKHQVIILSDEVYDKLYYVPFTRIANLSPEVEKLTLTVGSAGKNFYATGWRVGWLIGPQELIQYVTAAHTRICFSTPAPFQEASAIGFEQAGKNGFWDETIKEMKGKIDRLKEVFEELELPVTYPEGGYFLLVNMAKVKLPEDYPFPPHVASRPRDFKLAWFLIQEIGVAAIPPTEFYTPVNAHLAEDYIRFAVCKNDDILEQAKERLRGLKKYIPE

SEQ ID NO: 27214 - protein, 943 aa, Gibberella zeae PH-1
MKPAQPPPSSQPAINPPAKPKRKNLNPQALVSKFWKKYHSKTPGKVTSIFPQSLYESLLTDADSSEPKTRNAAQSYEAAAKNCRARVRAVVKECERTNAKFSDPDFDIESDFASHQDNCLFGLVRNTCPICGSDSDDDEDIEYGSTSDARWTKKPRDRKHSDALKNNKRESNTDSLRGDGPYHGGFVCRQRRPGSVHRIPWIFENPQFTIDGFSSSDVKQGATGNCWWLAALATIAHRKDLMRKICVARDEECGVYGFVIYRDGEWISTVVDDNLYLKNRDFGEDSQVYDATLKKARQYKKQKQTGSEALYFAKCEDPNETWLPLLEKAFAKVHGDYQSMEGGWSGTAVEDLTGGVATVVAGNRVLRKERLWREMLGSDGEDGEFVFGLSAGGPGDEHKNGIVLQHAYSVLRVAEVQNEDGVKFRLVKIRNPWGQRSEAGQGEWHGPWSDGSKEWTPYMIKKLKHEFGDDGVFWMSFGDMLDNFKWMYRTRLFDERWTVAQQWLSISISWLTGYLKKKFVIEVEEEGMVVIVLSQLDDRYFTDLKGQYEFTLSFLIKSSDGKNTICAVRPVHQFDRRSINCEVELEPGTYEVIPKIMAERLVWRPRVEKMVKRAADENPKKLRQLGLQYDLAHAKGGILDEDDALRKKREAEKSKKLKVKKQEVKKKQMAEAMARMEEAMVAMRNEYNQYLNEKENEKDKDKKDETAENDEEKKKDDEPEPKDPEPKDPVVEPKDKGDHQAPPGFWPEDSPSKGDLDVSKHPETLVEPRKEPPSSHGTNEAMEEKKRMSFRTPSPRGTSRRGLPTPPMQYQYQYQDQGPLRNSRRLTMTDYSMDPYPVFTPPTEPASDSDLDSSGSGSGSGSDTASDDNNSSSSDSDGMGLYPRRLFRQRKRQPWNAVCVIGLRVYAQHAGIKVRLADQKRDEATELVAPEASSTAGPSGMDG

SEQ ID NO: 27215 - protein, 2900 aa, Gibberella zeae PH-1
MASAEASADDHQRAVLERQLHGLPNDAEQPNSKPNIIIYATRLDKVILSLSSICAIIAGALNPLVPVIYGLLVSVFNGFSNGSVEASELRSEISTFSLYYVYLSIALFVFTYLGTLGFYFSGDRIARALRIAYLEAVIRQNMAFFDVLRPGEISTRIMSDMGILQEAITSKTSIMLSAVATFCAAFIISFIMYWKTALILSPFFVTMLLMFSVGGSYSVKHQKVSRQKYGHAAGIPEEAFGAIRQVAAFGMQTFVKEKYSQGLKEAAVAERKAQIIVACLIASMCAMPCLIYSLSFWTGSIFLVRGETSVSAITSTTLAVTIGMFAIIRIAPSMQALVSGIAISGSLFETISRRSPQDPLGDKGELPGSLSGNIQLNNVDLVYPSRDQAKVLDNITLQFSANKTTAIVGPSGGGKSSILGLVERFYEPTSGSVSVDGNDIQSLNLRWLRQQIGLVDQDPILLDTSISENIWYGCADANDTTPESKRLDLVIDAAKKAYAHDFIMASPNGYQTRVGEKGMQLSGGQRQRIAIARALIRDPKILLLDEATSALDSASEKAIQAAIDIASKHRTTIIIAHRLSTIRNADLIVVLSRGQVADQGTHDELMARNGLYADLIEKQQIKEESQKQAGASIGQDDEVDVMLPGTQGAPQESENEKAGTTEATILEDTTNGNTDLSVPNRKRAFSFLLAMSKPNWKVLTIGLICSLLAGLEIPAESIFFAKLLTIIGLPENKYSQLRRDVNLWSGLYVALAAAGFVFWLGVGTTLAYATQKLSKRVRETCCDKITVQSMEFFDEANNSPSALSNALSKGTDDLAGMGGSVMGGILTFTATIIGGIAVSLAVGWKLALVCTATIPVVVACGWLRLQVLAAFDARIRQSGVDSAAYAGQIVRSMRTVASLGLEKRVLGMYGGFLSNHAAKSLRSILVTSALYAASQSVVYLCAALGFWYGGTLIANGEYSAFQVYVCFVCLISGSQIAGSIFTFAPDAGKAMHAAQELQKIAELPDGEKEIQSFHATEHTHEKKAVPSHLLDGPDPWQVKFQDVSFAYPSRPHKPALNHFTVSVEPGKTLALVGQSGSGKSTCLALLERFYALQHGQILVDGQDIRSLDLNSYRLAISLISQEAVIFSSSMRENIAVGVVGHDVSDDEILAACRQANILDFVNSLPDGLASPVGTGGSMLSGGQKQRIAIARAFLRKSKLLLLDEATSALDSESEAVVQTAIEAVKKNRTTIMVAHRLSTVMNADVICVMREGSVAEIELSCNEEHLDPRISSCDVILSRHACIQPLRLVRIMHKQKYTKGSKGPYRRLNLKPPVNGNDASHEKQMEYWTRQLERSKPAEFLFDKPRPGVLSTSNISRQELKITGSLYGHLQRFCKNHQVPLLSILLAAFRVTHYRLSGTEDATIGTNKSGASPSPGDVDTEQSSNTQLSSRDLQCIRIKVQDELTFEQVVRLVDETLKNAHLNQQISFEDLVSQIFPQGPANGDTAEKRSSSLPVLDLEFRISKASGGLYGHAFFCQDLFHEETIRAIIEVFYEVLTRGMKEPQTPIASLRINGNNTPEITAISSDSQYSRDSSIIEVFQRQVTATPVAIAVKDSLQQMTYDELEKASGIIEVWLRNKGLAPETLVSVLAPRSCQAVAAILGILKANLAYMPLDVKAPASRIGAILSAAPGHRLILVGPDVVFPVLSQADVTLVSIPEIFKARQSETITDATKPSATSLAYVMFTSGSTGQPKGVMIEHRGVVRAAAVLSPIWGTCPVAHIANIAFDTSTSEIYTPLFNGGTIICVDDMVAVDAPRLGELFHKEKVEVAVLAPALLKQCLSASPSTLEALRILFTAGDRLDAQDARRVLDLVREGVFNSYGPTENSVLSTLYQLRKEDNCVNGVPIGRPVAYSGAYVVDRELRPVASGVIGELLVTGDGVARGYTDPARDEGRFVNIILIEGNEPVRAYRTGDRVRRRPVDGLLEFFGRLDYQVKIRGHRVELPEVEQALMMANETVIDAVTVVREVGEESDRDVELVSFVTISEADVSDSSHTNGETSGALAAEDKTEQGQVDAWKEHFDKSSYADIESHIDTDKLGRDFIGWTSMYDGKPINLTEMNEWLDDTMTTLLGGGEPRNVLEIGTGSGMILFNLPRSIESYVGLELSEQAAAFANKAANTIPVLKGKVDVRVGTVTDLNSIDNPRFNNPDLVVINSTVQYFPGPEYLLKAIENLLQLGSVERLFIGDVRSYALYREFQVSKALHGINFYSQGISLDSLQQSMAAIERAEEELLVDPAFFTALKERLPNLVEHVEILPKHMVATNELSCYRYAVVIHGKPVSKSANKLPVRELGDGQWIDFQKNQLTRQSLLDMLDGRAKTNSDPELDIVAISNIPFSKIVFERGVLGHYDNNNGRKSTDSVDWLEGCRVSATTSIDTGGSLSAVDLHEIAGSAGYLIQISCARQESQNGGIDAVFYRDPCPERVSRILFNFPTDHQGRDWKSFTNDPLQQRHWRQVEEKLRSHLKARLPSYMVPSVVRVLEAMPLNDNGKVDRRELTKKAQTLVVSKSFSGSSSASKSKDHPRTELEHAVCDEFASVLGLSQDDVGISDDFYHLGGHSLQAARLVSRLNQRLGCRLYVSDLVRSPTPMALGSLIANLPTNIPNGNGVNGDKSDGTKLIINGQVNNNLEPPRGFSELYSRPQSKFTIVLIHGLWGQGSVFAPMIPFLDPLFDVLVLDDPFFGQAQGPESIQQWAKIYLDHVQERLGNKSGSTLIFGGYSLGGLIAYEMASLWYSRHGEYQALLLLLDAAMYVSYAGNDNELEYGLTLFGQEQKQMVHDHYSKISPLTKRELSTIKPYLGPCFCLLTPESHDKGAAAWWSKRCPSLQVDSIDCSHHDLVGRVSVGEVGRRVNERCTEALKSWDQ

SEQ ID NO: 27216 - protein, 307 aa, Gibberella zeae PH-1
MAPTLLWIGLGNMGRGMSKNIVEKGNLEGPLLLYNRSVKRTTDFSATLPNGKTEVIESLADGVARADIIFSCIANDEAVQETYKTMLESDVKGKFFIESSTIHPETTEAIAKDVIAKGAEFVAAPVFGAPEMAEAGQLVGVLAGPAASVTKAKAWFQGVTSKGVIDLSDKPYSKALTLKVLGNTFILNMAEQLAEAHVAAEKTGLGTEAIHQFVQSVFGGPYAAYSERMLSGDYYKHDEPLFAVELARKDARHAMSLAKSAGVQLRNVEAADAHLAMAFEHVGPSADMAGIYGAVRKESGLEYENNA

SEQ ID NO: 27217 - protein, 394 aa, Gibberella zeae PH-1
MAPERVCLAYSGGLDTSTILRWLVLQGYQVVCFLADCGQEEDFDAVKVKAEKLGAERMIILDVQQELIDELVWPAVQCNAIYEDRYLLGTSLARPVIARAMVKVAKEHNCTILSHGCTGKGNEYDSLFNTVLAYGRADLLKFASEQNIPVSSTPKAPWSMDDNIIHCSYEAGILEQTELEPPKDMWKRTVDPMKAPDEPTPFVIHFEQGVPVKLEVAGKTITGSLEIFKEANEIGRINGIGRVDIVESRFIGLKSRGCYDTPGLTILRQAHIDLEGLVLDSKVRAIRDRLTQDWSACIYNGMYFSPERELVEHAIKFSQRQVEGKVSLVAYKGNAYVVGRSSETSNLYSEDESSMDTLDMNWTPQDTTGFIAIQGIRLEKYGARKIKDGEPLAP

SEQ ID NO: 27218 - protein, 466 aa, Gibberella zeae PH-1
MATPYNGTSDHADDGYSSGVSDLNIFYETGHLVFLVTSAVLVLLMIPGVGFFYSGLARRKSALTLILLSMVSVAVISFQWFFWGYSLTFSRTGNAFFGDLTQFGLMETLAQPNGSSALPDILFCLYQGMFAAITPALAIGAVADRGRILPAIVFMFLWSTIVYDPIAYWTWNANGWLFNLPSYDFAGGGPVHVASGTCALAYSLMLGKRTGYNRNNGLPYRPHNVTHVVLGTVFLWVGWFGFNGGSALAMNIRAIMACYVTNLAASCGAIAWILLDYRLEKKWSTIGFCSGAISGLVAITPAAGFVKPWAAVIIGICGGVVCNFATKLKFVMNIDDSLDIFAIHGVGGMAGNILTGIFGTKSIAALDGGEYDPIGWVDSHWVQLGYQIAGTLACFAWSFVLTCLLLFILNLIPGLSLRVAPEEEELGTDDGQLGEFAYDYVEMTRHMADSTHPNSDASARTSHEKV

SEQ ID NO: 27219 - protein, 106 aa, Gibberella zeae PH-1
MSQASTKVQQLIDNNSVVVFSKSYCPYCKQTKKTLDDLNTEYELLELDEVADGSALQDALEKISGQRTVPNVYIKQQHIGGNSDLQSLNSGGKLKNLLKEANALKA

SEQ ID NO: 27220 - protein, 525 aa, Gibberella zeae PH-1
MSNDDLKGLEPEANKTNYVGSGTGSDTEEGRLQHAADAKRQIGVLSASMLIFNRVIGTGIFATPGSILALLGSPGLALIIWVVGSLIAAAGTAVYLEWGTGIPKNGGEKNYLEFIYRKPKFLVTGIYASYILLMGWASGNSVVFGEYILHAANKEVDRWNQRAIGLACITTAFLIHGCALKWGLRLQNALGFIKLAIVFIMIICGFVALGGHLKIDEKPDNLSRAFEGTTGSAYGVVTALYNVIWSFVGYSNANYALSETRNPVRTLKIAAPTAIISVSVIYILVNIAYFAAVPKAEIIASERLVAASLFRNVMGPAAERAMSVFVALSAFGNVLSVIFSQGRLVQELGREGILPFSRLWASNRPFNAPLAGLFEHWVICVIVILAPPPGDAYNFILNLISYPLAIVNTFVAGGLVHLYLHREKYNWNAPIKATLPVTVFFLLSNMYLVIAPFIAPDDPSQNQYKSMPYYIHCVVGIGILVAGAFYWLVWAVILPKIGGYKLVRETHVDEIDGWESNRFRRVPLN

SEQ ID NO: 27221 - protein, 790 aa, Gibberella zeae PH-1
MSQQGKHSAKTVLEKFIGADHTEPEERAPSITNADLYIEEEPTVGEFLREITPSIQQVGEYFYNLFPFLSWVGKYNLIWFLGDMVAAPRTGITVGAVVVPQSMAYAQLAQLPVEYGLYSSFMGVLIYWFFATSKDITIGPVAVMSQVTGNIVLQAADSLPDVPGHVIASALAVIVGSIVTFLGLARLGWLVEFIPLPSICAFMTGSGVNIIAGQVPKLMGIKGVNTRQPTYMVIIDTLKNLGGSKLDAAIGLSALVLLYAIRIFCGTMAKKQPHRAKLYFFISTLRTAFVILLYVGISAGINIKHREKPRISIVGDVPSGFTHAAVPQINSSIIKSFVSELPAAVIVVLIEHISISKSFGRVNNYVIDPSQELVAIGVSNLLGPFLGAYPATGSFSRTAIKSKAGVRTPFAGVITAIVVLLALYALTAVFFYIPNAGLAGVIIHAVGDVITPPKVVYQFWRVSPIEVIIFFAGVIVTIFSSIENGIYTTIAMSAAVVVFRLFKTRGRFMGVVRVRTMKANVSDGTASPGSVDEGEGSLRAGFLPLDHGNGSNPKVIVRTPYPGVFIYRFAEGFNYPNASHYLNHLTETIFAECRRTNPALLGKLGDRPWNDREPRHIKTVENDERPILKSVILDFSSVNNVDVTSIQALIDVRNQLDKFAAPEVVDWHFANIENRWTKRALAAAGFGFRTPRTGNEAAGHWKAIFSIADLGGDDSAATAAALDEKVKNAPMRQDIEAIEGSVNSASMEKLPRDPTSTRLVSVGGLNRPYFHLDLQEAVDAAVAAAELKQH

SEQ ID NO: 27222 - protein, 395 aa, Gibberella zeae PH-1
MLFKSFTFLSIASVAIAHGSHDQEPMEGPHQSLWYNTLPGDGGTQADSVFSGISTFGRLPYQPCLGHNSIKYDIAFIGAPFDTGTSYRPGARFGPSGIRQGSRRLNLYGGYNVPLATNPFNSWATVLDCGDIPVTSYDNQFALQQIEEGHYSILSRPPVTDADKLGPASKGRTLPRVITLGGDHTITLPLLRSINRAYGPVTVIHFDSHLDTWRPKVFGGSPSEAASINHGTYFYHAAMEGLLVNDTNIHAGIRTTLSGPSDYDNDGYCGFEIVEAREIDTIGTTGIIEKILKRVGPDRPVYLSIDIDTLDPAFAPATGTPETGGWSTRELRTIIRGLESLNLIAADIVEVAPAYDTNAEHTTMAAADVLYEVMSIMVKKGPLSRMMDGKLQEEL

SEQ ID NO: 27223 - protein, 431 aa, Gibberella zeae PH-1
MAAPAPAPAPAQTNTHNNGPIDHNDLEEWKSRFNDVLARPSEHVNSKSPETSQPWQNSFFGCFSPISLCAITCCVPCVTFGKTHHRLQKNKNLEGYEPVNTSCLLFWASTCVGLHWIPLALQRASLREKHNLQGSCLVDLATACCCGCCDLIQQDKEAEYREAQSVATGEGYKANEGVKIQNTETTEKMDTTQDHFQDAALQYLVNPLLDASQISDGIDGSSHDETIVPSTPPKSHPYLLVNIGSGVSFFQVSENNQCQRISGSSFGGSALCGLLLLLTRARTYEDMLEQAEKGNNANVDKLIGDIYGMDYNRIGMKMTAVASTFCKAFSLEHRPEAEAEEQSVEDPADIKSFSDADICHSLVFAVFNNIGQLATLHSRIHGNPDIYFTGPYVQNCQLLIRTLCIAVRYYSQGEKKAHVVVNQGQAGDLTL

SEQ ID NO: 27224 - protein, 343 aa, Gibberella zeae PH-1
MAADDSPTFEEHFSRLSIDHKSVGSQSKRVPKTKIPQSQPVPGPAQPKCLLPVKGPVVANRVDTPTPHKDQDTNSPSPSSPQKPTTKSSTTKSATLYKHLHLGMFEIGRPMGKGKFGRVYLARERSSGFICALKVLYKTELRQSRMESQVRREIEIQTNLRHPNIVQLYSHFHDSKRIVLVLEFAAKGELYKHLQKETRFTERKAARFIAQVVSALQYLHRKNIIHRDIKPENILVGMHDELKMSDFGWSVHSPSKRRETMCGTLDYLPPEMIKLGAVDAGRFYDEKVDVWSLGVLTYEFLVGVPPFEDTPVRTQRRIARADMQIPDFISSKAKHLIKSACSL

SEQ ID NO: 27225 - protein, 345 aa, Gibberella zeae PH-1
MTKPTVLQLGDDIKWNHDLHATFKSHFDIKRSHSMPRAEFIQALKNKTFGDFFAIYRPFWNTGGEMGNWDEELISLLPASCKIYASAGAGFDWVDTATLAKRGITYCNAAAACTESVADAAIWLIISVFRQLSWSSIAARSGSSEQFLDAQRNLAPVSRNPSGFSLGIIGFGRIGRRIAEKAYKALDMKILYNDVVQMPKEIEEPIGAVYHKSADTLLAEADCVLVATPFAGEALLNKQGLAKMKKGAKLVNIARGKLINEADLVEALQSGHLSGAGLDVFEHEPVISPELIKMKNVELLSHNAGASLDSHVGFEKLGMENILSFHKTGKAISPVNAHLIKQSKL

SEQ ID NO: 27226 - protein, 631 aa, Gibberella zeae PH-1
MSDPVAEVTEATVKLVLDEVTGEQVTRNELKKRTQKRAKKAAAQASREEKAKNQEANPKPAAPKPKAQEPTQLDPDAMFKQGFLADVYKERPVKPVVTRFPPEPNGYLHLGHAKAIAIDFGFARYHGGKTILRFDDTNPDEEEEIYFEWILKIIRWLGFEPSAITHSSDNFQKLFDLAKELIKKDKAYVCHCNEAEIKLQRGGKEGKEGPRYRCAHAEQDVETNLQKFQDMHDGKYAPQTAFLRMKQDITNGNPQMWDLAAYRIPKNQKVHHRAPEWKIFPTYDFTHCLCDSFEGITHSLCTTEFILSRESYEWLNKSLEVYEPMQREFGRLNVSGTIMSKRALKKLVEGGYVRAWDDPRLYTLIAIKRRGIPPGALLAFINELGVTTAKTIIQIARFEQTVRRYLENTVPRLMLVLDPIPVTIEDHEETVELEVPYSPKDPKFGTHKVRFTKTVYIDRSDFREEDIKGYFRLAPGKTVGLLNAPHPIKATSFEKDESGKVTSIKAVFDKESKPKTYIQWVPEGSIKLEARVQSPLFKSDDPTAVEGGFLNDINPDSEVVYPEALVEEGFNEVRQRAPWPVTAGETNEASGPESVRFQAMRVAYFAMDSDSTDDKIVLNRIVSLKEDREKN

SEQ ID NO: 27227 - protein, 902 aa, Gibberella zeae PH-1
MSSSSSRSSSPTRASTEDLGDRSKVTPQQVIDKFWKQFTTKNPGKATTVIPSNTYTEFAAKRGNQVTTTTCQASYEDAAATCRAKVEKIIKECRRINKKYRDPHFDIELDLKWGQNDCLRSLSNRDEFVPGEDLRPESVKRVGDIFDKPRFYIDGPTANDIRQGRNGDCWLIAALCTLSEKPGMIERLCVAHDQDVGVYGFVFYRDGEWISEIVDDFLYLIKPDYDEGYLDRVLFDDIERVDPDEAYRRIFQSNSGALYFAQCAHPQETWLPLLEKCYAKAHGDYCSIEGGFGGEGLEDLTGGITSELATTDILDKEYFWKEQLLKVNEEFLFGCSTGIFGGWGERKGIVEGHAYSIQKAVEIDGKRLLKVKNPWGKHEWTGPWSDGSKEWTAEWLQKLGHRFGDDGDFWISYEDLLRKYQAFERTRLFTPDWRVTQLWTSMSVPWALDYHDTHFSFTLSNSGPVVIALSQLDDRFFRGLEGQYRFELGFRLHKAGHSDYVVRSQTPFRMTRSVNVELELDAGDYEVRVKINATRDHEILPIENVIKNNAKSRREKLLRIGLAYDLGHCKGRFVETPEEKIARQAHEKKIKQKKRDKIRTKILKDREDSHYLLKQDFQRSEHKRLKNKERKKFKEAALKAKREARLAEKKAIKAEKAAQRALRREAKAAAKAEVEAKEKAEAEANQEEQAEKKVEEVAEKSETDAPKPEEPMTPESDNSGEQDVVEEKSAEENPAEQVTEEAKGSESDSESSSDQDTEEEVETDVESIGTLLDLADREIWIHVDNFTGEVPASDSDSSSDSESEAGDDAEKDPWNAVAVVGIRIFHKGLGEGEEDGDLNLKVIRPIRFGKDDEEVDVDKKCSTKVLDVDDSAKDATLVGDTQEKIRFIKGESPRRRTVTSMF

SEQ ID NO: 27228 - protein, 404 aa, Gibberella zeae PH-1
MKLISRKVPKTLEDETVSLLPEDPEDMWHAYNLILPSDIIHAHAIRKVTTTSNTGSTASERVHTELAIKVKSTFFDPVISSLRVSGTVVAENPYVNLGSHHTLDLEVNRPFTIIKPEGWDSVARATLQETLSDDKDGAVAAVVMQEGLANICLITAFRTVLKVRVESVIPKKRDLASDQDAGMRRFYEKTLQTLLRTMDFSQSRPLLLASPGFVAGDFKQYIANKGRDKADKMLTALAKQATVIHSNSGHVHSLNEVLKSPEVLSGMKNMKFARETQYVDQLFDRLKLDDGRAWYGTSVVEKAVNDGAVGPGGGVLLVNNSLFRSEDLATRKKYVALVEKVRSDGGEARVLSSDHESGQRLSMLGDIAAILNYPMLDLDEDEEESEEKEEEEDIQLPSMADNVI

SEQ ID NO: 27229 - protein, 1165 aa, Gibberella zeae PH-1
MDLRNILDATDFYSNFTAALSTFSLDHLDSPTLNLQIIIQEGNSADGDRSGSLETNEEPILQSGHLLLSHKIPLRIGNGSCSIEPASPSLVSREPSPELRIPTNQRQVEIQRRTQSHKSHKRQGGLRLAAVNGDVPVEGDVDNANPRQMQVGQENFPKRVKVKHDGVFHPKESSLGKFVAGVWEQIHSGVILEPHVLTEQVQLTSRSSGNSPSGDLVSTAPSIRPDQTWESFNRSNIFCQRVTQASRTCRSIEVIVQARWVELFDSYVEYLASTNPNLSMTKCRMRAIAEACTDFGWTEKELRNKMGIWRGYKEIKDVLGWVALVFSGMGLYRLCKYRVDFDKDKFSRARTLGKRMEVAADTLHTNWRQLLAIVGESTEPRFAGHPHDWVVQQDGSDPVPLRSTYLAYDSNFTFEHLEESIIDTALWGADDPRWTPPSSAICLSGINVCDLCSEVQSNESAVNACKCFPNLFGVPRLPIAVQVFCTSNGRNNGLQALVAFERGTAIGEFVGLITKDIEEQDVMDSQAGGTRYQIWQGKQGNFTRFANHSCKPNAQFEKFVWLGTQHIVMNNTADIPLLFRFNMINRKIPLASYLFTRLKQAGTRRIYGVPGDFTLRALDHVPRSGIQFVGCCNELNAGYAADGYARAQRHRLQSGLGALITTYGVGELSAANAVAGSYAEHLPVVHIVGTPSQKARQVSTTSVGGRSPHLHIHHTLADSRIGVFREIAEKFTVAQLDLSGVDAEDVPTKVDEVLAKALYHSRPVYVELPSDAVETVVSSTLLERPIEERHTINDESSHLETREMADSLLQRLYAAKRPLILVDRGDGIETIRPDINEFVQKSGIPTLSLPSGASMVNNSLPNYFGVYSGSIGIVDLTSAVKSADLVLAFGCQFSDTQTLGWGVVPERNSMIMIGRNNIEDHQTGTGEILRMVTANLDKRSLAEQDTSSWGNFRHLPSQTVEPASPINQDEFYIHLNKYLKDDDNILLGNATPIIGGRDFVLPPSSQLIASGMWFSIGHMLPAAMGVSQAKADQGSSGRTILLDGDGSFQMTAQELSTIIHKRVNMVVFIINNSGYTYERYIHGMDEEYNDVAPWNYSLGPNLFGQAPDGYPIQSCRVHTWKELDSVLNSEGFSTGKGLTLVDIVIDKYDISERAKALFELVNKQL

SEQ ID NO: 27230 - protein, 482 aa, Gibberella zeae PH-1
MASSKITPVTEWPDYSVDPTGGDPFTKDLNAPYDKAICTILCWQITPAIGFLYAGMHRRKAALTMVLQSLFCACAVGIQYWIYGYSLYQSRTTNPILGDLSLAAFRNVLAQPSLANGDIPELLYAVFGVTFVTATAMILAGAMLERGRLWPSMVFLLCWTTFVYYILAYWEWNPSGWLYKLGLYDFAGSGPVHIASGFGALAWSMMLGPRIPDATVTDRKKAVHYKPHNPLLMCFGTVLIWFGWFAFNGGSTANLSLRSIYVVVNTNMSACAGGFGWVLLGYLHTRKFSLVGFCSGIIAGLVDITPCAGYTPIYVAPVIGLVTTVGCFYTVKYKYLLSIDDGLDIFAIHGIGGFIGDILTGLFAAKFVPALDGVSGDSYAGGWWDGNYKQMGLQLAGATTCAAWSFVISCLLLFVINKIPGLHLRASEEHEIRGLDFKYLSDVEWEDHYMNGGITPFMEGTPVRAVTPQEVVEPKNEERKMD

SEQ ID NO: 27231 - protein, 326 aa, Gibberella zeae PH-1
MSNPLVVSISNLAAYTPQETIELVSRSGVKRGNMRPDKVFLSAVSAGCLLSFGCGVSLCAMTAPWYAENAPGLVKLFGAGVFPLGLVLVVLTGADLFTATTMVSQTGINAVLQGRLRIHKMLLHWFLCFFGNLAGSLFVMSIIMGYGGVFDADPYKEVVVSFATKKQIAPQVHQIFLKAIGCNWLVCLAVFLGIQAKDLASKVIGMWWPIFAFVVLGLEHVVANMFYMTLAIWLKAPDLTVGLYIWKGMIPATIGNIIGGGMFVGVYYWYMYLAMEDPVKVDGVEYQGPVVDYDMHWFSHKKENSAVDEESRIESAPVSSPASVVM

SEQ ID NO: 27232 - protein, 848 aa, Gibberella zeae PH-1
MDEPSEKRVAEDEINSAERQDDGISLKDDTVLTKAQLLGATPDEVIEAEEHGRTLDLEEAKKLAETLVYFHEHDPNFSSESVIRLQSFLANEELFQNPEKNEEAISDIKTEISLLTINSPYPEVRAVVSNKDDPSTPAGTIRAWTIGLLFVVLQSFVNQLFSVRQPSIRLQAPVIQLLSYPLGKAWEKWLPVGEFTLFGSQVQLNPGKFNQKEHMLISIMANVSTSLPHSRYIIFTSWLKKYFDLPFAADFGFQICLSLSMNLLGFGLAGLVRRFLVYPSFCIWPRSLATVALNQSLHNESGNSSVLGPFKKIYSMTRYRFFMLSFAAMFVWFWFPDLIVSALSLFNWLAWISPNNFNLAAITGVSKGLGFNPLPTFDWNIATYYIDPLLVPFHVTFNMFLGAVLGGITIIAMYWNNTYNTGYLPINTNTMFDNTGAKYNVSSILDDRGLLDVEKYQAYSQVHIAASSVTYYAVISYAAIYHWNDIKLGFVSLYQSFKKDSKVNQFKDVHTKLMEKYREVPEWWYMILNLTPLEIVGVAFGVASVAAWPTNTSVGTVFFGLALAVIFTVPTGIIFATTGIEVEFNVLAEFIGGAWQPGNALAMNFFKGFGYVTVAHALDFANDLKLGHYLKIPQRQTFWCQTVATIVSAVVCTGVMNFQIRNIPDICESGQKDRFTCPGVESYFTAAVLFGSLAPQRVFGQGGMYTALLAAFPVGLAFPVLYYYATRNLPKTHFLTKLHPVVLFSGGHIWSPYNLAYVWPAVIPGWISWVIVRKRYLAFWAKYNYVLSAAWQTGIALSAVVIFFAVSYHGASVNWIGNHADSGCEANACTRLKLPEGEIFGPQPGTFP

SEQ ID NO: 27233 - protein, 789 aa, Gibberella zeae PH-1
MSVTNVETKGPHGPDDTLETSVSQVHSSDNADEKNIDTSKNAVLGAEIHDVSSTDHHNDSDTDSKNVIIVTGADASRHLLPMRDDHDNALTFRSLFLASCLACFQAVMYQIYTFKPTQITIQGTFIVLISYFIGNAWSFALPRGDKYEARWRAKGNTGSLPLWLKFIKLINPGPWGLKEHAICAITATSASNAAESVQVFAAQDLFYDMPLSPTTVILSTISIGLFGYGLCGIMRPVAVWHVDAVFWSNLPTVKTLQGLHWQEVKDSKPLRYFWYSFTGMSLYEFFPAYIFPWLNSVSIPCLAAMKATGAKAEHLTNIFGGATNNEGLGLFTLSFDWQYITSFNTSLPLPLQAHMAVGFFVCYIVMLCIYYGNGWGARSLPFMSTRLLMENGTTYPVAQVFEGGILNEERLLEFGLPRLTGTFAYAMFMANAAIGALILHCILFWGKDVIKAFKSAKEGRYDDRHHEHMAKNYKEAPWWWYISILVGSFILGLVVVIKENITLPPWAYVVSLVLGSVIAPVSTLLYSRYGNGIATNNLSKMLAGLMLPGKPVGNMYFAAWSHNVISNAVNLSGDLKMGEYLKIPPRVMFLTQVWGTILGGFINYAVMISIVGSNRELLRDGDGNSSWSGATMQSYNTNATSWALAGYLYKIGGFYEVVPFGLLVGASLVVMHRIFYKFYPKIKNFDVADINFAQFIQFAGYIPYNQSQTCVILSQILSGFFVQFYLRNYRPRIFRDYSYLVTGAFDGASLTVLFILSFAVFGAGGPGHPFPSWWGNNVNGNYDLCPVAE

SEQ ID NO: 27234 - protein, 782 aa, Gibberella zeae PH-1
MDSSEKRDITPQASSEGDVISTDKKDLPRDEKDNYDVEVLKSEPTRPLETAEDIVTHVIQVDDDPTMNPWTVRMFVVGIGLSAFGGVLQEIMYFKPQVVYVSVMFLTVLAETLGTGLSYIIPRKGAIGRFLNPHPWNRKEHTAAVLMASAASVSALSTEALSVQKLWYGGYPNQAAGIFITLSSQLIGYGIAGMMRSVLLYPTKMLYPANLPITTVMETLHKPKSETRKRFQVFWIVFVAIFCWEWFPEIQYIFPLLSAVSIFCLADRNNPVFTNLFGGSQGNEGMGFLSLCFDWNYIAGFGSPLWMPLQTLVNSFIGYFGGILLSIGLYYSNVWRAKDFPFMAQLLYDGSSNSTNYVQYNETSIMNPDFTVNNDAIDKQGLPYLTATYVNYLITSNAGLTATLVHMLLWNYAEVSLGWSWITMSTLKKAFHPQTYIFWRQSGSRTEEEKTKLRDDPTIDPHYKLMLDYDEVPNSWYFLVFAASFIVGMTCLYVMKSTLPWWGFILAVVFLVVFLVFFGAQYAITGFSFNLQPIFQMLAGYMFPGRPLANMYFTSYTYNALSQGFLLLRDLKLAQQNKLSPKATFTTQVIGCCLGALLNYVMMISIIDNQAPILKSAEGTNIWSGAQIQQFNTLAVAWSIAPRMFSIGARYQWVTIAFFIGFLAPLPFYIAHRFFPRMRIWSYLNTAIILWYLGELFVGLNASLTSYYILGAFGQFYLRRYRPQAFVKWNYLVSAALDGGTQVMVFIATFAVFGGSGKAVSFPEWAGNRVNNYDYCKYNAQG

SEQ ID NO: 27235 - protein, 423 aa, Gibberella zeae PH-1
MTQTSSKQKAFDIAIVGGGIAGLTLAIALHRRNIPVTLFERADNFHEIGAGVSFTPNAVQAMKVCHPGVSEAFYKVCTWNSWESKKKTWFDFLDGTTEDGKTAFSIKTSLGQNGVHRAHFLDELIHLLPSERVQFGKQIEQAEEDADGKIRMTFSDGTTAYADALIGCDGIGSRVRKIIVGENHPSARPQYSHKYAYRGLIPMDKAIEAVGEERARNACMHMGPDGHILTFQVNHGEKLNIVAFRTDPNEWDNPSKMTKTARRQDALDDFKGYNSLVRNLLALTDETLSVWAIFDTGDNPVPTFYKGRIAILGDAAHATSPHHGAGAGFCIEDSAVMAELLADERVQSRSDLEKVFAAYDESRRERTQWLVQSSRFVGDAYEWRAKGVGKDIPGIEREINERIGVISNVEIAKSCEMARELLA

SEQ ID NO: 27236 - protein, 579 aa, Gibberella zeae PH-1
MSASKTGIKVIIVGAGFGGLTAAIECHRQGHDVEIYESFPELKVLGDIISFGGNAGRIFHRWSDGEVVARLRPMCINIQNYGFRIHKWDTGEVVYHQKRPPPNPEAPVLNGHRGELHEIIFNYARDELGIPIHLGQRVSEYFENEENAGIVLKSGEKVFGDVVIGADGVRSKARELVLGYVDKPKSSGYAIWRAWFSNKDMIQDPRTKEFCENGDTFNGWIGQDVHFLFSTLKGGKDCCWVLTHKDDHDIDESWSFPGKIEEVLELLKDWDPTCRAIVEKTPSVVDWKLVYRDPLPTWISQKGRIALLGDAAHPFLPTSAQGATQAMEDGVTIAVCLKRAGKGNIPGALKAHQNLRYERVRAVQKTGESTRDLWHKTDWEKAKKDPSSIGFPREDWIHGFDAEQYAEENFETALGDVATQQDPERNVLGQEQPVVTKIALLAPATSGRQTCIVDLQSIPGSNRGEMKCKWIQSTTCLSLVNDVSLVPVQAMLSSFLFSLALFAFWLRSSVVSVLFSLISERSPRRPTLIIPIFGFRAISSVLAHDFAHCVPSITLPLGDANAHLLGLNLFIVVSGLPGQ

SEQ ID NO: 27237 - protein, 412 aa, Gibberella zeae PH-1
MGSLPDLHIVIVGGGIAGLATACALRHPNRRITVLERSRLLREVGALISLQPNASKIITKWKLDPFLESAEPQIDQGFRIFDADGKLVRELPFQKGQFGADRVLYHRQDLQSALGNAAVSELTQGKPVDIRTGCQVASIDCDEGVVTLDSGEKVHGDVIIGADGIHSVVRTAVVGEKREALPTGTSAYRMLIPVENLKDLSLPEKVLDPADPKTTMIMGHDRRIIMGPGRGSKLYGIVALVPDEKLSEESADSWVAPGSIEKLLEAYSDFPSWLHNIFKAAPDIGLWQLRDIDPLPNWVKGRTILIGDAAHAMLPTQGQGASQSIEDAEAISAFLSEVHSRDQVGEALKRVFAARYDRATLIQKFSRDQAKPATDGVSKEIKLDPAQFMKYNSDYDGAVDWEERQKNGTDKP

SEQ ID NO: 27238 - protein, 357 aa, Gibberella zeae PH-1
MSTKYSPLPTSDDSAMSSDVSTGRRPRVVSLGRPEFIGEKYIGEFQKDFDYDILDVTNHQEALEKLPLMLKQHGPIDAFIIRMGRPPYRPFDKIFKLLAPHCKIIASAAAGYDDLAEEWCTEQGIWLCNSVNAVAEATADMAFFLTLAVIRDTYRGERCLREGNWRGPVVPSRDPWGMTLGIVGLGAIGKCLAKRAVAFNMKIKYYNRRRLSAEDEERYHATHCPSLNELLAQSDVVSINCPLTKETENMISTKEFETMKDGAFIVNTARGAIVDETALINALENGKITRAGLDVFLNEPDLNEYFKTSDKVAIQPHIAGLTDLAFQRGEREAFENIKALFKTGMPVSPVNYPIEEF

SEQ ID NO: 27239 - protein, 789 aa, Gibberella zeae PH-1
MANRPSHSRTNSSTDHRPAQPSTLRQTVNRNQNDASATGNPAPPESPGHPQGATIDEIFANESTPLIDGNNQRPSQRRGSVHPAHPGVCSHGTFSPRPMSPTLTMRSTDEDGSETAGSGTHIPVLDNAITTIVGHEDWKKWLKKRMRTKTMGHSSVLAEQAGIEDTAFMYMAYYIPCLNWMRQYKVSYLRGDLIAAVTMASFYLPMALSLAANLAHVPPIHGLYAFVFNPFIYALLGSCPQMVVGPEAAGSLLVGTVVKQNVGSGDDEDNDMLHAQICGIVAGMAGAMVVIAGLARLGFMDSVLSKPFLRGFISAIGFVIAVDQLIPELGLAELADKAGVSHGSPVEKIRFIIGNVDKAHGLTFAIAGISFLVIMICRELKNRLQPRYPGVAYIPDRFIVVVISAILCWQLDWENQGVEILGIVKAANGQLLAFQWPFKLQHMPHIRSAMSTSFLIALLGFFESSVAAKSLGSSETIQGIQLSANREMIALGIANMVGGCFMSLPAFGGYGRSKVNKSTGGKSPASSMFLSIISLLSIFFLLPYFYYLPKPVLSSMISVVAYSLIEEAPHDISFFLKIRGWTELGLMAVIFLATMFYSLTLGMAFGVGISMLMVIKHSTRPRIQILGRIPGTNRFENAEGDKASLEFVEGCLIVKIPEPLTFANTGELKSRLRRLELYGTSKAHPALPRLRHADMNRNVIFDIHGVTSMDGSGTQVLAEIVRNYTERGVRVYFSRCPARKDHPVWRLMSSSGIVEMAGDRHFVNDVEEALRLTEYEESITGESSRHREL

SEQ ID NO: 27240 - protein, 416 aa, Gibberella zeae PH-1
MAAERIGSIIKHLAPGSALNSIQSKNPDDIVITLAVRTPLTKAKKGGFKDTSLEYMVYAILKQVRERSNLDPALVEDICLGNVSDVKAAYKVRASALAAGFPNTAGASSINRFCSSGLKATADIAHSISNGSIEVGIAMGAEQMSIGGDALDKPFDEAVTSQSQEAVDCMQPMGWTSENVSKDFGVTREMMDKFAAGSFQKAEAAQKAGWFADEIVPITTKVKGPDGQEKEVTLTQDEGIRPGTTAESLSKIRAAFPQWGGATTGGNASQITDGAAAVLLMKRSTAIKLGQPIMAKYVGSTVAGLAPRIMGIGPSVAIPKLLAQHNISMDDIDIVEINEAFASMAVYCQDKLGLTSEKLNPRGGAIALGHPLGATGARQIVTGLAECRRQKKKMLLTSMCIGTGQGMAGLFVNEQV

SEQ ID NO: 27241 - protein, 502 aa, Gibberella zeae PH-1
MRNTLIFAGNSCPVLTGQICENLGMHPASAELTQFSNGETSVRILTSVREKDVFVVQSGSPSINDSIMELLIMISACKGGSANKVTAVLPYFPYSRQSKKKSHRGAITARMLANLLGVAGVKHIITVDLHASQMQGFFKCPVDNLHAEPILAKWIRHNVSNWREAVVVSKNAGGTKRVTSLADALKLNFGIVTTDRKRVSNMTASMIMRHFDHNVDRQPTPLESNRPIPYRGPPQAERAVETDVTPKRETPPPRTRIVTNSQGSPTRVDSSARVPDPNMTEPVDSNATPPAGSPDDSVNGETDYDDHKASEVTQGRLVQGRIVEDDYPSPDRSVVDGSVDDDPMTMSHASSFFVPEPQSLGGSGDAAASSDEEDNAFEEPGAEHLITLVGNVKNRTVFIVDDMIDKAGSWIAAAETVVKKGGAKRVYCMATHGVFGGDSLEQLQACECIDQIVVTNSFPIDKDRARSISKLVVLDLSFLLAEAIRRNHYGEALSPLFQHYGD

SEQ ID NO: 27242 - protein, 761 aa, Gibberella zeae PH-1
MQTLDAGGHCVLEMPSGTGKTVSLLSLIVAYQQYMPEKRKLIYCSRTMSEIEKALVELKSLMKYRAEELGYEEEFRGLGLTSRKNLCLHPSVKREKSGAIVDARCRSLTAGFVKEKKERGENVDVCVYHDNLDLLEPHNLIPNGVWSFDDIIRYGEEQKQCPYFTARRMMQYCNVVIFSYHYLLDPKIAERVSKDFSKDCIVVFDEAHNIDNVCIESLSTDITEDSLRKATRGAQNLENKISQMRDTDQEQLQNEYQKLVQGLRDADEARQEDAFMANPALPEDLLKEAVPGNIRRAEHFIAFLKRFIEYLKTRMKVRQVISETPPSFLAHLREHTFIEKKPLRFCAERLTSLVRTLELTNIEDYQPLQEVATFATLVATYEKGFLLILEPFESDTAEVPNPVLHFTCLDAAIAIKPVFDRFYSVIITSGTISPLEIYPKMLDFQTVIQESYAMTLARRSFMPMIVTRGSDQASVSTSFQVRNEPSVVRNYGNLLTEFAKITPDGMVVFFPSYLYMESIISMWQGMGVLDEVWKYKLILVETPDAQETSLALETYRTACCNGRGAVLLCVARGKVSEGIDFDHQYGRTVLCIGVPFQYTESRILKARLQFLRETYRIKENDFLSFDAMRHAAQCLGRVLRGKDDYGIMVLADRRFQKKRTQLPKWINQGLQESDVNLSTDMAVSSARRFLRTMAQPFRAKDQEGISTWGYKDLMEHKEKMDLERIKELEEEAQRPQPAAQENNFEYDDDELDQDMMEMDGF

SEQ ID NO: 27243 - protein, 612 aa, Gibberella zeae PH-1
MPSQKNSNGTGQVSHRLRNFFRMNTGGSTGSASSDKEKDKDKEKNSASTTPDPSKPRHTKFFSNTVGRLRAHTVASEGNQLEEAMSPTAHANPYFAHQGQPGLRHHNSDSVPPSPPDTPSLKVHGPDGTPATDQTTSETKEELARRLRRVASAPNAQGLFSKNDPNNERPATAELGKDPLLTSSGALGLIEPAKTPQNEEMPTHANPEDILAALPAPNMSMAFRRTYSSNSIKVRNVEVSPSSFDKIKLIGKGDVGKVYLVREKKSSRLYAMKILSKKEMIKRNKIKRALAEQEILATSNHPFIVTLYHSFQSEDYLYLCMEYCSGGEFFRALQTRPGKCIPEEDARFYAAEVTAALEYLHLMGFIYRDLKPENILLHQSGHIMLSDFDLSKQSDPGGKPTMIVGKNGARTDALPTIDTRSCIANFRTNSFVGTEEYIAPEVIKGSGHTSAVDWWTLGILIYEMLYGTTPFKGKNRNATFANILREDIPFPDHAGAPQISKKLLIKDENRRLGARAGASDIKAHPFFRTTQWALIRHMKPPIVPHAGRGVDTVNFRNVKESESVDLSGSRAMNLKGVPLDSGLATPGGEIADPFLEFNSVTLHHDGDDDHHR

SEQ ID NO: 27244 - protein, 415 aa, Gibberella zeae PH-1
MALTAAQVAIVKSTAPILKEHGKTITTTFYRNMLGAHPELKNYFSLRNQQTGAQQAALANSVLAYATYIDDLGKLSHAVERIAQKHVSLFIKAEHYPIVGTHLIGAIGEVLGSALTTEIKDAWVAAYGQLADIFIQREGQLYDAAGEWNSWRKFKIAKKEAENDSVTSFYLEPLDDKPLPKFLPGQYVSLQIPIPELDGLLQSRQFSLSEAPGSNHYRISVKLQGPEEEPSLEDLSAGKIPGLVCTRLHKRYNVGDEVELSPPAGEFFLNPADTSAAKKPLVLLSAGVGATPLVSILDSVLESETASRPITWIHGARYSGSTCFVPHVLDSAKKHDNITAKIFLEDVKEGDQYDFKGEIDLDQLQKDKLLQLDSSDAEYFICGPEDWMVKVRAFLEENGVPRERQHLELFKTGDV

SEQ ID NO: 27245 - protein, 706 aa, Gibberella zeae PH-1
MNSDTTPLNVLIVGAGIGGLTAALGLRQQGHHVTLFERSQLAREVGAAIHLAPNCHGILRRFGVYPETFGANPVEGICEHTGTGDVKFDMNLSGPLSIWENPWVLSHRVRLHEELKRLATSTEGKGTPAILKTSSPVVDVDPSTATVKFEDGTTASGDLVLGADGVSSITRNIVTGTDIKPFGSGKSAFRFLIPHDVIRNNETTKVFTERTGFMTMWMGDDRRLIMYPCSNNTFMNFVAIHPSNISAGSNKGAGWGRGGSTGLLKEVYKDFEPRVRALLELVDADELKLWTLLDMDRIPTWHKERLVLLGDAAHPFLPHQGQGGGIAIEDAASLAALLPLGTTPADIPSRLALYEKTRDVRAHTVQEFTREAGEDLHGEKRAKFNIYKFLNYNFNHDEWHNSTKALKDHLYSQNKNLHWKSPLSFGPMPSPRQDILGQRHDGTGSSFTTYSVRFKSSATYLKTLFPAPQFSFFKPGTIAEATFACTELKDMKWLGGGGYRYFGLWLHGVQYEKKDGSKIFGSFLAVLMENLADPIVTGREELGMPKLFCEIEVEEKNSATKIQCSWRGAKFVDISINGLAEANGVNGANGTNGAPKPTGPPGAPPLPEEQGQIVYRYVPSVGNPGVPDAAYPVFIEDGLESTPRKVEKTEVGSGAELNLSAGTWETLPTLNHIATGFSEIPVYGIVKSKVECGRGVDDISHARRVE

SEQ ID NO: 27246 - protein, 440 aa, Gibberella zeae PH-1
MADIKDLHIAIMGAGMGGLGAALALAKRGFKHIDVYETASNLGFVGAGIQMPPNVGRILDRLGCWNDIEKEATRVAGSSIRQGSTNEELAHVDMPDLKGQYGYSHLCGHRSSLAGHMYEACKKQDSIKFHFSTSLVEVETFSPKVSFKLKPRDGEPYTSQADILLGADGIKSVTRSQILQQVDATPEEAETGQAAYRIMLNREDMAHDPELLALIDSDEVVRWVGEKRHIIAYSIADKSIYNLSTAHPDENFAGAPSITYTTKGSKEVMLKVFDTFCPLVQKMLNLVPEGEVCEWRLRMYKPLPTWTHGAVALLGDACHPTLPHLSQGAAMAIEDGSTIAEVLCLAPDTKPETIAKCLKVYEQSRKEWTSSLVEMAYLSGRTLHLGEGKAKEERDRMFKEHKLSGSVPDKWTSPDVQKKIYSNDCVAKVRDEFETLFAAV

SEQ ID NO: 27247 - protein, 415 aa, Gibberella zeae PH-1
MTVTQLRSAGRLAQLAGHELQDAYILSAARTPTAKFNGSFLSVSAPKLGAVAIKAALEKSKVPVEKITDVYMGNVLQGSVGQAPARQAVIFAGLPKEIEATTINKVCASGLKAVTLAAQNIQMGLSEAQIAGGMENMSQVPYYVSRASGLPAFGHVKMEDGLIKDGLTDVYDQFHMGNCAENTVKNHNITREQQDEYAIQSYRNAQKAWEDKAFADEIAPVTVKSRKGETVIDTDEGFKDVKFDKIPSLKPAFVRDGSGTVTAANSSTLNDGASALVLGSKAIAQQYGSGSRVLAKICGYADAATAPIDFPVAPAKAVPIALERAGITKDQVAIWEFNEAFASVILANSKILGLEGAKVNPLGGAISLGHALGSSGSRILTTLLHQLKPGEYGVAAICNGGGAATALVVQRVESV

SEQ ID NO: 27248 - protein, 1419 aa, Gibberella zeae PH-1
MASPSRIPSDQPPRSSSPSSFRPRSISASVPRADLTARLASPIPSQFGTTPPVGGTPRPDAASRSDNLDDLSQLPGTGTSMQGPGQSPPRHGTPAARVSTPPIRSQSPLLGARNSGTPTNYGSFNSRSQNALGTSAPYEDPEIVKRHLVQPSDENPTSEESSIQGNTKGKQPADIGGAGLNEDEFSSLRLQGGDVTRGIYKWTEQAEARAKYNRSKSFDLGRPEPEAEVLDINSIKVPGGFRRNHLRRSVQSPGPHGHLEDGHNSPAPGQQRLFTSSFLEFLSIYGHFAGEELEEDDENLGPNEYFSSGEDSDEYNSDDEREPMEDSALLTPSRRRRKRKVRGGSGNNSPMNAALLLLKSFVGTGVLFLPRAYLNGGMLFSNLILFGVAALSYYCFVLLVKTQLKIGGSFGDLGGALYGKKMRTLILSSIVISQIGFVAAYTVFTAANLQAFVRAVSDCKSSISIQWLILIQMIIFLPFALLRDIGKLAFTALVADAFILIGLAYLLYYDILTLNQNGIADIIMFNKKDWTLFIGTAIFTFEGIGLIIPVQESMRHPEKFPRVLLIVMIIITVLFIGMGAISYAAYGSHTETVVLLNLPQDNKMVNGVQFLYSVAILLSTPLQIFPAIRIAETELFTRSGKYNPWVKWQKNVFRFFVVMLCASIAWLGADHLDKFVALVGNFACIPLVFIYPPMLHYKAIARTKFWRVADIALCIFGFVAMAYATTLTAMSWATADPKHPGYCDQKVHGVEYGPRGPRDCTQHLEWQTRPPPPPPFNTVPTCPEPTCGCAEPPKMPDDLPLDREGPLKGAIAGYAEHVLPFHNVSVLNSSFPSSTSPRPQLQTTSAYLLPSFKYIPFLPRVSFDSVEALVKGFLLPEKLHRMHDGLSPIHRDRLTRKEGYQGLLPGVQDVRDILVLICGHTGRDARCGIMAPILATEFEEKLEKEGFDVQHGPVQINLNEMQRIQGEAGEEKTSARIGMISHIGGHKFAGNVIIYLPPDLKMGSEPHPLAGHGICQLSASKARTLKTSPNPSITPTQRYASHKPNFPAPLQARIFPSLILVGIVLVSGGCYLLTPPSRPNTLNDITFVPYAITAREAISPTSFVITAVPRTPNPSLPYLNPSDSQWKNPLWSVEFKQPEVQISRHYTPLPPLSSEDPTDGTLRFYIRAVGDGEMSNYLGRRRVGDDVFLRGPHVGFELAERLGEHSRLVFLAGGTGVVPGIQAAKAVLEANEKSSVDLLWAVRKREEVQNSAFPSSSSWKFWQGKRPTALGLEVESPSPVTKRLQDLKKTYGDRLRIQVVVDEEGTRFQDKDINSTITASPGTVASFNAGCRFHDQAMHVHASEFALSEGPGCVCEPPAGTTPGKNLFIVSGPDGFIEHYAGPKIWLGGHQTQGPIAGVAGHLQRQNPALARDWLVLKM

SEQ ID NO: 27249 - protein, 594 aa, Gibberella zeae PH-1
MNRVAVKSLRTTSLSTVHALPRAPRRGFSISSTVLAHQSRSKASAHARYAHRKSTKHIPLKSSMYFRRLPTALLSSIVVGYGAWYSYNSTDSVPTSTFSANSLTSTQTADAVPTRTVLVVGADELRQGTIVGEGPISKATSDDGRRIVEMLTPDQATQKLRRLEQSYSVSRGQGVTRYDLVQLPSNDPIEDDHAEKIVQVPSRSSAETDNSDWMFWGVFDGHSGWTTSATLRESLINYVARELNATYKLASGELPSEDAVTQAIKTGFNNLDNEIVHKSVEKVFKGGSKTVAAELLQPALSGSCALLSFYDSRSNLLRVACTGDSRAVLGRRAANGKWTATALSDDQTGSNPSEVDRMRKEHPGEENVIRNGRVLGGLEPSRAFGDAVYKWSRDVAYKLRENFFGRSPSPLLKTPPYVTAEPVVTTTKVSPENGDFLVLATDGLWEMLTNEEVVGLVGKWIETEGQSGTNSQFDAAWDRIFGSSKTPLPVEESKTAGPDGNKTPIRVQQWGIDPDAKDRFTVKDKNVATHLIRNALGGNNDEQVCALLTLPSPFSRRYRDDLTVQVIFFGHGEKTGEITVNLEATAGEGVKAKL

SEQ ID NO: 27250 - protein, 333 aa, Gibberella zeae PH-1
MRPSTRLGSLMLRRGFASSARRLDNYGFIGLGQMGYQMAKNLQSKLKPSDKVSIFDINPESMKGLETEMKAASSGAQVELAASAFDASKDADTIITVLPEPQHVKGVYKSIITSSLPKKDRVFIDCSTIDPSTSRQVAKTVSSAGQGMFVDAPMSGGVVGATAGTLTFMLGASPSLVPRLEPVLMLMGKKVLHCGEQGAGLSAKLANNYLLALNNIATAEAMNLGMQWGLDPKKLAGVINVSTGRCWPSEVNNPVAGVVETAPANRDYRGGFGISLMKKDLRLAMVAAEEAGARMELAKTAFAVYKAAEKEEKCQGRDFSVVYRYLGGKEEQS

SEQ ID NO: 27251 - protein, 781 aa, Gibberella zeae PH-1
MEKRAQATESLIQTSSGQAALDYTVQAAELYMRAAGEAPTKKDASRLRQKCQQLIAQAEKLKAQLTQTPSVLLRTSRLHGNIFPPWSNEPSSKDFELPPGEEPFTQDATFGGWKRPRDLHPDLDLDDDALMNSSRGCDLVQDVTTDCSVVASLCAAMRILTGRHSVLSSILYPFDKARGIPKVSSSGKYILKLYFNGCFRRVTIDERLPSSITDRTLYVVDRLNPQLIWPALLEKAYLKIRGGYDFPGSNSGTDLWVLTGWIPEQMFLQREDLEIDKLWTRIKNGHDFENVVVTLGTGRISDEEEDLLGLIGEHDYAIMDLDVVDGSRRLLVKNPWCDGPVWKGGISKRPETELAPQTIDSRNRVTPTAAGSFWMTLEDVLQHFESMYLNWNPSLFPHRQDHHFTWHIPNPELSSSLVRNPQYSLQSPTGGPVWILVSRHFVDAELDISRNRTDTMAAVSGQLGYMSILIFDNNGHRVQISDGDIYRGPYVDSPQTLARFDTSPKKRYTVVIDQHEFPLPDYTLTLSFLSQSQLAVKEAEDAMTLVKEVTGSWTRRSAGGSAACTTYALNPQYKLSLAQAGPLSILLSTNMQDVHVHIDLVWSQGKRVQTLKVRDLAGSSGEYRRGCAVANIPHVDAGVYTLACSTFEAGQLADFFLRISSMTDVAVQPVPADAAGRLRKTLTPFRLSDGAEVRRAQISASWLTRISITARSVSSTGLDLSNRSSSTLMVRVSVAHGWDPERNTIATSGEGEYEELKSIVRTPELDMEPARIQREANAIPA

SEQ ID NO: 27252 - protein, 382 aa, Gibberella zeae PH-1
MKLLNLLSLAGLAAACAHDHDDKQWTKEELNELEDKWGYEWPFAGINTFAHLKHVKCLTEPTEPFDIAIVGVPFDTAVSYRPGARFGPRAIRSASARQTSMRGFNPRAGINPYQNWAKIVDCGDVSVTPIDNGIAREQMTQAFKQLGRRRTVSALAPKARLVTLGGDHSLALPALRALNEIHGKPIQVLHFDAAYPSWWGATHFNHGSMFWMANQEGLLSNSSTERSVHAGLRTRLTGTDFSDHEDDSSQGWVRFTADDIDDLGTKGIIDGILKVLGTENPVYLSVDIDVLDPAFAPGTGTPEPGGWSTREFIRIIRGLEGLNLVGADVVEVSPAYQNGGEETALAAAQVVYEIISSMVKRSLQDGGKEGNGGNAAEAKDEL

SEQ ID NO: 27253 - protein, 933 aa, Gibberella zeae PH-1
MTVFVCSLFLPKTIHFTLPGTPPPGVDPSRTSLSGSSNINLRGDTRASLSGSAVPKDGAALPPKTAAPVGGRPAPLNRQPSLFQKEDITPPRTPTEEVDVNLFANEDGIRIPFPKRPGSNAGSGKPWGSRANQPKSRASSPPPPALSENSRTMQKARELGRQGVIQPKPLVRSDSHDRVFASAGWMVVNADQGNGGLRNAADAAARDGKIDEITWVGTLGMPTDALEGTEQKQDIENTLANEHNMLTVFCSDKDFDGHYAHFCKHILWPVFHYQIPDNPKSKAYEDHSWKYYVNVNQAFADQIVKNWKRGDVVWIHDYHLLLVPEMVRKKIPEAKIGFFLHVAFPSSEVFRCLAVRKELLEGMLGANLVGFQIHEYGRHFLQTCSRILNAEATPDGLQLEDRFVDVIHLAIGIDPVSLREHLDAPEVAKWLQIMQERYKGKRLIVARDKLDHVRGVRQKLLSYELFLNKNPQWRENTVLIQVALSSSEKSDLEATVSDIVTRVNSSWANLAYQPVVYLKQDIDYAQYLALLTIADALMITSQREGMNLTSHEYLFCQDGKLLPEKKHGSLILSEFTGTSSLFAKNELAVNPWDYRACADAIKQALEMGQDEKDQRWNNLYGRVVKHTGSHWFTEFLGRLDIVYEEQHKRDQTSVPRLSVPALSSKYTKAERRLFIIDYEGTLVAWGPVNQIIPISPQRTLDVLNDLLLDERNTVYVMSGRRPEELDRVFRRVPNLGLIAENGCFLKSHGDDSWTEMADLDHVKDWKESVRPIMTYFLERTPGAEIEERRCSLIFHYKSAEDYETASRQASDCASHVNDACESQRVHAIALDGCIAVEPIDWTKRTAARKVFETLKEEIHPTTEKKAPVDFLMVIGDGREDEKVFKWANRLQDDGSVENVVTVSLGNRNTEATATLTQGVSGVLSCLQRLASLE

SEQ ID NO: 27254 - protein, 469 aa, Gibberella zeae PH-1
MADSDGEYVGDMSDDDLMDHRVSNDNPQATKGKSSKSRKGDSARAWEVSKRTWETGLPDEDQDGVLSINVLEAEKRKRLLRDTTPLQRGIIRHMVLVLDMSFAMTEKDLLPTRYRLMLSYAVAFVREFFEQNPISQLGIIGMRDGVAVRVSDVGGNPAEHLDKLKGLESQDPQGNPSLQNALEMCRGALFHAPSHGTREVFIIYGALLSSDPGDIHETIGNLITDRIRVSIVGLSAHLAICADLCSRTNAGDESQYNIAMDEVHFRELFLAATTPPVTRTVAQSTASLLMMGFPSRTLVPNGTTSYCACHNRPCREGYLCTRCGARVCRIPSECPSCDLTLILSTHLARSYHHLFPLRNWIEVPWAKATTSAGCFSCLAPFPEPPKNKGHDKSKEDSGAPKTAKGVSESGRYACEVCGQHFCIDCDVFAHEVVHNCPGCQSLVSKTDGAAASGEQNGTATHTNGDVAMT

SEQ ID NO: 27255 - protein, 603 aa, Gibberella zeae PH-1
MLVIERSDQIRWMSISRQEHKLTRYVNVASSLLSVIVLLLNNPKLLALSLTPLSTGDLRLSALRQLPVRMPETVGENGNAAPGRLLLLSNRLPITIKRSEDGSYSFSMSSGGLVTGLSGLSKTTSFQWYGWPGLEVPDNEVEGMKQRLKEEYGAHPVFIDDELADRHYNGFSNSILWPLFHYHPGEITFDESAWAAYQEVNRLFAKTVIKDVQDGDLIWVHDYHLMLLPQMLREEIGESKKNVKIGFFLHTPFPSSEIYRILPVREALLTGLLDCDLIGFHTYDYARHFLSSCSRILECPTTPNGVDWNGRFVTVGAFPIGIDPDNFVEGLKKPKVQERIAALSRKFEGVKLVVGVDRLDYIKGVPQKLHALEVFLTEHPEWIGKIVLVQVAVPSRQDVEEYQNLRAVVNELVGRINGKFGTIEFMPIHFLHQSVNFDELTALYAVSDVCLVSSTRDGMNLVSYEYIATQQKNHGVMILSEFTGAAQSLNGSLIVNPWNTEELANALHDAVTMSPEQREANYKKLERYVFKYTSAWWGASFVAEMTRLSAEGSQPKTLRNVSGAVIGLEQKAQQIVTGLEKKADELLSGNEKNETETSEEPSQ

SEQ ID NO: 27256 - protein, 415 aa, Gibberella zeae PH-1
MSKGRVCLAYSGGLDTSTILKWLILEGYEVVCFLADVGQVEDFDAVEKKALALGAERMIIENLQKEFIEQIVFRAIQCNAIYEDRYLLGTALARPVIARAQVRVAEKYNCNLLSHGCTGKGNDQVRFELAFKACNPSIKIIAPWRLPEFCEKFQGRQDLLKFAAENNIPVSSTPKAPWSQDENLVHCSYEAGILEDPDHTPPKDLWTQTVDPLEAPDKPFNFAVHFEKGLPVKVATPDQEATDSVELFKLLNKIGHDHGVGRIDIVENRWIGLKSRGCYDTHGLTIARLAHVDLEGLVLDSKVRKLRDQFVTVEWSQCLYSGMYFSPEREWLDEAIVSAQKGVNGQVRLQVYKGNVYVLGRSSETSSLYSQEDASMDSLDTFSPMDSTGFIAIQSIRLEKYGVQKAKDGQPLSQS

SEQ ID NO: 27257 - protein, 960 aa, Gibberella zeae PH-1
MHGYSSSEESDDPRRPRAQPAGNNNNNDKTKKKKKKLPPQKSINQIWKKFSKRKFHKALAVLPFDPVQPPATYHSNEILSAGYERAAEECRRKVEKIIKECKRVNMRYRDPGWDLDWDLKYEKGHCLNNLGTQKFELNRTTLLSSKAAVPKAVKRVHEIFEKPTFMKEVSGGDVKQGSLGDCWIMAGLTALASVPEGLQRICVAYDTKIGIYGFVFFRDGEWIYSIIDDKLYLKSPCWDSPSMQRDLLQQIDREDNEYVYRKTYQTGSKALFFAQCRDQNETWVPLFEKAYAKAHGDYASLAGGWIGEGVEDLSGGVTTELLTSDILDIDEFWDKEMSRVNDEFLFGASTGLLEHGYGERNGISEGHAYVVLDARTLKSGQRLVKLRNPWGKVRKGIWEGAWSDGSKEWTAEVQEEIDHKFGSDSVFWISYEDLIRKYSHFDRTRLFRDRDWRCCQRWIGVDVPWKAAYHEKFHIKVTQDTPLVLVLSQLDGRYFKGLHGQYSFRIHFRLHYEDSPNAEDYIVRSHGNYLMERSVSVELPDLAAGNYVVYLKVTGERDSNAQSVEQVVKREAAQRVENEKLAQVGYAYDLAHSKAWDHMDKVTKLRMKQDQKKASACRQKERRRMWEKRATNRDVSKQQTKKNSEKRKRRRAEWEAEQTRLDEEFNAKVKAEREQMKKERLAKAEAEKAAEAEKKAQEADDEALSKKTEEIKLSNDKEETVDDGVISCSTGSPHFTPKSVDLTTADAAQEKQEVPPVSGAPPAAVEQEEALPTRARPAYDSAGESSDSPVEDWEALYSSDDMARKPRLTQANAAAAQDEYDSEEEKMPEPWNAICIVGVRVYSKDENLELRTVMEGGELLEGGMGSKGAADLDNAQSNAGGGRVVDRKSSETKPDQDSKVSTPTIRKDDRYMEDDGTSGEKYSSIKSYFHIDSAFTTRVNSPAPTPYEHDRRLEFTPSSR

SEQ ID NO: 27258 - protein, 839 aa, Gibberella zeae PH-1
MSSPAGKQIEVPVEDGDAVLMHEISLGPNDDMPKESLMDRLAKLLEEHEHDQNFPDDVLQRARSYLENRNGEQQDEELAHDIYAKFQAQRDLMLNNSIYPEVRAVVENTDDPTLPVGTFRAFFLGTIFVLLGTSIEQFFSLRMPAISLSTYMVQLLSMPLGMLLAKILPTKKFRIFSWEFSLNPGPFSQKEHVLIAIMANVSFGGGAVGAYVVSIIQVLKLDTFYGEKVLSNSIPWQIITLLSTQFLGYGCAGLARRFLVYPSSMLWPRSLANIALTKALYKDNGNREQAANGWTMTRYRFFLICFASMFVYFWIPNFLFKALGLFNWPTWISPRNVTLALIAGSTCGLGFNPLPTLDWNIATYLGDPIVTPFFTLMNYASGMAIIGVIVAPLLYFNNVWDAAYFPINSNLVYDNSGSRYNVSHILLPNFTLNETAYHEYSVPLVTSTQVTKYAAAFMIYVATPVHMYLWHRKDIMNGIRASWERKSRNDEFDDVHNRLMAAYPECPHWWYLVILVTSFTLACISVSMWPTGMPIWGVVLAVLFTVLLQVPIGMLFAVTNLELSTGILAMIIGGHALEGRPIPNMIFNMFSYMSTHQSLNFSCDLKLAHYAKIPPRWAFAAQVYATFLAGFIGLAVNHWVLRNVEDVCQLHQKDRFTCPRTHTYFMSTVIWGVVGPRRLFGTQGPYRALTYTIPIGVVVPIVAYFIAKRWPNSFWRNVNAPILFAGPMGWAPFNWSYMQGTVVLAFVFNFFIKRRYTAWWEKYAYVLTSSLSAAIGISGAIMYFAVQHTGVVLDWWGNRIHEQGVDRHGLVGADGKIVRCSRLQVPEKGYFDIGFDWKV

SEQ ID NO: 27259 - protein, 675 aa, Gibberella zeae PH-1
MADQINMGGLSLNEGGHQGPPQGRSYIPPHMRGRGGPPPAGPQAGGPPVMNGGPPAAAPGPNGIGNSAWANQNYGARQNNWSNDVPTYQGNNNRRGGWGGRGGGYSGGGNFDGHSGGGGAPTARGSGDGQWRDGKHIPGPANPRVERELFGVTAEDPSKQHTGINFEKYDDIPVEASGTDVPEPVHQFTTPPLDEHLCRNIELAHYKVPTPVQKYSIPIVSGGRDLMACAQTGSGKTGGFLFPILSQAFINGPSAVPANAAGQFGRQRKAYPTSLILAPTRELVSQIFDESRKFAYRSWVRPCVVYGGADIGSQLRQIERGCDLLVATPGRLVDLIERGRISLQNIKYLVLDEADRMLDMGFEPQIRRIVEGEDMPQVQDRQTLMFSATFPRDIQMLARDFLKDYIFLSVGRVGSTSENITQKVEYVEDVDKRSVLLDILHSHANGLTLIFVETKRMADSLSDFLINQNFPATSIHGDRTQRERERALEFFRNGRCPILVATAVAARGLDIPHVTHVINYDLPTDVDDYVHRIGRTGRAGNTGIATAFFNRGNRGIVRELMDLLKEANQEVPAFLETIARESSFGGGGRGGRSRGGGGRGGATRDFRKFGGGGFGGNNNGGGGGFNNAGSQGAGFSAGGGGGAGYGGGAGYGGGAGYGGGGYGNPSGPGAQSSWW

SEQ ID NO: 27260 - protein, 368 aa, Gibberella zeae PH-1
MSFAGMLNRLHGQPESYDKKAKYKFGRTLGAGTYGVVREADGPTGKVAVKIILKRNVKGNEQMVYDELEMLQKLKHPHIVKFVDWFESRDKFYIVTQLATGGELFDRICEQGKFTEKDAAETIKQVLLAVDFLHKNNIVHRDLKPENLLYLNRDPESDLVLADFGIAKMLDGKGESLKTMAGSFGYAAPEVMRKEGHGKPVDMWSMGVITYTLLCGYSPFRSENLQDLIRECTDNSVVFHERYWKDVSNDAKDFILKLIDPDADKRWTSEEALGHIWLTGENATDYNLLPEIKSFRARSRFRRIIEKIKLQARIEKLKAMEEDPDNSDLSAIFSEVARAKLADEKEEREVLRITQEVEKEVKRRSFQA

SEQ ID NO: 27261 - protein, 393 aa, Gibberella zeae PH-1
MATRTIEARFERMSVNDENDPIGDGSKLYSKSKVQTISSTSSHGANRPNLFKVALQSQSSNANAAVMLPSQAAQRKVNNPPPSPTRKALPSSSRTSDEVSEDRKSVTLPEQMSVPKQFHLGMFEIGRPLGKGKFGRVYLARERTTGFICALKVLHKNELQAGRVEKQVRREIEIQSNLRHPNILQLYGHFHDSKRVFLILEFAGKGELYKHLRKENRFPEWKAAQYIAQMASALRYLHRKHVIHRDIKPENILVGIHGEIKISDFGWSVHAPNNRRKTMCGTLDYLPPEMIKPGTSDNFYNEKVDLWSLGVLTYEFLVGEAPFEDTPVMTQRRIARADMSIPTWVSPEATDLIKKLLVLDPEKRIPLEQIQQHPWIIKHCVKGERASNREKGL

SEQ ID NO: 27262 - protein, 814 aa, Gibberella zeae PH-1
MPENRRPRSALPIESLGQSISGPSGRLSTSLEIEDPPPENLKHRLHEWAGTGARNDDEDDQGEEYELLMDPNLPREYETRRKNSQESGDEAALIKDDEDENEEEENSPYPEVRAAVRNFDEDLPCNTVRAWTIGMLLVVVGASMNTLFSLRQPSISIGPLIAQIVAWPMGHGWAKFVPEREFTTFGITWTLNPGPFNVKEHAIIVVMASVSFSVAYATDIILAQVVFYKQDFGIVFQLLLTISTQSVGYGIAGMLRKFLVYPASMIWPENLAGVTLMNAMYERNDAPDPSVIGGAMHRYKWFAIVTACSFFYYFIPGFLAQFLSIFAVATWMAPQNPIVNQLFGGQTGLSLLPITFDWTQIAGYVGSPLIPPWHAIANTLIGVVVFFVVGSSVLHFGGAWYGEYLPMSDSGTYDNTGARYNTTRILTKDFTLNEEEYKNYSPLFISTTFAISYGLSFAAISSLVVYTYLHNGKQIWQQWRNSTNEKPDVHMKMMRKYKEAPTWWYMSLFAIMLLIGFYTVLGYPTNLSWWAFLLAIAISFGFALPIGIIQAVTNTQIGLNVLTEFIYGYLQPGRPLALMIFKTYGYITMAQSLRFVSDLKFGHYMKIPPRTMFLSQVVATTFSCFIQIVVLNLSLNHIPDVCEQHQVDHFTCPGGRVFFAGPARMFSPGQVYSGLFVFFVIGAVAPVVIYFLAKRRPKSPVRFLMAPLIFGGAGAMPPATPLNYLSWGAVGFLFQFWIKKRHFRWWSRLNFLTSSALDLGLALATLFIFFAFTLHGIDPPSWWGNDIVSSTMDVQGTAIQAHVAEGARFGPKSW

SEQ ID NO: 27263 - protein, 486 aa, Gibberella zeae PH-1
MGSLSYNNSPDLGWVVQKFGGTSVGKFPDKIAKDIVRLLAVYVKLRGVGAAICSDEEQQNELVEQARGLMLDICNDHVFAAESFIKDQNLRETLIQTVKDECQELVEYIVAAKRFNLEINSRAKDRVISFGEKLSCRFMTTLLQDVGVESEYVDLCDAFHYDAAGRLDDRFYRTATEAFTRKIAACENRVPVVTGFFGNVPGSLIDGDIGRGYTDLCAALLSVGVKAEELQVWKEVDGIFSADPSKVPTARLLSSITPSEAAELTFYGSEVIHHLTMDQVIRAEPPIPIRIKNVKNPRGNGTIVVPDRMRSASHQLTRGSPTPKAEAEHRKPKRPTAVTIKDHISVINVHSNKRSISHGFFARVFSILNHYSISVDLISTSEVHVSMAIHASSQQVEAFANAAAELADCGDVSILTDMAILSLVGAEMKNMVGIAGRMFSTLGEHNVNLEMISQGASEINISCVISARDATRAMNVLHTHLFTFLE

SEQ ID NO: 27264 - protein, 1252 aa, Gibberella zeae PH-1
MTRPPGASFAEFFPTAPKVKAQAQTRADQVRDRDRFKTASTPATINGTIDSTTGTAVLEADANVSLNGIVSASDTMPTQPDDTESPFTDIPNTVDSASSYSSAASSIFSTSTRHGAAATTASSRLPTSSLTPSAFKESPNSAPAAAKPDMSTYQTSDRAARQSSRNSPATGPNVSISNGLPSNERIPARDPLPSVKGLRCTYDPLLDRVHNKSVSKSAKPTYEEFGREDDAPPPKDPRLARSDGRLGYINTDYYLPKSRLRTAPENIKPYPYDPKTSIGPGPPTQIVVTRYNPLIPFSKVTAIFASFGEIAESSNKMHPETGSYLGFATIRYRDSKRPDRPPVSGIDAARRAVRARGIKVDADIVRVEYDAEGRRSRRMLEEHLKREKEKFEKIEQERLALAAKAPPTGPKSGTAPAFTRPPPTAPKGPSAQRQSIPTGTPQIPLLGTQVQGLNLEPSNLAQKLADDPYIYVTGDSVPVLPSILPHMKKRLKSYGFEEIRVDKSGYFIVFRNSFTGSSEAERCFRAVNHTEFFNYDMTMQLCLPRPRREDGSGRRRSSASSDRHTHAEPRYRDEKDRRRREEEADLEEEKKQRAKNFDPVIEAVEVVRREMMEHLIRHIRTKVAAPALSDFLDPANHAAKRRKLNIEHPDDLQEIPSIEDGNDSSRVGTPNSRADPIERRTGRLEPKALPRIRKTKVKGQAQKSAFVDPFARKRPPVARNAFRSLHHRLRSLDSDAESDDDTDTRALLARETEEADSRPRSRMSTDDEASKDDFVPWEQGEDDSMTEASFAIADTASTRKRKLVASLESVFKRQKKSDEELFGVNLETLDSEFKGREDSVDIIPEPETGDDVESRVSRSETPASAIGKPLKKRPGKRKKTKKASFEEPEAAKTQPETEQQPGDEATEPSKVKQEKAEKTSMEELVPEKFDEKLFATEPLTPALELPEGAKPDLPIFQGLTVSAQDIPDLAKLARRFNTKDIGNAELWLWTRNRIRELNSARRTLDSPVTIGGYYVPNPTGCARTEGVKKILNSEKSKYLPHHIKVQKARQEREARNKLGRDAAAEAADAARIAAEKLVAKGNSRANRATNRRYVADLNDQKKTLGQDSDVFKFNQLKKRKKPVKFARSAIHNWGLYAMENIAKDDMIIEYVGEQVRQQISEIRENRYLKSGIGSSYLFRIDDNTVIDATKKGGIARFINHSFEGSKRIVIYALRDIALNEELTYDYKFEREIGSTDRIPCLCGTAACKGFLN

SEQ ID NO: 27265 - protein, 706 aa, Gibberella zeae PH-1
MPPDQSEDVAARQPLLSERDENVSSDASRESRTRGTFTRNLGAAEAFGIVVSIVIGSGVFTSPGSIDTNVPSPGIALAIWLVGGILAWSGATTFAELGTAIPGEGGVQPYLQHIYGDIWGFLAGWTWIVAVMPATLAILSIVFVESAYSAAGVINEDDRIEHKLLSILVLVVMSVANSISTKASTRLNGFFVVLKFLSILVVVVVALAVVGVHVAHPNKEVGGGDWYKKSWFKYRDTYNPNGPDTDWTLWAYSGWDKAIYVSAELSQPARQLPLAINTSIPTAIICFLAANAGYYILLPWNIVSTTDSVAVTAITRLLGQGFGIVTAILICLVVAGSLLGNSFVASRMCVAAARKDWIPSLFTIVGRVGLKPAEEETAAADEQSKDTGDAPINAVILSVILASFYILFGSFRALLTLNGLGEYSFFFLTVLGAIILRYREPDLERPYKTFSINPIVFVIVSGFVVVRGAIFAPVQAVVIMAIWVLGLVFYKARQYWASRSQKRLVGSYKSLVESVISPLLLPSTQLAKHPTQAVDSASLVIYTSIRLPWTTVRGKTVAQFVVLSYGIFLDIRRKTGRPESRGRRWLFRRAAHMWKYDPFDIPDLTSRLLENVKYRLVSPSAESSRFCNNLSSLPQELLGGITDYLQCTTEPLGLQPTYLLPQHLWKQLIVKIPFIWDIDVEQLEQPSYCSIDSDSIRECDWELLFR

SEQ ID NO: 27266 - protein, 312 aa, Gibberella zeae PH-1
MASPQIGWIGLGSMGLPMATNLQKHLSSTAAPNLIYFNRTICRGDSLKDIGAQPASSATDLVDNSDIIFMSLSDDSALDSTLNAILDSEDSGKLADSSAKAETRIQEKGGQFIASPVFGASPVAAQGKLLWIIAGPNAAVDKVTPYVEGVMGRAVIRVGEDIRASGKMKTAGNFITAGFMEIIAEAHVLAEKSGLGSGNLEALIEQQYGPLPFSMSQRLTTGAYMPARGDRPWSDLNLAIKDVGHGIALAEQSGTKLEVAEVAIKHLKDAKKFSDSEQRPLDSSSMYGILRKEAGLSFETALIKDRDGKDDK

SEQ ID NO: 27267 - protein, 886 aa, Gibberella zeae PH-1
MAANSENNGSEPTLRRRESLSEIRAANPDLALSGNIISATFNTPHSFVYRKGGDWDLKSRRGQSALFDSFAYLSSDATPWNHTVVAWTGEIDAPTDDVVSLPGTPAPNTLGATSLNALSAPVPIDGNTRLPTPPPVDGLWVPREDQDRLEYRLSHNKTIRTYPVWLSDESEATSEGILLKDQARWRRYAEHDLYTLLHYKQHEPTDGRRERVQWADYYRMNQKFANKIIEIYKPGDIVIVHDYFLMLLPSMLRQRVPNMYISFFLHSPFPSSEFLRCLPRRKEVLEGVLGSNLIGFQSYSYSRHFLSCCTRILGFPSDTLGIDAYGTRVQVGVFPIGIDAAKVENFAWTDAVTEKCNALRQLYRGKKIIVGRDRLDSVRGVAQKLQAFERFLEMYPEWREKVVLIQVTSPTSVEAEKEDLEDDTKVATRVNELVMRINGMYGSLGFSPVQYYPQYLSQNEYFALLRASDMGLITSVRDGMNTTSLEYIICQKVGNAPLILSEFSGTASSLGDAIHINPWDLSGVAEKINAALTMSDDKRQEMQSRLYRHVTEHNVQSWITKFIRKVYNVLGDTSSANSTPLLDRALLLTQYRSANKRLFMFDYDGTLTPIVREPSAAVPSQRLIHTLDLLAADPKNAVWIISGRDQEFLKQHLGNNTRLGFSAEHGSFMKHPGSDEWENLAETFDMGWQAEVMEVFQKYTDRVQGSFIERKRCALTWHYRLADPEQGIHMSRECHKELESTVASKWDVEVMPGKANIEVRPTFINKGEIAKRLITMYHTPGTADDNDGNGHLEFALCMGDDFTDEDMFRSLNAASGPVLDANHVFTVTIGASTKVTLAKSHLLEPEDVIECVALLAGVQDQGERLGEVNLGALSAVEGHVPEQQEM

SEQ ID NO: 27268 - protein, 594 aa, Gibberella zeae PH-1
MAPRAAVARAAATKKSTTTTTAAAAKKDAKPTKAAAKKAEPAINGASKKRTRAEEQEVEEDEEEEVTRKTKKTKTTERVVKTATKPAAKAKTTKPAASKAKAKATSEEPEEKKPVAKAKTAKPAAAKKAEPKKKTSFPGIGKKINEAPTKILDVYVFGEGSSGELGLGSKRINNKKPIDVKRPRLNDNLAAATTGVVQISCGGMHAVALTHDNKILTWGVNDQGALGRDTTWDGGLRDMDSAEDSDSDDEDDSGINPKESTPTAVDDEFFAPGTKFVQVVASDSASFTLTEDGRVYGWGTFRSSDGILGFSETIKIQPTPLLIKDLKNIKALSAGSNHILALDHKGNVVAWGCGQQNQLGRRIIERNKMSSLIPQGVGLPRGKIAKIACGSYHSFAIDKEGVVYGWGLNNFGEIGVESNAGEDDAVILRPAKLTYLDDYNITEIDGGEHHSLACSDKGDLLTWGRVDGYQVGFEFDKLSEENSIYDERGNARILFKPTIQPDVKDIVSVAAGTDNNFAISSNGTVYSWGFSSNYQTGQGTIEDIHTPTLIDNTAIRGKKIIGAGAGGQYSVLIGEAEDVPQTNGAATNGTDDKA

SEQ ID NO: 27269 - protein, 799 aa, Gibberella zeae PH-1
MAPSLFRKRHEAEDIIPIPGPLETVSASGRDYLENLQQFEKSHKFDPNLPIDDLTDVDAAIATGNAEKGIEIEHALMEDNSPYPEVRSVVRNYDVDVPANTIRAWVIGMVLCTIGSGVNMLFSLRNPSVTVTTYVVQLVAYPLGLGWDLIMPDREWNLFGLKFNLKPGKFNYKEHVVIVAMSNAAYGGGVLYATDVLLAQQIFYGQEFGWAFQILFGITTLCTGYGLAGLARRFLVWPAAMIWPTDLVNCALFYTLHDHSGSDPTKTNGWRMGRYRWFLIVGCGGFVWYWFPGWIFKGLSYFTWVCWIAPHNVTVNKLFGGMTGYGLMPTSFDWTVYSGYLQSPLIPPFHAIANVLVGIIVFFICISMGIHFTGTWYADYFPVQSSESYDNTGAIYNVSRILDSNFHFNETAYKEYSPLFLPTQFALSYGLSFAAVTAVVVHVVLYHGHEIWRQFKLARNQEDDVHMRLMKKYRDAEDWWYAALFVVMVAISIGVIAGWPTGFPVWAYFICLLIPVLWLIPIGVVQAITNIQLGLNVLTEFIIGYMVPGRPMAMMMFKNYGYICMGQALYFAQDLKLGHYMKVPPRVMFSSQLVASIWSAIVQICVMNWALGHIPDVCAIDQPNNYTCPGGRVFYTASVIWGAIGPSRIFSHGAIYSSLQWFWLVGAVTPIITWLLARKWPRSIWRYVSTPLIYGGAGMLPPASVYIYLCWGIVGAFFNRFVKRRYTGWWLQYNYVTSAALDCGLIMSTMVIFFTLYLTSASPPNWWGNYGAMETMDWKTHAISKSVPEGTIIGPSTWN

SEQ ID NO: 27270 - protein, 514 aa, Gibberella zeae PH-1
MDPLVASELEKLGDGVPFRARPQHVHHTWARTFSSLPELFIQPESLVEVEKVVNLARKCRRRLVTTGCGHSPSNITCTSSWLINLDNFNKILSVNQETGVVAMEGGIRLYALCAELEKHGLTMPNLGSINEQSISGAISTGTHGSSLRHGLMSENIISLKVTLANGTTVFCSKDTKTDLFRAALLSLGAVGIITEVTFQAVPSFTLRWQQSVDTDYKMLESWNGDLWTQSEFVRVWWFPYTRRAVVWNAEKTDEELRDPPQSGYDGSIGYYVYHNLLYLAQHVPRILPWVEWLVFGMQYGFRNGTTSSAVQPSGKALLMNCLYSQFVNEWAIPLHKGPEALRRLSSWINHLTPEDPDYVPHNIPFSAEGLYVHAPVEVRVSDTTLTSNVRPYLDITADDGPTLYLNATLYRPYLMDPPCHERYYEGFEWLMKDLGGRPHWAKNFETSRVEIEAFYGKNLESFRAVRSDADPQGMFVGPWHRERIMEEGEGLELEEVEIRREKNNSGGLTTFGVI

SEQ ID NO: 27271 - protein, 541 aa, Haemophilus influenzae R2846
MDSRRSLLVLALIFISFLVYQQWQLDKNPPVQTEQTTSITATSDVPASSPSNSQAIADSQTRGRIITLENDVFRLKIDTLGGDVISSELLKYDAELDSKTPFELLKDTKEHIYIAQSGLIGKNGIDTRSGRAQYQIEGDNFKLAEGQESLSVPLLFEKDGVTYQKIFVLKRGSYDLGVDYKIDNQSGQAIEVEPYGQLKHSIVESSGNVAMPTYTGGAYSSSDTNYKKYSFADMQDNNLSIDTKAGWVAVLQHYFVSAWIPNQDVNNQLYTITDSKNNVASIGYRGPVVTIPSGSQETITSSLWTGPKLQNQMATVANNLDLTVDYGWAWFIAKPLFWLLTFIQGIVSNWGLAIICVTIVVKAILYPLTKAQYTSMAKMRILQPKMQEMRERFGDDRQRMSQEMMKLYKEEKVNPLGGCLPILLQMPIFIALYWTFLEAVELRHAPFFGWIQDLSAQDPYYILPILMGISMFLLQKMSPTPVTDPTQQKVMNFMPLVFMFFFLWFPSGLVLYWLVSNLITIAQQQLIYRGLEKKGLHSRKK

SEQ ID NO: 27272 - protein, 484 aa, Haemophilus influenzae R2846
MNLGIILPLIIYLTFVFGAAIFAYVKRTKGDFLTEYYVGNRSMTGFVLAMTTASTYASASSFVGGPGAAYKYGLGWVLLAMIQVPVVWLALGALGKKFALLSRETNALTINDLFFYRYKNKYLVWLSSLALLLAFFAAMTVQFIGGARLLETTIGISYTQALLLFALTVGIYTFIGGFRAVVLTDTIQGTVMIFGTIILLIGTIYALGGVESAVNKLTEIDPDLVTPYGPNGMLDFQFMASFWILVCFGVVGLPHTAVRCMAFKDSKALHRGMLIGTIVLSIIMLGMHLAGALGRAVIPNLTVSDQVIPTLMIKVLPPIVAGIFLAAPMSAIMSTIDAQLIQSSSIFVKDLYLSAKPEAAKNEKKVSYFSSIITLILTALLIFAALNPPDMIIWLNLFAFGGLEAAFLWVIVLGIYWDKANAYGALSSMIIGLGSYILLTQLGIKLFNFHQIVPSLAFGLIAFLVGNKLGERRIEKTQLKVTAL

SEQ ID NO: 27273 - protein, 1088 aa, Gibberella zeae PH-1
MASHMLRPLASSAVPASASELCASSFFFQKQLKGYRLKDGRLSSRKQWHSTLKASSQRALVADVSKPLALIRHVSTPTPRNYSTVVLPKTTPYENLVVGVPTEIFPNERRVALTPANVAILKKKGFKQVLVERGAGVHADFLDAAYEKAGATLVDSPREVWSNSDIVLKVRGPGLEEVGSMKEGQTIISFLQPSQNKELVEKIAARKATSFAMDMIPRISRAQVFDALSSMANIAGYKAVLEASNVFGRFLTGQVTAAGKIPPCKVLVIGAGVAGLSAIATARRMGAIVRGFDTRPAAREQVQSLGAEFIEVELQEDGSGAGGYAKEMSKEFIEAEMKLFKDQAKEVDIIITTALIPGKPAPKLLKNDILDVMKPGSVIVDLAAEAGGNCEATKKGELAIYNDVKVIGYTDLPSRLPTQSSTLYSNNITKFLLSMTPEPKAFGIDLTDEVVRGAIVTQEGDIVPPAPRAAPPPPPVKTETAQETPEAVALTPWQKKTREVAGVTAGMGSILALGKWTSPLLMSNAFTFALASLIGYRAVWGVAPALHSPLMSVTNAISGMVGIGGLFILGGGFLPATIPQAFGAVSVLLAFVNVGGGFVITKRMLDMFKHTGPTDPPEYPWLYAVPAVLCGGGFLAAASTGAAGLVQAGYLVSSVLCIGSISSLASQATARMGNAFGILGVGTGVLASLLAAGFTPEVLTQFGGLAAIGTIAGMLIGKRITPTDLPQTVAALHSVVGLAAVLTSIGSVMADVMDPSTLHMVTAYLGVFIGGITFTGSLVAFMKLAGKMSSKPKMLPGRHIINSGLLATNAATMGAFITMAPGSPMIAAGALAGSAALSFIKGYTTTSAIGGADMPVVITVLNAYSGFALVAEGFMLENTLLTTVGALIGVSGSILSYIMCVAMNRSLTNVLFGGLGTPTQVQEYKPQGEVTTTSVDDLADALLNSEKVILIVGYGMAVAKAQYAISSIVSTLRAKGITVRFAIHPVAGRMPGQCNVLLAEASVPYDIVLEMDEINDDFPDTDLAVVIGANDTVNPIAMEKGSSIEGMPVLHAWKAKQVVVMKRGMASGYEFRVKLTLQAIKSAIEAKS

SEQ ID NO: 27274 - protein, 390 aa, Haemophilus influenzae R2866
MKFIDESLIRIEAGDGGNGCVSFRREKFIPKGGPDGGDGGDGGDVYLQADENLNTLIDYRFNKRFAAERGENGRSSDCTGRRGKDIILPVPVGTRAIDNDTKETLGDLTQHGQKMLVAKGGYHGLGNTRFKSSVNRAPRQKTMGTPGEKRDLLLELMLLADVGMLGLPNAGKSTFIRAVSAAKPKVADYPFTTLVPSLGVVKVDDSHSFVVADIPGLIEGAADGAGLGIRFLKHLERCRVLIHLVDIAPIDGSNPADNVAIIESELFQYSEKLSEKPRWLVFNKIDTMSDEEAEERVREITEQLGWEEDYYLISAATRKNVPPLCRDIMDFIIANPREAETQQVAPEEVKFKWEDYHQEQLAGYQFDDDEDWDDDWTEEDDEGIEFIYKP

SEQ ID NO: 27275 - protein, 541 aa, Haemophilus influenzae R2866
MDSRRSLLVLALIFISFLVYQQWQLDKNPPVQTEQTTSITATSDVPASSPSNSQAIADSQTRGRIITLENDVFRLKIDTLGGDVISSELLKYDAELDSKTPFELLKDTKEHIYIAQSGLIGKNGIDTRFGRAQYQIEGDNFKLAEGQESLSVPLLFEKDGVTYQKIFVLKRGSYDLGVDYKIDNQSGQAIEVEPYGQLKHSIIESSGNVAMPTYTGGAYSSSETNYKKYSFADMQDNNLSIDTKAGWVAVLQHYFVSAWIPNQDVNNQLYTITDSKNNVASIGYRGPVVSIPAGSQETITSSLWTGPKLQNQMATVANNLDLTVDYGWAWFIAKPLFWLLTFIQGIVSNWGLAIICVTIVVKAILYPLTKAQYTSMAKMRILQPKMQEMRERFGDDRQRMSQEMMKLYKEEKVNPLGGCLPILLQMPIFIALYWTFLEAVELRHAPFFGWIQDLSAQDPYYILPILMGISMFLLQKMSPTPVTDPTQQKVMNFMPLIFMVFFLWFPSGLVLYWLVSNLITIAQQQLIYRGLEKKGLHSRKK

SEQ ID NO: 27276 - protein, 107 aa, Haemophilus influenzae R2866
METLDKIKKQISENPILIYMKGSPKFPSCGFSARASEALMNCKVPFGYVDILQHPDIRAELPTYANWPTFPQLWVEGELIGGCDIILEMYQAGELQTLLAEVAAKYA

SEQ ID NO: 27277 - protein, 711 aa, Haemophilus influenzae R2866
MSRTIILIPVSTGVGLTSISLGLIHSLEQKGAKVAFMKPVSQPSTGEDKLDRTTSIIRTSTSLETAEPFMLSVAESLIGQNQSDVLLEKIVANHQQLTKNNDIVVVEGLIPTRKHGYANSINYEIAQALDAEIVLVAAPATETPTELKDRVEAAASLFGGKNNPNLLGVVVNKFNAPVDESGRTRPDLAEIFDSFQHNHISETEVNKLFAGSAIKLLACVPWNANLIATRAIDLVKHLGASIINEGEINRRIRGITFCARSLPNMVEHFRAGSLLVASADRPDVLVAAALAASNGIEIGGLLLTGGYKIDAQINKLCRPTFEKAKLPIFRIEGNTWQTALSLQSFNLEVPVDDKERIENIKQYISQHFNADFINNLVADSSRLPRLSPPAFRFQLTELARAAKKRIVLPEGDEPRTIKAAVLCAERGIAECVLLADPASVQRVAEAQGVKLGKGITIINPADVRENYVDRLVELRKAKGMTETAAREQLEDTVVLGTMMLEANEVDGLVSGAVHTTANTIRPPMQIIKTAPGSSIVSSIFFMLLPDQVLVYGDCAVNPDPTAEQLAEIAIQSADSAKAFGIDPKVAMISYSTGTSGSGADVEKVKEATRIAKEKRPDLLIDGPLQYDAAVMEDVARSKAPNSPVAGKATVFVFPDLNTGNTTYKAVQRSADLVSIGPMLQGMRKPVNDLSRGALVDDIVYTIALTAIQATQ

SEQ ID NO: 27278 - protein, 401 aa, Haemophilus influenzae R2866
MSKLVLILNCGSSSLKFAILDPATGEEKLSGLAEAFFLPEARIKWKLNGEKGNADLGAGAAHTEALNFIASNILNDELKNSIAAIGHRIVHGGEKYTQSVIVTDEVVKGIEDAAQFAPLHNPAHLIGIREAFKAFPHLKDKNVVVFDTAFHQTMPEEAFLYALPYSLYKEHGVRRYGAHGTSHYFVSREVAKYVGKPADQVNAIICHLGNGGSVSVVRNGQCIDTSMGLTPLEGLVMGTRCGDIDPAIVFYLYKTLGMSMDQIEETLVKKSGLLGLTEVTSDCRYAEDNYDDESKPETRRALNVYSYRLAKYIGAYMAVLGDDHLDAIAFTGGIGENSAHVRELALNHLKLFGIKIDHERNLATRFGKDGVITTDDSAFKAIVLPTNEELVIAQDTAKLCF

SEQ ID NO: 27279 - protein, 315 aa, Haemophilus influenzae R2866
MPDIKLFAGNATPELAKRISERLYISLGDATVARFSDGEIQVQINENVRGADVFIIQSTCAPTNDNLMELVVMVDALRRASAGRITAVIPYFGYARQDRRVRSARVPITAKVVADLLSIVGIDRVLTCDLHAEQIQGFFDVPVDNVFGSPVLIHDILKKSDLENPIVVSPDIGGVVRARAVAKLLNDTDMAIIDKRRPRANVAQVMHIIGDVADRDCILVDDMIDTGGTLCKAAEALKERGAKRVFAYATHAVFSGAAAKNLASDAIDEVVVTDTIPLSEEMKAIGKVRVLTLSSMLAEAIRRISNEESISAMFN

SEQ ID NO: 27280 - protein, 404 aa, Haemophilus influenzae R2866
MSYTFSTYETLALASLVLLLGYFLVKRINVLKTFNIPEPVVGGFIVAIGLLIWHKIDGTSFNFDKNLQTTMMLVFFTSIGLSANFSRLIKGGKPLVVFLFIAALLIFGQNVIGIASSMALGIHPAYGLLAGSVTLTGGHGTGAAWADTFAHQFNLQGATEIAIACATFGLVFGGIIGGPVARFLLNRQKQGENPENDEVDDIQEAFEHPTYKRKITARSLIETIAMISVCLLIGQYLDVQTKGTALQLPTFVWCLFTGVIVRNILTNIFRFQVAESAIDVLGSVGLSIFLAIALMSLRLWELAGLAIDVLIVLAIQVAFMAAFAIFITYRAMGKDYDAVVLSAGHCGFGLGATPTAIANMQAVTSRFGPSHKAFLIVPMVGAFFIDLINAALLKVSFAVVNMLA

SEQ ID NO: 27281 - protein, 756 aa, Haemophilus influenzae R2866
MTEQLRQAALDFHEFPIPGKIEVTPTKSLATQRDLALAYSPGVAEPCLEIEKDPAASYKYTARGNLVAVISNGTAVLGLGNIGALAGKPVMEGKGVLFKKFAGINVFDIEVNEHDPDKLVDIIASLEPTFGGVNLEDIKAPECFYIEQKLRERMNIPVFHDDQHGTAIISAAAIINSLRIVGKKIEDVRLVASGAGAASIACLNLLLSLGMKRENITVCDSKGVVYKGRDDKMDQTKKDYAIEDNGWRKLGDAIPNADIFLGCSAAGALTQDMVKTMAAHPIILALANPNPEITPPEAKAVRPDAIVCTGRSDYPNQVNNVLCFPFIFRGALDVGATTINEEMKRAAVYAIADLALEEQNEVVTSAYGGEGATFGADYVIPRPFDPRLIVRIAPAVAKAAMESGVATRPIQNWDAYVEKLTQFVYKTSLFMRPIFSQAKSAKQRIILAEGEENKALHATQEVISMGLANPILIGRRSVIEEKIKKLGLRLTAGVDFEIVDNEDNPRYEECWKHYYELTKRKGITPAIAKRVVRSNTTVLASTLLSLGYADALVCGLFGSYGKHLASIRDIIGLKDGVKTAAALNSLVLPTGNVFLTDTHVNSNPTAEELAEITLMAAEEIHRFGIEPAVALLSHSNFGSSDSLGAPKMREVLQIVKERNPHLMIDGEMRGDLAMNEAHRKELMPDSPLKGSANLLVFPDLSASRISYSLLRGTTTAITVGPILMGMNKSAHILNPGASVRRIINMIAYAAVKAQQE

SEQ ID NO: 27282 - protein, 635 aa, Haemophilus influenzae R2866
MGKIIGIDLGTTNSCVAVMDGDKARVIENAEGARTTPSIIAYTDNETLVGQPAKRQAITNPKNTLFAIKRLIGRRFESEEVQRDIKIMPFEITRADNGDAWVNVKGDKLAPPQISAEVLKKMKKTAEDFLGEAVTEAVITVPAYFNDAQRQATIDAGKIAGLDVKRIINEPTAAALAFGLGSSKENQVIAVYDLGGGTFDISIIEIDNFDGEQTFEVLATGGNTHLGGEDFDNRVIDYIIDEFKKEQNIDLRNDAMALQRVKEAAEKAKIELSSAQSTEVNLPYITADATGPKHLALNITRAKLEALVEDLVASSIESLKAVLKDADKGVSEIHDIILVGGQTRMPLVQQKVAEFFGKEARKDVNPDEAVAIGAAVQGGVLKGDVKDVLLLDVTPLSLGIETMGGVMTTLIEKNTTIPTKKSQVFSTAEDNQSAVTIHVLQGERKRAADNKSLGQFNLEGINPAPRGMPQIEVTFDIDANGVINVSAKDKNTGKEQQIRIQASSGLSDEEIQQMVRDAEANADADRKFEEVVQARNQADGIAHATRKQIAEAGDALNVADKEKIEAVVAELETAAKGEDKAEIEAKIEAVIKASEPLMQAVQAKAQQAGGEQPQQSSAKDDGVVDAEFEEVKDNK

SEQ ID NO: 27283 - protein, 564 aa, Haemophilus influenzae R2866
MSVQQLISRLTDIVGSRYIITDPTKTEVYRSGYRFGTGNALAVVRPATLLEFWNIVKVCVEHDVIVINQAANTGLTGGSTPDGNDYDRDIVVINTMRIDGIQLINNASQVICLPGSTLNELENQLKPFGREPHSVIGSSCIGASVIGGICNNSGGALVQRGPAYTEMALYAQLNEKGELELKNHLGIDLGETPEEILTNLQEKRYQVKDIRQDCGHGHDHYYCNYVRQVDEDSPARFNADPARHYEASGCAGKLAVFAVRLDTFPLEKETAVFYIGTNQTSVLSDIRRHMLVNFEVLPISGEYIHRDAFDIAAKYGKDTFWVIKKFGTHWLPKLFSLKSNVDRIGKKFFFLPQHLSDKLMQTVSKFIPEHLPQSLWDYRNKYEHHLIIKMGGKGIQEAREYLESYIADGSKGGYFECNAIETQAAMLHRFAVASAAIRYRAIHEKEVEEIVALDVALRRNDQDWFEVLPPEIDNRIISKLYYGHFMCHVFHQDYIVKKGYDYEELEYEMLKLLDKRGAQYPAEHNVGHLYEAKPTLRKFYKELDPTNSFNPGIGKTTRKKYWAE

SEQ ID NO: 27284 - protein, 647 aa, Haemophilus influenzae R2866
MAMIFIAPEQTQALLNQAKSGIFANFSWFYVLTFSVFLGFLLILSVSSLGNIKLGQDEEEPEFSFLSWLAMLFAAGMGVGLMFFGVAEPLTHYLSDITAGSAEHKQQEALLHTLFHWGIHAWAVYGTIALALAYFGFRYKLPLALRSCFYPLLKDRINGKIGDAIDVMALLATLFGIITTLGFGSSQLGAGLEQIGWISQNSFALQVSVIVVVMCLAVFSAISGVGKGVKILSEINLTLAFCLLLFVLISGPTLYLLSAFSDNIGNYFSNLVQLSFKTYAYEQEHTSWFSGWTVLYWAWWCSWAPFVGLFIARISKGRTIREFIFGVLVIPSLFGILWFTVFGNTAVWLNDGIAAGGLGEFISSPEILLFKFLNYLPLPTITGFVSLLVISLFFITSADSGIYVLNNIASRDKSLASPAWQAIMWGTLMSVVAIVLMQSGGLANLQTMTLIVALPFALLMLVMCFSLWKGLIADKKYFSTKVNPTSIFWSGDKWKSHLEQMMNQTQEKDILRFLKNTALPAMRELRQELTGKYNLSVEINTLFEQEEPALELVIHKESMRDFMYGIKSVGREVSEQLINDENLPHIQHSVTYEPYTYFFDGRVGYDVQYMDQDELIADMLKQYERYLSLLDDVGQELMAHEQTELAE

SEQ ID NO: 27285 - protein, 302 aa, Haemophilus influenzae R2866
MTEQFDKTYCGFIAIVGRPNVGKSTLLNKILGQKISITSRKAQTTRHRIVGIKTEGAYQEIYVDTPGLHIEEKRAINRLMNRAASSAIGDVDLIIFVVDGTHWNADDEMALNKLRNAKAPVVLAINKVDNIKNKDDLLPFITGLSSKFNFAHIVPISAQRGNNVHELEKIVRQSLREGVHHFPEDYVTDRSQRFMASEIIREKLMRFTGEELPYSVTVEIEQFKVNERGTYEINGLILVEREGQKKMVIGAGGQKIKTIGMEARADMERLFDNKVHLELWVKVKSGWADDERALRSLGYMDE

SEQ ID NO: 27286 - protein, 587 aa, Haemophilus influenzae R2866
MQEQKLQENDFSTLQTFKRLWPMIKPFKAGLIVSGVALVFNALADSGLIYLLKPLLDDGFGKANHSFLKMMAFVVVGMIILRGITNFISNYCLAWVSGKVVMTMRRRLFKHLMFMPVSFFDQNSTGRLLSRITYDSQMIASSSSGSLITIVREGAYIISLFAVMFYTSWELTIVLFIIGPIIAVLIRLVSKIFRRLSKNLQDSMGELTSATEQMLKGHKVVLSFGGQHVEEVHFNHVSNDMRRKSMKMVTANSISDPVVQVIASLALATVLYLATTPLIAEDNLSAGSFTVVFSSMLAMMRPLKSLTAVNAQFQSGMAACQTLFAILDLEPEKDDGAYKAEPAKGELEFKNVSFAYQGKEELALNNISFSVPAGKTVALVGRSGSGKSTIANLVTRFYDIEQGEILLDGVNIQDYRLSNLRENCAVVSQQVHLFNDTIANNIAYAAQDKYSREEIIAAAKAAYALEFIEKLPQGFDTVIGENGASLSGGQRQRLAIARALLRNSPVLILDEATSALDTESERAIQSALEELKKDRTVVVIAHRLSTIENADEILVIDHGEIRERGNHKTLLEQNGAYKQLHSMQFTG

SEQ ID NO: 27287 - protein, 815 aa, Haemophilus influenzae R2866
MRVLKFGGTSLANPERFSQAAKLIEQAHLEEQAAGVLSAPAKITNHLVALSEKAALNQSTDTHFNEAIEIFYNIINGLHTENNQFDLNGTKALIDAEFAQIKGLLEEIRQAGKVEDAVKATIDCRGEKLSIAMMKAWFEARGYSIHIVDPVKQLLAKGGYLESSVEIEESTKRVDAANIAKDKVVLMAGFTAGNEKGELVLLGRNGSDYSAACLAACLGASVCEIWTDVDGVYTCDPRLVPDARLLPTLSYREAMELSYFGAKVIHPRTIGPLLPQNIPCVIKNTGNPSAPGSIIDGNVKSESLQVKGITNLDNLAMFNVSGPGMQGMVGMASRVFSAMSGAGISVILITQSSSEYSISFCVPVKSAEVAKTVLETEFANELNEHQLESIEVIKDLSIISVVGDGMKQAKGIAARFFSALAQANISIVAIAQGSSERSISAVVPQNKAIEAVKATHQALFNNKKVVDMFLVGVGGVGGELIEQVKRQKEYLAKKNVEIRVCAIANSNRMLLDENGLNLEDWKNDLENATQPSDFDVLLSFIKLHHVVNPVFVDCTSAESVAGLYARALKEGFHVVTPNKKANTRELVYYNELRQNAQASQHKFLYETNVGAGLPVIENLQNLLAAGDELEYFEGILSGSLSFIFGKLEEGLSLSEVTALAREKGFTEPDPRDDLSGQDVARKLLILAREAGIELELSDVEVEGVLPKGFSEGKSADEFMAMLPQLDEEFKTRVATAKAEGKVLRYVGKISEGKCKVSIVAVDLNNPLYKVKDGENALAFYTRYYQPIPLLLRGYGAGNAVTAAGIFADILRTLQH

SEQ ID NO: 27288 - protein, 302 aa, Gibberella zeae PH-1
MHKMTIDVSSPAAYSPAETAELICRAGVKKGRSRPDKVFLSGISGGCILSFGCAVSLTVLTAPWYQENAPGLIKIIGAMVFPLGLVTVILTGADLFTSTNLFTFVAVLNGRLSVWRMLLHWFLCFFGNLSGCLFVMAIIVGYGGILDGEAYREEIIAYTTKKQITPEAHQIFIRAIGCNWLVCLACFLGVQAKDLTSKVIGMWIPVFAFVALGFDHVVANMFFIPLGIWMGTPGLTIGLYIWKGMIPALFGNILGGSLCCGVYFWWMYLADVDDEHEPQDKGILSHPGHDIPSDEESQMESR

SEQ ID NO: 27289 - protein, 365 aa, Gibberella zeae PH-1
MAATKQVFIGIIGAGGVGKAFIDQLHSLAARKPSPKLNLAYIATSRKAIYNDDYSPINLENVVETLGSSSKAPLALAQVVEYLSKAPAKTVLVDNTSSQDVAELYPLALSRGISIVTPNKKAFSGSYKLWQDIFSAAESSGARVYHESSVGAGLPVISTLKDLVETGDKVTKIEGVFSGTMSFLFNSFAPTEGQGGKWSEEVKKAKSLGYTEPDPRDDLNGLDVARKLTILARLAGIPVESPTSFPVQSLIPKELESVSSGDEFLEKLPAFDSQMEETKAAAEKAGKVVRFVGSIDAASKQVKVGLEQFDRSHPIAALKGSDNIISFYTERYGSNPLIVQGAGAGGDVTAMGVTADLIKVLSQIA

SEQ ID NO: 27290 - protein, 851 aa, Gibberella zeae PH-1
MASQTQKSEALSRGDSLPRSQEAYEVEGSFERDLDVTQDDLLEAREMAATLSLEDVHKTMSKVYKLHKRDPNFPLSVIQKIEHFLNQDDILKHPERHKALIQEIKIEAALITHNSPYAEVRAVVDNHDDPSMPCSTIRAWVIGIIFSCAVSFINSFFEIRQPMIGVGLAVPQLLAYPFGKFLEKTLPDIGFTLFGVRHSLNPGKFTKKEHMLITIMSSISMGAPYTNYIIWIQYLPQYFNQPYAMNMGYQILLGLSSKFIGYGLAGICRRFLVYPSYCLWPTTLVCIALNTALHDEGDVPVLGPFKKIWDISRFRLFSLAFGAMFAYFWLPNYLFAGLSWFSWMTWVSPNNRDLANVTGGHTGLGLNPLPTFDWNIVTLGCDPLMVPFFTTFNLFCGALLTCFVILGVYYGNGYHTAYLPINSNRVFDHFGGLYNVSAIIDERGIFDAKKYEAYSPAFLSAAHISSYMFLFSLYTAAFTYGVLYHHRTIAIGFKGLVNSFRPSKKDEVEDGQVSDAHNRLMKTYREVPEWWYLVCLAIAFIVGIVGVSQWPTHTTPAVVPFGVILSLIFVVPVGIISATTGIGVSLNVLSEFLGGAFVEGNAIAMCFFKAFGYSTCAQAVYFSADLKLAHYLKIPPRFTFWAQMVPTLVSTLISVGVLQYQIRLEGVCTQDAPYRFMCPGLNNFFAAAVLWGTIGPKKLFGPGGQYVEALVGFPVGVVVVLLFWWLGKRYPNIKFIRSIHPVVFLAGGMLWAPYNLSYIWPAVPIGWLSWIYIKKRYLAFWAKYNYILSAAFSVGIAISALVIFFALQYHDINLDWWGNKVPYEGCDGTQSCFLKTLAENEYFGPRIGDFS

SEQ ID NO: 27291 - protein, 323 aa, Gibberella zeae PH-1
MLDQMANEIKLISGSSHPEISAKVASRLGIEIANTMSLNYSNRETSVSIGESVRDEDVFILQSTAPGDVNDGLMELLIMIHACRTASARRITAVIPSFPYARQDKKDKSRAPISAKLIANMLQVSGCNHVITMDLHASQIQGFFNVPVDNLYAEPSVLRWIRENLNVENCVIVSPDAGGAKRATSLADRLNTGFALIHKERPRPNVVGRMVLVGDVQDKVAILVDDMADTCGTLAKAAETVHKHGASEVYAIVTHGILSGKAIDTINSSVLSGLVVTNTVPLGDKIERCPKLKVIDVSGTLAEAIRRTHNGESVSYLFNNAPV

SEQ ID NO: 27292 - protein, 396 aa, Gibberella zeae PH-1
MANLPPVYIVSTARTPIGSFLGSLSSQTAVQLGSVAIKGAVERAGIKPEDVDEVFFGNVLSAGVGQGPARQCALGAGLPQTVIATTVNKVCASSLKAIILGAQNIMLGTSDIVVAGGTESMSNTPHYLPNLRNGAKYGDQTLVDGVLKDGLTDSFKKDHMGISAELCVDDHDLTREAQDEYAINSYKKAQAATEAGLFTEIVPVEIPGGRGKPAIKVERDDEVKNLNVDKLKAMRPAFKPDGTVTAPNAAPINDGAAAVVLVSEAKLKELNLKPVAKILGWGDAEREPERFTIAPALAIPKAIKHAGLTAEQVEYYEINEAFSAVALANMKILGLNPDQVNVYGGSVAIGHPLGCSGARIVTTLTSVLKERKAKIGAVGICNGGGGASAMVIENLQ

SEQ ID NO: 27293 - protein, 682 aa, Gibberella zeae PH-1
MARSRSSMALGLGLLCWIALLFSPLAFVQTVQADDVDSYGTVIGIDLGTTYSCVGVMQKGKVEILVNDQGNRITPSYVAFTEDERLVGDAAKNQAAANPTNTIYDIKRLIGRKYSEKTLQGDIKHFPFKVVNRDDRPVVQVEVDGAKKQFTPEEISAMVLGKMKEVAEGYLGKKVTHAVVTVPAYFNDNQRQATKDAGIIAGLNVLRIVNEPTAAAIAYGLDKNDGERQIIVYDLGGGTFDVSLLSIDDGIFEVLATAGDTHLGGEDFDQRVINYFAKQYNQKNNVDITKDLKAMGKLKREAEKAKRTLSSQKSTRIEIEAFHAGKDFSETLTQAKFEELNIDLFKKTMKPVEQVLKDAKLKKSEIDDIVLVGGSTRIPKVQQLIEDFFNKKASKGINPDEAVAFGAAVQAGVLSGEEGTSGVVLMDVNPLTLGIETTGGVMTKLIPRNTAIPTRKSQIFSTAADNQPVVLIQVFEGERSLTKDNNILGKFELTGIPPAPRGVPQIEVSFELDANGILKVSAHDKGTGKQESITITNDKGRLTPEEIERMVAEAEKYAEEDKATRERIEARNGLENYAFSLKNQVNDEEGLGGKIDEEDKETVSSHTTLNNKSKTHANKSQLLDAVKETNEWLDEHGADATAEDFEEQKEKLSNVAYPITSKMYQGAGGAGGEQDDNIHDEL

SEQ ID NO: 27294 - protein, 591 aa, Gibberella zeae PH-1
MSPSATFDAPSGGQSNRFQILVPEKVSPDGLALLTPHFDVDIRKGLSAAELVNLIPNYHGLIVRSETQVTAEVVQAGRKLRVVARAGVGVDNIDVPAASTQGVIVVNSPSGNILAAAEHTIALLLSAARNVGQADGSVKEGRWERSKLVGVEVGRKTLGIIGLGRVGLNVARMAKGLGMIVKAVDPYASADMARQTGVELVPGLEDLLPVVDFLTIHTPLLATTLDLVSEAEFKKMKKTARVLNVARGGVYNEEALIKALDEGWIAGAGIDVWSSEPLVADSAAARLSKHPKVVATPHLGASTVEAQENVSMDVCKQVLEILQGGLPTSAVNAPIIMPEEYRKLQPSVQLVEKMGRLYTEHFVRSRGGMLGGRRFELIYHGDLASMPNTKPLFAALVKGLVSTFSDSHINMVNAALIAKEKGIVISETRAGDSPSTYSNLVTLRSYKAGGNGSEQVIEGYASDERVFISKLDRFNGVFTPEGTLIILHNYDEPGKIGGVGMVLGKHGINIKFMQVASLDPEATKGADTPPDPNGNEALMILGVLGPVSDEVLEGLNNSEGVLDVVEIEIERQSIAWSIESISCDDSLMIYS

SEQ ID NO: 27295 - protein, 567 aa, Gibberella zeae PH-1
MDIFTTVLDTSTSTQRQSVAQFFPHGSTVPNRIVDVSPFSIPLKSRLNPAPDDYASPSFSDKAFLTLYAGRGGNGCISFLREAYLAEGPPNGGDGGHGGNVYIQAAHGETSLHKLSRKRFVRAGRGKHGQGSAKGGTRGDDIIITVPVGTVVRELEREDPVADDELDMKLWRAQQKQKRREENQAALERKQRREHEEEIHEEEEEEFQEEEEEEEDQDPERRKWLLYPGLSKTDVKNTVFPKLPKRTRLLKQPPPTIRLDLSRPTPTPILLATGGIGGLGNPHFTSRAHPRPMFATKGDDAVTMKIELELKLLADVGLVGLPNAGKSTLLRAITNSRTRVGNWAFTTLQPNIGTVVLDKYSGRPTIKSYRRYPAQLGLPEEVETEPRTRFTIADIPGLIEGAHLDRGLGIAFLRHVERAGVLAFVIDLSAGDAVKALDSLWREVGLYAQMRDEEEADRAIDSNIDWDVTADLGGPMNYSPVHEPDQNSEQKQSLQIAGKPWFVVATKADLPETQENFKELKQYLDSITKGERSHPSGVEDAWTKDCAVIPAMALTYLRSEAKIATIA

SEQ ID NO: 27296 - protein, 1060 aa, Gibberella zeae PH-1
MGKRTTNSSSASFSSSSKQSLSRKSSASSSLAERVGDRVVDDYPTLRQDVALQPLTSSSSSSTTRSTVTVSPSHPVQDQGHVLLYQAPASDILPLPLLTTTATPAASASASVSAPQPVLVDYQNAAPPSPEHTNTDDSLDATPQPSNADLDMASKKTPFLRSAARSDAAPYGSVSLTPSRNNSPAGSDRWDPDSHQLRHVTDTMRSETSHRSGLSKKSSSRLSEEIDGAVLVSGLEGRMGLGEPTHPGVLEGSLKDDLSEDGALLDDDSSATSNTEYQENSPHEAVRASVPPTDNTTLSINTPRMWCLSVLFAILGSSTNLFFSLRYPSVAITPVIALLLVHPLGHLWDFVLKRPYDPEEDFVDGVRVPLVSDDAHSLHKVKKRTRVRRWLAQGRWNEKEHTCVYVSSNVAFGFAFATDVIVEQTQFYNQEAPIVYQLLLTISTQILGYGFAGLTRRFLVRPSGMIWPGTLMSAAMFSTLHKQENKPAGGWTISRWKFFYIVWTVSFLFYFLPGLLMPALSYFNVITWFAPKNVVIANLFGVSSGLGLFPLTFDWAQVTYVGSPLLVPFWAAMNVIGGLAVVMWIIAPIFYYTNVLFSSYMPILSAAVFDNTGKVYDVSKILTPEFLFDREAYQNYSRVFLPITYVLSYGVQFAGLSALLTHTACWHGQDIWKSWKRALQEAREDGQAKYEPVADSPGSLPRQSTDESGRRMSSVSHVDGIISREDIHSKLMKRYKDAPLSWYLITFLTMTAIGIFVVEYYPVHLPWYGLLLALAIGALFFIPNGIIMAVTNQHSSIYLICQLICGVVFPGRPIANMVFVTYGYISSAQGIKFASDLKLGHYMKIPPRILFLVQIVATLVSSLTQIGVLNWMFANIRGICTSEAINGFTCPIARVHFNGSILWGVVGPNEFFGPKAIYRSLVWFFPLGALLPIPLWLYSRRHRSSILRKVNLPVIFGAMSWIPPATGLNFSVWVLVCYVFNYLIKNRHNAWWSKYTMTLSAALDSGLAFGIVVVFFGFIYPGFAQNLKWWGTEVYKQGCDWQACSYNTLQEGEHFGPKTW

SEQ ID NO: 27297 - protein, 570 aa, Gibberella zeae PH-1
MSNSSLQKPIDVAEYLFKRLYEVGVRSIHGVPGDYNLVALDYLPQCNLRWVGSVNELNAAYAADGYARVTKMAALITTFGVGELSAINGVAGSYSEHIPVVHIVGCPSTISQRDQMLLHHTLGNGDFDVFANMSSQISCNVAKLNKPSEIAEQIDTALRTCWLRSRPVYIMVPTDMVQEKVEGARLDTPIDLSEPKNDPGNEDFVVDEILKAMYAAKRPVILVDSCAIRHRVVEEVHQLVDKLDLPVFVTPMGKGAVNEDHPNYGGVFAGDGSHPPRAQTIVEESDLLLTIGALKSDFNTTGFSYRTSQINSVDFHSTHCKVRYSTYPGVAMRGVLRKIIDKVDPKSMPAPSIPEVRNEVEKNNDDSETITQAWFWPRVGEYLIPNDIVVTETGTANFGIWDTRFPRNVTALSQVLWGSIGWSVGACQGAALAAKDAGKDGRTILFVGDGSFQLTAQELSTMIRHGLKPTIFVICNDGFTIERFIHGMDAVYNDINNWKYKDLVSVFGGEKTCKTFQIKTKNELNELLTNKEFNAAECLQFVELYMPREDAPRALVLTAEASARNNAKKH

SEQ ID NO: 27298 - protein, 711 aa, Gibberella zeae PH-1
MAPRGFEDEELTISLSSSHVRRPQQTQPQSQSQQQDDSHDAPQAASRPADAPLKERIKTEQRIGAYKVLRTLGEGSFGKVKLAIHNGTGQQVALKIIARKKLISRDMAGRVEREIEYLQLLRHPHIIKLFTVIKTPNEIIMVLEYAGGELFDYIVQHGRMKEPEARRFFQQMLCAVEYCHRHKIVHRDLKPENLLLDENLNVKIADFGLSNIMTDGNFLKTSCGSPNYAAPEVIGGKLYAGPEVDVWSCGVILYVLLVGRLPFDDEHIPSLFAKIAKGTYSIPQWMPTGAANLIKKMLVVNPVHRATIEDIRADPWFTTELPVYLQLPVEEFFNTGVDPNKAIKKNDIAPNASEKVQERLHNEVTEKISKTMGYGKSDVEEALQAAEPSAIKDAYMIVRENKMMQVNHNSEALLAEPEGSSPMLSMSSARSTISQATTTPRPYVSKVGILPSSLPAYHKDYMEREKAGSVENSPPKVLINDEPQLNRTDAEKEETARRLRPHSRSQLRIDEANTRPQGMTPINPPKKTKPVRWQFGIRSRNSPWEALLCIHKALYKLGATYIPDEDYESRTAEERAEASGDSSFVDSHDGYRGSTSSIDPKKRYNLPADPWHINVRWDTSAIKKKAGNTPSAPSTPSSPSTPDGHHAKEPFVALHLDIQIYEMEHGVYLVDFKCSGYETAHGRLLEEKDVTSPFPFLDMAAKLIMQLAEAD

SEQ ID NO: 27299 - protein, 579 aa, Gibberella zeae PH-1
MCGIFACHRHPDVEKFKPTALKLAKQIRHRGPDWSGSVISNHTILCHERLSIVGVESGAQPLTNADDSIILAVNGEIYNHRHIRKHLKERYHFKTTSDCEVIIPLYTEFDTDAPNHLDGMFSFVLYDKKQDRTIAARDPIGITTFYQGWSSTEPGTIYFASELKCLHSVCDKIVAFPPGHVYDSKTGETTRYFNPSWWDPKKVPSTPVDYKVLRQALEKSVRKRLMAEVPFGVLLSGGLDSSLTASIAQREVTRLRKQALEANGNVLPVEDPDTGEGLVGVDDDDHLDTLTYLPQLNSFSIGLPGSPDNKAALEVAKFLGTKHHVMTFTIEDGLNALSDVIFHLETYDVTTIRASTPMYLLSRKIKAMGIKMVLSGEGSDEIFGGYLYFHAAPDKDSFHEETVRRVKNLHLSDCLRANKSTSAWGLEARVPFLDKEFLEYSMNIDPQDKMITKEKLEKYILRKAFDTSDEPGEQPYLPDNILWRQKEQFSDGVGYGWIDALKDTAEKQVTDEMMKNPKPEWGNDIPDTKEAYWYRCMFDEHFPPHCASTVMRWTPTWSKQTDPSGRAIATHNAKYDSAA

SEQ ID NO: 27300 - protein, 418 aa, Gibberella zeae PH-1
MTNLPQSGHGPVQTSAVVVLGAASCPAMPPPSPPTPSSSPPGDAFCEPIDPLALDRELREEFQTKDQRLQDGLHVLNTEAVALRNLSRLYETDPVARDGFSQTVQAITRQQSTNGKLVVIGVGKSGHIGQKLVATFKSLAIHAVFLHPTEALHGDLGIVGSNDTLMFITYSGKTQELLLMLPHLDESLPTVLLTSHTTPDTCDFFKHRPNTILLPAPIPEPEKTSFGVSAPTTSTTVALAIGDAIAITAAKEMNANIASLFAKNHPGGAIGAAARQPQTIREIAVSWCDIPTAAETVEFSLGFDLLRAGLDSSTGWVRVQDHVASPSTIRGIGRHDLNKSLKDIPSSLVSKSSMVSLSSDTTIRQAQNILNSMQLSLDDEDLVCRRETVVAVLERGNLVGVLEAGSILGFKTEAPLLR

SEQ ID NO: 27301 - protein, 501 aa, Gibberella zeae PH-1
MSSRIASCALRSAGRVSLSSGSRLTVAPLRMARTAAVARLTSQRGYVTETKRDNAQVETAIKLDKTAFADIPPPGTPSNAKVSPMAEVLKSAAVMEEGQRPIYLDMQATTPVDPRVLDAMMPFYVGVYGNPHSRTHAYGWESEKAVEDAREHVAKLIGADSKEIIFTSGATESNNMSIKGVARFFGRSGKKKHIITTQTEHKCVLDSCRHLQDEGFEVTYLPVQNDGLIKMEDLEAAIRPETALVSIMTVNNEIGVIQPIEQIGKLCRSKKIFFHTDAAQAVGKIPLDVNAMNIDLMSISSHKIYGPKGIGACYVRRRPRVRLDPLITGGGQERGLRSGTLAPSLIAGFGEACRIAKEEMPYDTNRIKYLSDRLLNGLLSMEHTTQNGAPESFYPGCVNVSFAYVEGESLLMALKDIALSSGSACTSASLEPSYVLRALGNSDESAHSSIRFGIGRFTTEAEIDYVLKAVQERVSFLRELSPLWELVQEGIDLDTIQWSQH

SEQ ID NO: 27302 - protein, 354 aa, Gibberella zeae PH-1
MAAPITSRTETLQKYLKLDQKGMIMAEYVWVDAEGGTRSKSRTLPEKDYKPEDLPVWNFDGSSTKQAPGENSDVYLRPCAVYPDPFRGSPNIIVLAECYDSDGTPNKYNFRHDCVKVMKTYADEEPWFGLEQEYTLLGSDDRPYGWPAGGFPAPQGEYYCGVGTGKVVQRDIVEAHYKACLYAGIQISGTNAEVMPAQWEYQVGPCTGIEMGDQLWVSRFFLHRVAEEFGAKVSLHPKPIAGDWNGAGLHSNFSTKAMREEGGMKVIEEALKKLEPHHVECIAEYGEDNDLRLTGRHETGSIDSFSWGVANRGTSIRVPRETAAKGYGYFEDRRPASNADPYRVTKVLLQFSME

SEQ ID NO: 27303 - protein, 425 aa, Gibberella zeae PH-1
MNELSENGSRGRGQPVELSENIGHGERTEIIEYDKSGNFVRSWTHGPDNIVVLKSKVCTSWLPSMHEAFMPVGYPHSVSSDYLNYQFFDSMQAFFSTITSLLANRALLQGLGVGDANSSATFAMLLTVLKDAISRVATIAFAQQFGLRIEPDAKRFRFLADLFNDTAFFMELYSPYLGPYGKILALTTGEALRALCGVAAGASKAALSVHFAKHDNLAELNAKEASQETAIGLIGLAVGTLVVKYVEDHNTVVFLMIVLVLAHLWMNYLGVRCVCMDNLNRQRATILFDEYLKTGKIMTPEEVATRESILIWWSSTRIEMAGSYYKATKDMVNVIATDGSTLFVGPHGIKIMLWEDSTAVQAIDAWFTAMKISYSKDSDYHEKKGALEESLLEGMRVKGWRLDTHALETSAPTRLGLGMGTKKDE

SEQ ID NO: 27304 - protein, 625 aa, Gibberella zeae PH-1
MLSHPENTDLIVPYLYQLDMVAGLLAVGNQIMALLAWQHQWDHQNGVSNTLRRLSHTPFAMSPFTVGDYLAERIAQIDIRHHFIVPGDYNLILLDKLGGHPSLTEIGCTNELNCSLAAEGYARGHGVSVCIVTYSVGAFSAFNGIGSAYAENLPVILISGSPNTNDVSQHILHHTLGIYDTTYQLEMAKKITCCAVRIRQAAHAPELIDRAIRAALTQRKPVYIEVPTNLAGETCPRPGPISSVISAVPSDRHSLDVAVTKTAEYIGSKQKCVVLVGPKVRRAMAQDALRQFVEAIGSAVVLQPAAKGTFPEDHAQFCGIFWGQVSTLAADTIVNWADLIICIGAIFTDYSTVGWTALPSVPQLFVDLESVTVASKIYCSRVQMSEFLSRLAETVCWNDNTMVEYNRLRPDPTLGEPSCGPERLTRKEITRQTQALISLNPQTVIFADTGDSWFNGLKLNLPFGADFEIEMQWGHIGWSIPASFGYALAKPHKRIVVMVGDGAFQMTAQEVSQMVRFRVPIIILLMNNKGYTIEVEIHDGSYNCVQNWDYARLVQAFSTENGNGHALGLEARTAEELSNSLERAIVHTNGPTLIDCSLHRDDCSRELITWGHFVAAANARMPKKE

SEQ ID NO: 27305 - protein, 874 aa, Gibberella zeae PH-1
MADNEKRLSSSETHEIPLEPLPPTQLPIAGDSASEYDESFSYDQDDMRDYHTTEQDLHVTEDDLLEARELASKYTLEDVRHIMARVYRIHEKDPNFPHTVIQKIKAFLENDELFTNPEKHENLVQEMKLEAALITNNSPYAEVRAVVENKDDTSIPSSTIRSWAIGLIFSMLLAFTNQLFDIRQPAIRIMANVAQLLSYPIGKGCERWLPDYGITLFGVRHSLNPGPFSKKEHMLITIMANVAYNTPYTNLIIWVQYLPQYFNQPYASHFAYQILIALSTNFIGYGMAGVCRRFLVYPSYCVWPASLVTIALNSAFHTDNNSPVQGPFAKIWRVSRIKFFYVMFGAMFVWFWFPNYIWTSLSNFSWMSWIDPYNRDLNTITGFNNGLGINPFPTWDWNVLLWDSADPLMVPFFSTFNRFVGAFISMWVVLGLWYSNIYNTGYLPINSNRVYDRWGQLYNVTRAINDRGLFDAKKYEDYSPPFLGAGNVVIYIFFFGIYTSTLTYALLFHRREIVTGFKGLFNSMRKKSKRAEEVHDLDVHTRLMKAYREVPEWWYLVCLLCAMAFGVSGIAGWDTHTSPGVIFYGLALCLVFVIPVGIIKAMTGIEVTLTVLAEFIGGSFVEGNALAMNYFKSFGYVTCAHAVMFSNDLKLAHYVKIPPRHTFFAQIIATFISTFVCVGVLNFQMTQIDGVCTEDARWKMTCPSVNTFFTASVLWGTVGPSKIFGKNGLYTEVLIGFPLGVVVVLVVWAINKRFPHWTWTRQIHPVAIMYGGIVWAPYNMSYVWPSVPIAYFSWIYLKSRYLGLWSKYNFVLSAAWSCGIAIAGIIIFFSLQLEGTEFKWWGNTVGYTGCEDDACPLQPLDGSDYFGPRVGEFH

SEQ ID NO: 27306 - protein, 107 aa, Gibberella zeae PH-1
MPVCRFSRRIVRLLEDHRILYGSFNVLSDEDIRQGLKLFGDWPTFPQLWVNGELVGGLDIVREEFNTKPGYLTEYTVEDNVAFKHAKAGIHLNISLQDLLLTEVHAQ

SEQ ID NO: 27307 - protein, 456 aa, Gibberella zeae PH-1
MVRNIVVLGGNSHPQLTENVCHILGVPASNRILGKFSGGESRCEIKDSVRGKDVYIIQSGSGNVNDNLIDLCIMISACKTGSAKRVTAVVPLFPYSRQPDWPYNKAGAPLSQISGASKDYTFESVPPTPRPGGPKSAGLPNGVNNLTEKLSKTAEVANGVNGTNGHPTPRRSDTISSTTSENRGHHPENSTSSQRNAYTTHDYENQSNISVFQPKPGYKQWIAQAGTLVADLLTCAGADHIITMDLHDPQYQGFFDIPVDNLYGKALLQNYIQTNIQGHQNAVIVSPDAGGAKRATLIADSLKTDFALIHKVIPTTDLSHDDQSSFNASKERRPIRFTEHRNASMMLVGDVSNRICILVDDIIDTGNTITRAAKLLKKEGATKVYALVTHGVFSGDSIARINASSIDKMLVTNSVPQEEHRRLCPKLEVLDISPVFAEAIRRVHHGESISVLFQHN

SEQ ID NO: 27308 - protein, 432 aa, Gibberella zeae PH-1
MSTNFRDRAIAEVQKAITADHNKEYQKAFDLYMSSMELWVKALKWEKNKALKVTMQEKMATYLDRAEKLKQFLANENDPSANGNGKSAMGANGASTSKGKPAAGEDDDSKKLRNALSGAILQERPNVRWEDIAGLEGAKETLKEAVVLPIKFPSLFQGKRQAWKGILLYGPPGTGKSYLAKAVATEANSTFFSISSSDLVSKWMGESERLVKLLFSMARENKPSVIFIDEIDALCGPRGEGESEASRRIKTEILVQMDGVGNDSKGILVLGATNIPWQLDAAIRRRFQRRVHIGLPDQNGRARMFKLAIGDTDTALVASDYNVLASKSEGMSGSDIANVVQSALMRPVRKILQATHFKAVMKDGKRMLTPCSPGDPEKIEMTYDDVSSEELLAPDVQLKDFEMALDDSHPTVSKDDIARQIEWTNEFGSEGA

SEQ ID NO: 27309 - protein, 760 aa, Gibberella zeae PH-1
MGLKTAGDLQSPMIKLVRQRNPSYAGDTTTVNTSLRIVSLQSLEMVWPGTFCNDKHSLPNSIETIYLYVCTIAEMNMNALKNFQSDVKNDVTWNRAARLSVKGAKALPSGTVQYISDKVPIVGWLPRYNLRWLINDLIAGLTLGLMLIPQGLSYAKIANIPVEYGLMSSWLPAVIYAFMGSTKDVSTGPTSLIGLLTSENVHALQDRWTPSEIASATAFMMGIYGMILGFLKLGFLLEFISLPVLSGFITAIAITIILNQMDSLLGEDNVRDGAAKQIHDIFSELPNANGWACLIGFTGILFLTILEKSGKRWSKDNKVIWLLSTTRAFLALVLFTGISYGVNKNREEYLFEVVKVQSEGQQVPTMPKADLIPEVAGRSIAVFIGSAVEHLAIARAFAVKNSYTSDQSQELCYLGITNFFNSFFHAMGVGGAMSRTAVNSSCNVKSPLSGVVTMAVVLVCVYELVGALFWIPKATLAAIIITAVWGLISPPSTFYRYWKTSLADFISSMLALWVTLFHSSEVGIGCAVGFNIVYILLRQVFTRLTSTGADVESNRRPTWALENNHTSPPTIPEDARIFTFNESIIFPNAFANTTKVLDEIQTYHAAYYSGSHGPETERNWSVVGGKRVARLRKKANINDPSSLPGIGLVVLDFSRVNMLDTTAVTYLKNLVSNIKSYGGDGTEVRFANMNAVCRERVARAGWRVIEVGGNGELQGDLEDDGEPIYLYWDTRAAVVAPRRRGSVLTDDGKVHAVHDEKAEV

SEQ ID NO: 27310 - protein, 745 aa, Gibberella zeae PH-1
MKQTIEDPFFEAEPTVIEELKQCIPTADGSLRYLKSLFPCFGWLPRYNWRWLVGDSIAGLTVGLVVIPQAMAYALLATLPPDFGLYTSFAGAATYWLFGTSKDIVIGTTAIGSLLVGEIVTHVHEARPDTYTSVEIAKTLSFMTGIILFALGLLRLGWLVEVIPYIPVSAFITAASIIIMCTQLPVLLGIPGVNTRDDPYRVLISTMRKLPDAQLDAAIGITCLVLLELAKYVFTKLEARQPARKKLWSIMSSLRLTFAMLLYTLVSYLVNRNLSEKESKFRIVGHINQGFIHAGPPALKTDLIGAILPQSPIILVILIVEHIAIAKSFGKKLGYDVVPSQEIMAQGTANILGPFLGGYSCTGSFGASAVLSKAGVRTPLAGLFNAFMLLLALYALTGVFYFIPRAALAGLIIHAVFNLIASPSTVRKYWRLSPFECLIWVVGVVMAVFTGLEPAIYTTTGLSFLLLLVRIARTRGEFLGKVEVEQTGETSENTDDPKTSATRDVYLSLDRNDASNRDILVESPHGGVLIYHFPEGLNYLNQAQHLKNLTDYVYTHTRRPDEEQKEDKGEALWCDTSGLCKQDNDLPVLRAIVIDCSTINNIDITSVQGLVDVRNALDRWASPSTIQWHFGGLHNRWARRALAAVGFGKSSTQDGYSFGSWAAVHTITASFGEATEGDHRRTSTDDENTIGTRHDNLSGEKRLSPVFALDRPLFNADLGEAVRAALEYARKSECRSHLQTDTETE

SEQ ID NO: 27311 - protein, 671 aa, Gibberella zeae PH-1
MCGISAFITHPGHSRSPVLNGDAKQVVEELETSLDLIAHRGPDARGRWFSDNHHVGLGHVRLSIIDLSPSGNQPFHDEQGGIHAVVNGELYDYERYKAQLADEFKFVGNSDCEIVIALYKHYGLSFISHLRGEFAFVLWDENRQQLIAARDRYGIKSLYYTVHQNKLLVATEIKSFLAFGLEPEWCVRSLRDQSWRVDSTTFFEGVYKVRPGHYLICRPNEREEQHPYWDLEYPDKFAKDLRSEDEITEGVRERLLEAVRIRLKADVPVAVYLSGGIDSSSVAGMVSHLIKQGTKLGNETSLLPSSMKCYTVQFDEGSGADESAIARRTADFLGVDIHLVKMDEEALVSRFEDTTWYSEVPLPDLNGMGRLALAEAVHAQGIKAVITGEGSDEHFGGYDAFRADSLSEPDHSWPAMMTDTERQEAHALASKEAQYGIFGDFTPKVPISTKRMFYSNHVASSIARVGSLPFSDWTKVYGNSIPETTMIEGFDGRVRDNILKRWHPVHTAQYMFVKTFMPHFILRYNGDNIDMVHQVESRCPFLDHHLTEYVNNVPPSLKMRYNAKDKSWREKHILREAVKPFVTDEVYNMSKKAYMGPRKFWPGGPLHKKISELVTKANVENLGFVDWQATQDAMDGAFNKQEGLALRRIITVAQFVVLGQRFGVKRASGRR

SEQ ID NO: 27312 - protein, 229 aa, Actinobacillus pleuropneumoniae serovar 1 str. 4074
TRYPMSVEKSYSTNSNMLGATHEAKDLEELSTGMKIVKPIMGVAFWDESVEIKPETVSVTFEEGVPVALNGKRIEDAVELILEANRIGGRHGLGMSDQIENRIIEAKSRGIYEAPGMALLHIAYERLVTGIHNEDTIEQYRINGLRLGRLLYQGRWFDPQALMLRETAQRWVAKAITGTVTLELRRGNDFTILNTESPNLTYEAERLSMEKVEDAPFTPADRNRSINYA

SEQ ID NO: 27313 - protein, 175 aa, Actinobacillus pleuropneumoniae serovar 1 str. 4074
MITLKKRLSLLPHITELSQKFDFAEILPISAQRGKNVHILQKIVRKSLREGVHHFPEEYVTDRSQRFMASEIIREKLMRFTGEELPYSVTVEIEQFKLNERGTYEINGLILVEREGQKKMVIGAKGQKIKTIGMEARADMERLFDNKVHLELWVKVKAGWADDERALRSLGYMDE

SEQ ID NO: 27314 - protein, 550 aa, Actinobacillus pleuropneumoniae serovar 1 str. 4074
MNGANLVIESLKAHGVTTLFGYPGGAIMPTYDAIYDSGLDHLLVRNEQGAAMAAIGYARATGKVGVCIATSGPGATNLITGLGDAALDSIPVVAITGQVASHLIGTDAFQESDVLGLSLACTKHSFIVQNIEELPEIIARAFQIAQRGRPGPVLVDIPRDIQLALTSAKPIVYEKQAVEAQNQDLLNEAKTLLANAKRPVLYVGGGVGMAGGVQAVRNFLKVTNIPSVSTLKGLGTITIDDPLYMGMIGMHGTKAANYAVQECDLLIACGARFDDRVTGKLDTFAPHAKVIHIDIDIAEINKLRKVEVALRGDLVEAVNTLAQPLDIDPWREDVKRLKADLDFQYVDNAGEGDINAKALLNTLSQRKPKNAIITTDVGQHQMWSAQHLQHFAPENFITSAGFGSMGFGLPAAVGAVKARPQDPVILVTGDGSIMMNIQELGTLKRGHLPVKIVLLDNQRLGMVRQWQSLFFHGRHSNTILDDNPDFVVLASAFGIQGERIEKASEVSDALDRLLNAKGAYLLHVCIPEEDNVWPLVPPGACNADMLDDEI

SEQ ID NO: 27315 - protein, 818 aa, Actinobacillus pleuropneumoniae serovar 1 str. 4074
MRVLKFGGTSLANPERFIQAADIIEKAHLKDQAAGVLSAPAKITNHLVAIVDKAIAGESFESNLKEATEIFHNIINGLYAINNKVDREGLLALVEAELAQIQSVASEAAKSKSLPDSVAATIHCRGEKLSIAMMQAWFEAKGYEVTRIDPVEKLLAHGSYLESSVDIAESTKRVDANSIPKKNVVLMAGFTAGNENGELVLLGRNGSDYSAACLAACLKADCCEIWTDVDGVYTCDPRLVPEAICLESMSYQEAMELSYFGAKVIHPRTIGPLVPLNIPCLIKNTANPDAKGTLIDGNVATDGLKVKGITNLDNVAMFNVSGAGMQGMVGMAARVFSTMSKAGISVILITQSSSEYSISFCVPAKFEEKATACLNAEFAQELSKGDLDPIDMIRELSIISVVGDGMRTAKGIAARFFSSLAQANISIVAIAQGSSERSISAVVPMNKAIEAVKATHQGLFSNKKSIEVFLVGVGGVGSELIDQIKQQKEFLAKKDIEIRVCALANADKMLLNENGLNLDNWKSDLETATQPSDFDVLLSFIKLHHVVNPVFVDCTAAQSVANLYTRALKEGFHVVTPNKKANTGSYRYYQELREAARQGQHKFLYETNVGAGLPVIENLQNLLAAGDEVEKFEGILSGSLSFIFGKLDEGLSLSEATLIAKEKGFTEPDPRDDLSGADVARKLLILARETGLALEFDDIEVEGVLPKGFSDGMSKEEFLKVLPEIDAQFNERVQAAKAEGKVLRYVGSITGDKCRVAIEAVDENHPLYKVKDGENALAFLTRYYSPIPLLLRGYGAGTDVTAAGIFADILRTLHGGSN

SEQ ID NO: 27316 - protein, 330 aa, Actinobacillus pleuropneumoniae serovar 1 str. 4074
MKKTFILQQQEISFVKNTFTQYLIDKLGIIEVQGPILSQVGNGMQDNLSGIEKAVQVNVKCIPGATFEVVHSLAKWKRHTLARFGFKEGEGLFVHMKALRPDEDSLDPTHSVYVDQWDWEKVIPEGRRNFDFLKETVNEIYKAIRLTELAVEARFDIPSILPKQITFVHSEELVQRYPNMTGKERENAICKEHGAVFLIGIGGKLSDGKPHDGRAPDYDDWTTESENGYKGLNGDILVWNEQLGTAFELSSMGIRVDEKALRLQVELTGDQDRLEMDWHKDLLAGRLPLSIGGGIGQSRLVMFLLRKAHIGEVQSSVWPKAMLEKYKNIL

SEQ ID NO: 27317 - protein, 405 aa, Actinobacillus pleuropneumoniae serovar 1 str. 4074
MEPIILNGYHTLIAATLVLLIGRFFVSKIKFLQDFNIPEAVAGGLVAAIVILCLYHWMGLSFQFEKSLQNAFMLAFFSSVGLSADFSRLKQGGMPLVIFLAVVGIFIIIQNGVGVGLATALGLDPLVGLVTGSITLTGGHGTGAAWAKIFSEQYGITGIMEMAMASATFGLVAGGLIGGPVARRLVNKMKKDRKQYSKKMDTSAEQYDDSTFESADSIRFITASSTIETMALFAACLAFSSVMANAFPDLGLPQFVWALGFGVILRNVLTKVFKFDMFDRAIDVFGNASLSLFLAMALMSIKLWELAGLAGPMLIILVVQTIVMILYGYFVTFRVMGKDYDAAILTAGHCGFGLGATPTAVANMQSVTETFGPSHKAFLIVPLVGAFFVDILNLGVITWFVEFLR

SEQ ID NO: 27318 - protein, 405 aa, Actinobacillus pleuropneumoniae serovar 1 str. 4074
MERFPKSDKLANVRYDIRGAIHKEALRLEEEGNKILKLNIGNPAPFGFEAPDEIVVDVIRNLPKSQGYCDSKGLYSARKAIVQYYQSKGIRNVDVNDVYIGNGVSELITMSMQALLNDGDEMLIPMPDYPLWTAAATLAGGKAVHYLCDENNEWMPDIEDIKAKITPRTKGILVINPNNPTGAVYSRSMLLEIAEIARQHNLMIFADEIYEKIIYDGAVHHHIAALAPDLLCVTYNGLSKAYRVAGFRQGWMVLSGPKNQARGFIEGLDMLASMRLCATTPMQHAIQTALGGYQSINEFVLPGGRLLEQRNKMYELLVQIPGISCVKAKGALYMFPKIDTEMYGIKDDAKFIYDLLQAERVLLVQGSGFNWHKPDHFRVVTLPYAHQIEEALGRLANFLKTYKQS

SEQ ID NO: 27319 - protein, 542 aa, Actinobacillus pleuropneumoniae serovar 1 str. 4074
MNSNRSLLVMGLLLVSFLIFTQWQQDFNPEIQAQKQAQQQAQVASQSGDVLAASNANTVIAENATQGKTVTLESDVLRLTIDTLGGDVIASDLLAHNAELNSQTPFKLLQTGATTYVAQSGLVGKNGIDTNAGRPQYQVAQDTFVLAEGQNEMSVPMTFEKDGVLYTKTFVLKRGSYDVAVNFNVKNQTAATVEVQPYGQIKHTLLESSGSLTMPTYTGGAYSSAETNYKKYSFQDMEKANLDINTKAGWVALLQHYFVSAWVPNQDAENTIYSRTNNGIATIGYRGPVTTIAPNSEATITSQLWTGPKDQKEMEATAANLDLTVDYGWAWFIAKPLFALLTFIQSIVTNWGLAIIGVTIVVKTILYPLTKAQYTSMARMRMLQPKIQEMRERFGDDRQRMSQEMMKLYKEEKVNPMGGCLPILIQMPIFIALYWTFMEAVELRHAPFFGWIQDLSAQDPYYILPLLMGASMFLLQKMSPSPVTDPVQQKVMTFMPVMFTVFFLWFPSGLVLYWLTSNIITIVQQWLIYRNLEKKGLHSRKK

SEQ ID NO: 27320 - protein, 504 aa, Actinobacillus pleuropneumoniae serovar 1 str. 4074
MFNFDPTTITFIIYIIGMIAIGFIAYRVTNNLSDYILGGRRLGSFVTALSAGASDMSGWLLMGLPGAVYSSGLIEGWLAVGLTIGAYLNWKLVAGRLRSHTEHSGDALTLPEYFHNRFNDETRIIKILSAIIFLLFFAVYCASGVVAGARVFENLFGVPYENAIWYGAVATILYTFIGGFLAVSWTDTIQASLMLFALILTPVFVIINVGGFEVMQETIAKAGELAQKDYNDIFAGTTVLGVLSLLAWGLGYFGQPHIVVRFMAAESVKSLEKARRISMTWMIICLAGAIGIGYFGMAYFFTHPEQATVVNQNKEQIFIELAKLLFNPWIAGVLLSAILAAVMSTLSAQLLICSSAITEDLYKGILRPSATDKELVWLGRIMVLAVAALAIYIAQDPNSQVFGLVKDAWAGFGSAFGPVVLLSLFWKRMNGFGAISGMLVGALIVYFWKDITLWANLPEVYSMIPGFILATLAIVLVSLITPPPSKKVTDTFERADKAYLAELQ

SEQ ID NO: 27321 - protein, 409 aa, Actinobacillus pleuropneumoniae serovar 1 str. 4074
MTVQIDKSKIKFLLLEGVHQNALDVLQAAGYTNIEYHKKALDGEELINAIKDAHFVGLRSRTYLTKEVLSHAKNLVSIGCFCIGTNQVDLKEAKRLGIPVFNAPFSNTRSVAELVLAEIILLMRQVPKANAEVHRGVWNKSAAGSNEVRGKKLGIVGYGHIGSQLSVMAESIGMQVYFYDIENKLPLGNAQQIASLNELLAGCDAISLHVPENASTKNLMNADRIAQLKEDSVLINAARGTVVDIDALAARLAQGTLRGAAIDVFPEEPASINDPFESPLRQFDNVILTPHIGGSTAEAQANIGTEVANKFVKYADNGSTLSAVNFPEVSLPILHSDAKRLLHIHENRPGILNKINQVFVDGNVNIAGQYLQTDPNIGYVVIDVELDDASEALERLQQIDGTIKARVIS

SEQ ID NO: 27322 - protein, 619 aa, Actinobacillus pleuropneumoniae serovar 1 str. 4074
MTTNSLTFADLGLPQSILDAVNDMGFVTPSPIQQETIPHLLAGRDVLGMAQTGSGKTAAFSLPLLAQIDPTKRHPQMLVMAPTRELAIQVADACEQFTKNMKGVNVVTVYGGQRYDIQLRALKQGSQVVVGTPGRILDHIRRGTLDLSALQSIVLDEADEMLRMGFIDDVETVMAELPENHQTALFSATMPEPIRRITRRFMQDPQEVKIQATQRSAPDITQSYWLVNGFRKNDALLRFLEVEEFDAAIIFTRTKTGTIDITELCERNGYRTAALNGDMTQQAREQTLDKLKSGRLDILVATDVAARGIDIERISLVVNFDIPLDAESYVHRIGRTGRAGRSGRALLFVEPRERRLLRNIEHLMKKPIDEVAIPNHEILMAKRREKFKARVSKQLEHHDLEKYRELLEDLFTADQDHEELAAAMMMMLQEKQKLILPPDPEIRAARGERGRRDRDDRRGGRDERRGGREHRENNGVAMDLYRIELGREDGVEVRHIVGAIANEGDISSRYIGHIKLHDTYSTIELPQGMPNHIVQHFAQKARVLNKQMQMSLLGPAGGVNSQPFEERRGGGRRNDRNDRNDRRSDRGGRSDRREGGFNDRKKGGFKEKRFNDKGRGRRD

SEQ ID NO: 27323 - protein, 258 aa, Actinobacillus pleuropneumoniae serovar 1 str. 4074
MHNRDLYPHEILQDVIDKSFAKSQSSLKMLAILSFLGGGYVSFGYIAYLKVVSGIPPEWSGLANLLGAAVFPICLICILIGGGELATGNMMLMALGKFSKKVSLPKLVRNWVIVSLGNLVGAVSMAYFLGHYVGLAKTIAIAEAKVHMDFGRAFISAIACNWMVCMGIWFYFGAKQTSGRILAMWFPVMTFVLIGLQHFVANMFIIPAGIWAGANVTWGQFFFNMIPVFLGNVTGGAAFVGASYLFAYKHLLKDDYAI

SEQ ID NO: 27324 - protein, 410 aa, Sinorhizobium meliloti
MTINATVKEAGFRPASRISSIGVSEILKIGARAAAMKREGKPVIILGAGEPDFDTPDHVKQAASDAIHRGETKYTALDGTPELKKAIREKFQRENGLAYELDEITVATGAKQILFNAMMASLDPGDEVVIPTPYWTSYSDIVQICEGKPILIACDASSGFRLTAQKLEAAITPRTRWVLLNSPSNPSGAAYSAADYRPLLDVLLKHPHVWLLVDDMYEHIVYDAFRFVTPARLEPGLKDRTLTVNGVSKAYAMTGWRIGYAGGPRALIKAMAVVQSQATSCPSSVSQAASVAALNGPQDFLKERTESFQRRRNLVVNGLNAIEGLDCRVPEGAFYTFSGCAGVARRVTPSGKRIESDTDFCAYLLEDSHVAVVPGSAFGLSPYFRISYATSEAELKEALERISAACKRLS

SEQ ID NO: 27325 - protein, 257 aa, Galdieria sulphuraria
MKHKSLLQIKNLHVKLANTEEYILNGINLNVNQGEIHAIMGPNGSGKSTLSKVIAGHSLYKVVKGEIIFQDQNLLNYTIEDRANLGIFLAFQYPLEIAGVNNIDFLRLAYNSKLKFNQRNPVDPLKFLEIVYPKLKLVGLDESFLYRKVNEGFSGGEKKKNEILQMSLLDAKLAILDETDSGLDIDALQDISNAIKSILKMSQFKQSIIIITHYQRILNYIQPDYIHVMYKGKIIKTGDASLANQLESQGYEWLASE

SEQ ID NO: 27326 - protein, 482 aa, Panicum miliaceum
MAATVAVENLNPKVLKCEYAVRGEIVIHAQHLQQQLQTQPGSLPFDEILYCNIGNPQSLGQQPVTFFREVLALCDHPCLLEKEETKSLFSADAISRAKQILSTIPGRATGAYSHSQGIKGLRDAIAAGIASRDGFPANADDIFVTDGASPGVHMMMQLLIRNEKDGILCPIPQYPLYSASIALHGGTLVPYYLDEKTGWGLEISDLKKQLEDARSKGIDVRALVVINPGNPTGQVLAEDNQCDIVRFCKNEGLVLLADEVYQENIYVDDKKFNSFKKIARSVGYGEDDLPLVSFQSVSKGYYGECGKRGGYMEITGFSAPVREQIYKIASVNLCSNITGQILASLVMNPPKVGDESYAAYKAEKDGILQSLARRAKALEDAFNNLEGISCNKAEGAMYLFPQIHLPKKAIEAAKAANKAPDAFYALRLLESTGIVVVPGSGFGQVPGTWHIRCTILPQEDKIPAVITRFKAFHEAFMAEYRD

SEQ ID NO: 27327 - protein, 922 aa, Pisum sativum
MARVLAQSLSVPGLVAGHKDSQHKGSGKSKRSVKTMCALRTSGLRMSGFSGLRTFNHLNTMMRPGLDFHSKVSKAVSSRRARAKRFIPRAMFERFTEKAIKVIMLAQEEARRLGHNFVGTEQILLGLIGEGTGIAAKVLKSMGINLKDARVEVEKIIGRGSGFVAVEIPFTPRAKRVLELSQEEARQLGHNYIGSEHLLLGLLREGEGVAARVLENLGADPTNIRTQVIRMVGESADSVTATVGSGSSNNKTPTLEEYGTNLTKLAEEGKLDPVVGRQPQIERVTQILGRRTKNNPCLIGEPGVGKTAIAEGLAQRIANGDVPETIEGKKVITLDMGLLVAGTKYRGEFEERLKKLMEEIKQSDDIILFIDEVHTLIGAGAAEGAIDAANILKPALARGELQCIGATTLDEYRKHIEKDPDLERRFQPVKVPEPTVDETIQILKGLRERYEIHHKLRYTDEALIAAAQLSYQYISDRFLPDKAIDLVDEAGSRVRLQHAQLPEEAKELDKEVRKIVKEKEEYVRNQDFEKAGELRDKEMDLKAQISALIEKGKEMSKAETETADEGPIVTEVDIQHIVSSWTGIPVDKVSADESDRLLKMEDTLHKRIIGQDEAVQAISRAIRRARVGLKNPNRPIASFIFSGPTGVGKSELAKALAAYYFGSEEAMIRLDMSEFMERHTVSKLIGSPPGYVGYTEGGQLTEAVRRRPYTVVLFDEIEKAHPDVFNMMLQILEDGRLTDSKGRTVDFKNTLLIMTSNVGSSVIEKGGRRIGFDLDYDEKDSSYNRIKSLVTEELKQYFRPEFLNRLDEMIVFRQLTKLEVKEIADIMLKEVFQRLKTKEIELQVTERFRDRVVDEGYNPSYGARPLRRAIMRLLEDSMAEKMLAREIKEGDSVIVDVDSDGKVIVLNGSSGTPESLPEALSI

SEQ ID NO: 27328 - protein, 316 aa, Bifidobacterium longum DJO10A
MAEDVAEQLGIDVLETTAYDFANGEMYVRYTESVRGADVFVLQSHYKPINKAIMEQLIMIDALKRASARSITAVCPLLGYSRQDKKHRGREPISCRLVFDLLKTAGADRIMSVDLHAAQSQGFFDGPVDHLVAMPVLVDYIRDRFQGHLDNVAVVSPDAGRIRVAEQWAQRLGGGPLAFVHKTRDITRPNQAVANRVVGDVAGKDCVLVDDLIDTAGTIAGACHVLQDAGAKSVTVVATHGVLSGPAVERLKNCGAREVVLTDTVPIPEEKRWDGLTVLSIAPLLASAIRAVFEDGSVAELFDTYPEHHGQGFLFA

SEQ ID NO: 27329 - protein, 280 aa, Bifidobacterium longum DJO10A
MAASMAACGPSAGTPSEAKSSDTGTSSSANAKARSLDEIKKSGKIKIAVFSDKAPFGYVDKDGKYQGYDVYFAEQLAKDLGVEPEYTSVDPAARVDVLTSNKVDLVLANFTVTDERKEKVDFAKPYMKVALGVVSPESAQITDVSQLDGKTLIIAKGTTAETWFEKNAPNVKLQKYDQYADAYNALLDGRGDAFSTDNTEVLAWAKSNKGFKVGITHLGDDDTIAPAVQKGNTELLNFVNDEIVKLGKDNFFHKDYQETLEPVYGNEVNPDDIVVEGGAV

SEQ ID NO: 27330 - protein, 305 aa, Bifidobacterium longum DJO10A
MKIVHDFFVMLGVSPIGVSWVLAIIILVLVVQACIFPLFYKQMKSMRKMQALAPKMQRIQNKYKGKTDQASREAMSRETMKLYQDNDVNPAGSCLPMLIQGPVFMSMFYTLSAIPYIANGKRDALGAFDVATAKQFTQTDVFGIVSVTDNFTSAAASGKAVIGIFVFLMCFCLWFMQYFSMKRNMAAASMNKQTETMQKAMLWLFPVMYIFSGVAMPFAVLVYWLTNNVCNLCRTLWQVYAFPTPGSPAAADKEKRDHRNENARRAKAGLPSLEEEALAKAKEEAERKATQGYQRQQPVRKRKKK

SEQ ID NO: 27331 - protein, 420 aa, Bifidobacterium longum DJO10A
MPTAKPASLSAEALNIPRSGIRDVFDRVERVPDAISLTVGEPSATAAPHIVAAACEAAQAGRTRYTNVLGVPEYRKAVADYSARVKGLTYDPETEIQAVDGATIGLFLALKAVVGTGDEVIIPSPFFTSYDAEVMLCGGRPVTVALRPEHGMRVNAADIEAAITPRTRAVIINSPGNPTGAVTSAAELARIAEVCKQHNIWAISDEVYHPFVFGETFGETLGGEAAVAPSIAAVPGMKDRTIVVESLSKTYAMTGWRIGYLLAPEAVIEQTGKIAELMHSSVNSLAQYAGVAALAGPQDHVAAMREEYRAKRQIVLDGLAGCPVLRLIEPQGAFYAFVDVRLTGLDSGEFADRLLDEEHVAVVPGEAFGEEGRGFVRLSYAGDAGELREGVARLRAFAERVWNPITGHHTATYHPMEVLA

SEQ ID NO: 27332 - protein, 649 aa, Bifidobacterium longum DJO10A
MQAFSGVPKINTAPDKQTIVDGEKMTGAQALIRSLEDLGVEDVFGIPGGAILPVYHEIKDNTKFRFVLMRHEQAAGHAAEGYALATGKVGVCIVTSGPGATNVVTAIADANMDSVPMVVITGQVGVQAIGTDAFQEADIVGITYPVSKHSFLVTRAQDIPRVLSEAYYIANTGRPGPVVVDLTKTAQTGDMYYSWPQRMILPGYNPTTKAHGRVLSDAAKLFSQSYRPVLYVGGGAARSNAGAQVKALADLTGAPVVTTLPARGIIPDSDPKNLGMLGMHGTIAATGAVQRADLLVAIGARFDDRVTGKLDAFAPTARVIHIDIDPAEIGKNRQPDVPIVGDVATVLDDLIPEIQRTQAIQGKPNLAPWWKAIDGWREEYPMTWDEPTDGSLAPQWVIKKLSEMADPSTIWVTGVGQHQMWASQFIDFENQHAWISSGGLGTMGYGLPAAIGASVGSAREFEGKKPVWLIDGDGSFQMTSEELAAAFLDHAPVKIAILNNSVYGMVRQWQTLFYEHHYSQTNLLDGEAHGADGAAALADGDAPLEVPDFIKLAEAYGCVGIRAFTEEEAIAAIEKANQINDRPVLIDFRVWKDAMVWPMVAAGAPNDEVTYKPGIKPLAGGTPAPGTGPDEHATGVFEHETAAATASEH

SEQ ID NO: 27333 - protein, 412 aa, Bifidobacterium longum DJO10A
MADNKRIVLAYSGGLDTSVAISYLKERTGKDVVAVSLDVGQGGESLETIKQRALACGAVESYVVDARDEFANEYCMKALKANAMYEGVYPLVSAISRPLISKHLVRAAHQFGADTISHGCTGKGNDQVRFEVSIASIDPTLKAISPIRDLSLTRDVEIAFAKEHKLPITQTEKSPYSIDQNVWGRAIETGFLEDPWNGPTKDCYSYTDDPAFPPVEDEVVIEFKEGVPVKIDGRDVTPLQAIEEMNRRAGAQGVGRIDLIEDRLVGIKSRELYEAPGAVALITAHQELENCCLEREQHRIKRDIDKRWGELVYDAQWFSPATQSLNAFIEDTQKYVSGEIRMVLHGGRAVVTGRRSDSSLYDYKLATYDSGDTFDQKSSNGFIDIYGLPSRVAAARDVKFGNGIEVPENTVE

SEQ ID NO: 27334 - protein, 597 aa, Bifidobacterium longum DJO10A
MRNVLIAAQRAYIAREASADSFSGGLGIVAEGRDITTVVSPDAEVRVLLTAREEVRQARRTGQAVKGVGAEDVAARDKADSKVTSFLTAADGVTTIDNSDLDFAHTLDLLIGLVEDAIENQEYEQYAANLEGYELDEGDEDLISGRGFTEGARKAGPKPVGVLAVVGRPNVGKSSLVNRILGRRAAVVEDTPGVTRDRVSYDAEWAGTDFKLVDTGGWEADVEGIESAIASQAQVAVTLADAVVFVVDGQVGMTTTDERIVKMLRAAGKPVVLAVNKIDDQASEYLAAEFWKLGLGEPYSISAMHGRGVGDLLDVALDKLKQAEKTSGYLTPSGLRRVALVGRPNVGKSSLLNQLAREERAVVNDLAGTTRDPVDEIVNIDGEDWLFIDTAGIKRRQHKLTGAEYYSSLRTQAAIERCELALILFDASQPVSDQDLKVMSTAVDAGRAIVLVFNKWDAMDEFDKQRLERLWNTEFDRVMWAERVNLSAKTGWHTNRLTRAMDKALESWDQRIPTGKLNAFLGKIQAAHPHPLRGGKQPRILFATQASTRPPRFVIFATGFLEHGYRRYIERSLREEFGFEGTPIQISVNIREKKKRK

SEQ ID NO: 27335 - protein, 564 aa, Hanseniaspora uvarum
MSEITLGRYVFERIKQVGVNTIFGLPGDFNLSLLDKIYEVEGLRWAASLNELNAAYAADGYSRIKGLGVIITTFGVGELSALNGIAGAYAEHVGVLHIVGVPSLASQAKQLLLHHTLGNGDFDVFHRMSANISETTAMITDLAAAPAEIDRCIRTAYIAQRPVYLGLPANLVDLNVPAKLLETKIDLALKANDAEAENEVVETILALVADAKNPVILSDACASRHNVKAEVKQLIDATQFPAFVTPLGKGSIDEKHPRFGGVYVGTLSSPEVKQSVESADLILSVGALLSDFNTGSFSYSYQTKNIVEFHSDYIKIKNASFPGVQMKFVLEKLIAKVGAKIANYSPVPVPAGLPKNAPVADSTPLAQEWLWNELGEFLEEGDIVVTETGTSAFGINQTRFPTDAYGISQVLWGSIGYSVGAMVGATFAAEELDKAKRVILFVGDGSLQLTVQEIACLIRWGLKPYIFVLNNNGYTIEKLIHGPTAQYNMIQNWKQLRYLTNFGATDYEAIPVKTVGEWKKLTADPAFKKNSTIRLIEVFLPEMDAPSSLVAQANLTAAINAKQD

SEQ ID NO: 27336 - protein, 430 aa, Thermus thermophilus HB27
MKRLLAAFLFLLPALALEVGFKDADVNGDGTPEKVAVTNLMDLAFNEAGQVVGWYVKAYKGTAFGDYARAPNLAANGPVLSPVGFRPLEAEFAVEDGHLLARFRGEEGTLTYRIPKERYTAEVTADFPLVLKLSAQGNPKALLEGAAEPAPSGEGRLVYLAWQTRPKAGYALVAFGEGPLEGRLVGREGEVRLGPGEILRVYGGQNELVRFHVEGLLSFPGLFSPNLWGQLSLGLLWIMEAAYRFTGNWGLAILFLTLVVRLLLWPLMHQQFKSMAEIQRLQPLIQKINEKYKDDPNKRAEATMKLYQEHRVNPAAGCLPLLIQMPILFILWKVIANYEFGQGFLWIPDLALPDPYYILPVLYVASTFLSTWLSAHGNRDLIRQSLFMNLIFVFLVLQFPSGVTLYWVLSTLIGLVQQWLINKSLAPLKA

SEQ ID NO: 27337 - protein, 374 aa, Thermus thermophilus HB27
MRGVYLDYAATTPLDPEVREAMRAVEEVFGNPSSIHRFGQEARKVLEEARERVAEALGARPREVVFTAGGSEADALALLGPALARGRGHVVSTAVEHAAVLGALRLLERLGFSVTLLKPDSLGMVYPEQVEEALRPDTFLVSVMTANNELGNLYPVREIAEVAHRHGALFHTDAVQAVGQVPFRMDEVGADLVSLSAHKFYGPKGVGALLVRQGVELMAVVPGKQEGGRRGGTQSPVLAHGMAVALELALRRLPEEAARLSALRRRLEAGLLAVEGVELNGHPERRLPKLVNVTVKGADGEALLLAMDLLGVAVSSGSACSAGNLEPSHVLLAIGRSYAEAKASLRFSLGRFTTEEEVDRAVAVFREAVARARA

SEQ ID NO: 27338 - protein, 422 aa, Thermus thermophilus HB27
MLTFSFKPPGGAGKEGSVALVVQKYGGTSVGDLERIHKVAQRIAHYREKGHRLAVVVSAMGHTTDELIALAKRVNPRPPFRELDLLTTTGEQVSVALLSMQLWAMGIPAKGFVQHQIGITTDGRYGDARILEVNPARIREALEQGFVAVIAGFMGTTPEGEITTLGRGGSDTTAVAIAAALGAKECEIYTDTEGVYTTDPHLIPEARKLSVIGYDQMLEMAALGARVLHPRAVYYAKRYGVVLHVRSSFSYNPGTLVKEVAMEMDKAVTGVALDLDHAQIGLIGIPDQPGIAAKVFQALAERGIAVDMIIQGVPGHDPSRQQMAFTVKKDFAQEALEALEPVLAEIGGEAILRPDIAKVSIVGVGLASTPEVPAKMFQAVASTGANIEMIATSEVRISVIIPAEYAEAALRAVHQAFELDKA

SEQ ID NO: 27339 - protein, 548 aa, Thermus thermophilus HB27
MGLVPECFITEIVEQDLKEGKYAKLVTRFPPEPNGYLHIGHARSIVLNFGLAQDYGGECNLRFDDTNPETEKEEYARAIEEDVRWLGFQPTRVLYASDYFETMYQCALVLIQEGKAYVDDLPEEEMSELRAQGKPSPYRERSVEENLELFERMRRGEFPTGSRVLRAKIDPAHPNFKLRDPVLYRIVHAPHYHAGNKWVIYPMYDFAHPLEDFIEGVTHSLCTLEFENNRAVYDWVIENLKGKCGLPTSPRPHQYEFARLDLSHTVLSKRKLIKLVEGGYVSGWDDPRLPTLRGLRRRGVRPEAIVEFVRKTGISRNEAQIEMDLFEEVVRDDLNPIAPRVLGVVDPLRVVLTNYEGEEWIEAPYWPRDIPKEGTRPLPFSPELYIERTDFSLNPPKGWKRLAPGQRVRLRHAYVIELEDVVEEGGEVKLLKARIVPGTLGANPEDGVRPKGVIHWVSARHALPVEFRLYGRLFRTKDPEEGGDFLQNLNPEALVVKRGFIEPSVAQDPEDTRYQLERLGYFWRDPVDSRPEALVMNRIVPLKEGYRV

SEQ ID NO: 27340 - protein, 396 aa, Thermus thermophilus HB27
MREVYVVAAVRTPIGKFGGVFKDVSPVDLGAHAMREALARAGVEGKALDLYIFGNVLRAGHGQLLPRQAALKAGIPKEVDGYQVDMVCASGMMAALNAVQFLRTGEAHLVLAGGMESMSQAGFYLSHRARWGYKFLLGAPENLQDILLRDGLSDPFTGEAMGEQAERLAQDHGVTRQEIDEAAYLSHKRAAEATEKGLFAWEIAPVEVQGRKGPVVVDRDEGIRPETTLESLAALRPAFKEDGVLTAGNSSQISDGAAALLLASEEAVKAHGLKPIAKVLGGAWAAGEPWRFPEAPIPAAKRLLDRLGMRVSDFGLFENNEAFALNNVLFSRLLGVPYERLNVFGGAVALGHPIGASGARILVTLLNALRAKGEERGLAAICHGTGGSVAFAVEVV

SEQ ID NO: 27341 - protein, 116 aa, Thermus thermophilus HB27
MFHAKIHRATVTQADLHYVGSVTVDQDLLDAAGILPFEQVDIYDITNGARLTTYALPGERGSGVIGINGAAAHLVKPGDLVILVAYGVFDEEEARNLKPTVVLVDERNRILEVRKG

SEQ ID NO: 27342 - protein, 349 aa, Thermus thermophilus HB27
MVETLPALEIGEDERLDLENLATGAFFPVKGFMTREEALSVAHEMRLPTGEVWTIPILLQFREKPRVGPGDTVALLHGGERVALLHVAEAYELDLKALARAVFGTDSETHPGVARLYAKGPYALAGRVEVLKPRPRTPLEKTPEEVRAFFRQRGWRKVVAFQTRNAPHRAHEYLIRLGLELADGVLVHPILGTKKPDDFPTEVIVEAYRALIRDFLPQERVALLGLATPMRYAGPKEAVFHALVRKNFGATHFLVGRDHAGVGDFYDPYAAHRIFDRLPPLGIEIVKVGAVFHCPLCGGIASERTCPEGHREKRTAISMTKVRALLREGKAPPSELVRPELLPILRRGV

SEQ ID NO: 27343 - protein, 585 aa, Thermus thermophilus HB27
MAGLADRVSGARLDPAAEAEIRYLEAMIARLEAGEEDPEDFRVFRLKNGIYGIRGRPEHHMIRIKLPVGRITPEGLRVLADVAERYAENRLAHVTTRQAVQLHHVHRRDVPKVLRAVNAVGLTTREACGHSIRAITCCPYAGVSPEEPFDVTPYAEAAYRYFLRHPVGQNLPRKFKIAFEGCATDHARTPIHDIGVVAALEGGKRGFRVYVGGGLGAAPMSAELLEAFTPEEDLLPTMLAIVRLFDRYGNRKVLTQARLKFLVKKWGIAAFREAVREERRLVKLTASGEDLEAWAPPPEPEPPRLPSPPKKPFSFAPGFDAWRRTNLFKQKQEGFYTVTVRLPLGDITPEGLRALAAIAETYAAEVRSAISQNLLLRFVPEEALGGLYEALLEAGLALPEAHTLLDITRCPGADTCNLAITRSRGLAQALEAHLSALPLAQDPGAKAIGVKISGCPNSCGQHHIADIGFYGSSRKVGEREVPHYVLLLGGRTREGEARFGQVVGRIPARRVPEAVERILKRYLEERQNGESFQAYLDRVGAASFKPLLQDLQEVPPYEEAPEFYQDLGAEGEAFSVQLGRGECAV

SEQ ID NO: 27344 - protein, 384 aa, Thermus thermophilus HB27
MGEPVILEAVRTPIGKRNGALRAYRPDALYAKVLDALLERTGIDPGLIGDVVTGCVTQVGEQGANVGRLGVLLSRLPKEVPAVSLNRMCGSSQQAVHFAAQAIAAGDVDFAIAGGVESMTRVPMFSDIGGGFHTLNPELGKRYELVHQGESAERIAERYGFCREELDEWGYLSHKRAARATEEGRFSAQILPLEGLDAEGRPFLLTRDEGVRPDVDYEKMLALKPVFRENGVVTAGNSSQISDGAAALLLGDREKALALGLRPRARFLARVVVAGDPTLQLLEVIPAAKKALERAGLSLRDVDVIEVNEAFASVVLAFLRELGADPEKVNPNGGAIAHGHPLGATGAVLMTKLLYELERTGGEFGLQVMCIGHGQATATVIQRL

SEQ ID NO: 27345 - protein, 338 aa, Thermus thermophilus HB27
MRPTGAPPWRWPSSPSPGRNPTPVKRGMKVFVTRTLPGKALDRLRERGLEVEVHRGLFLPKAELLKRVEGAVGLIPTVEDRIDAEVMDRAKGLKVIACYSVGVDHVDLEAARERGIRVTHTPGVLTEATADLTLALLLAVARRVVEGAAYARDGLWRAWHPELLLGLDLQGLTLGLVGMGRIGQAVAKRALAFGMRVVYHARTPKPLPYPFLSLEELLKEADVVSLHTPLTPETHRLLNRERLFAMKRGAILINTARGALVDTEALVEALRGHLFGAGLDVTDPEPLPQDHPLYRLPNAVITPHIGSAGRTTRERMAEVAVENLLAVLEGREPPNPVV

SEQ ID NO: 27346 - protein, 397 aa, Thermus thermophilus HB27
MREAVIVSAVRSPVARGKKNGALATLHPVDLSAQVMRAAVERVGLDPKELEDVLWGCAMPEAAQGLNIARLALLRAGFPVEVAGATINRFCSSGLQTIAMAAQEVMTGMADAVLAGGVEMMSQVPMSGFHTRLHPDLTPTEWSPETYSTYIGMGFTAERVAERFGISREDQDRWALRSHQKAAQAWAEGRFPEVVPIRVPKVTYRGTKKEVEEVVFDRDETVRPDTSLEALAKLRPAFKKNGTVTAGNSSPYSDGAAAVVVMSREKAEALGLKPLARFVSFAVAGVEPDVMGIGPVKAVPKALQRAGLTLDQIALIEFNEAFAAQVLAVMRALEMPEEKTNVNGGAIALGHPLGATGAKLTAQLLSELSRRGGGYGLVTMCIGGGMGAAGVFEVYPA

SEQ ID NO: 27347 - protein, 521 aa, Thermus thermophilus HB27
MWRVLVSDDMRLGEVRYPGVILDYRPGIGREELLEIIPAYDALITRSRTRVDAELLQRGKRLKVVGRGGVGVDNVDLEAASRLGILVVNVPEANTRSAAELAFGLLLAAARGIALSDRKLRQGEWDRKFLGLELKGKTLGIVGLGRIGSQVARFAKAFEMRVLAYDPYIPKARAESLGVELLENLEDLLRQSHFLTVHTPLTEETRGMIGRRELYLLPRGAVVVNAARGGIIDEKALLEVLEEGHLFAAGLDVFAEEPPPKDHPLIHHPRVVHTAHLGANTLEAQERVGEAILERVVRTLEGDLSYALNTGFDPEALEALKGFLPLGEALGKLLAQITRGRPEALEVRFLGQFEKDPEPIASAVAKGLLARVLGEGAVNLVSARPLLKDRGIHLTTLRSEEAGEYTRLVEARLSTDQEERRARGVVIGGRPRLVGIDDYALEVVPEGYMLVCVNYDRPGVVGQVGTLLGEAGVNIAGMQLGRDVPGGRALFVLTVDQKPSPEVLEALRALPVLERVDLVEL

SEQ ID NO: 27348 - protein, 401 aa, Thermus thermophilus HB27
MPEAWIVEAVRTPIGKHGGALASVRPDDLLAHALSALMDRSGVPKEEVEDVYAGCANQAGEDNRNVARMALLLAGFPVEVAGCTVNRLCGSGLEAVAQAARAIWAGEGKVYIGSGVESMSRAPYAVPKPERGFPTGNLVMYDTTLGWRFVNPKMQALYGTESMGETAENLAEMYKIPREEQDRFALLSHQKAVRAWDEGRFQDEVVPVPVKRGKEEILVEQDEGPRRDTSLEKLAALRPVFREGGTVTAGNSSPLNDGAAAVLLVSDDYAKAHGLRPLARVRAIAVAGVPPRIMGIGPVPATRKALERAGLSLSDLGLIELNEAFAAQSLAVLREWGLDMEDPRLNPNGGAIALGHPLGASGARILTTLVHEMRRRKVQFGLATMCIGVGQGIAVVVEGMG

SEQ ID NO: 27349 - protein, 223 aa, Thermus thermophilus HB27
MELYLDTASLEEIREIAAWGVLSGVTTNPTLVAKVFAAKGEALTEEAFAAHLRAICETVGGPVSAEVTALEAEAMVAEGRRLAAIHPQIVVKLPTTEEGLKACKRLSAEGIRVNMTLIFSANQALLAARAGASYVSPFLGRVDDISWDGGELLREIVEMIQVQDLPVKVIAASIRHPRHVTEAALLGADIATMPHAVFKQLLKHPLTDIGLKRFLEDWEKVKP

SEQ ID NO: 27350 - protein, 293 aa, Thermus thermophilus HB27
MRLVFGEKDAPYEEARVVVLPVPYDLSLSFLPGARRGPEAILLASRELEPFLLELGAAPEEVGIHAAEPVPWVAGMAEESHRLIREEALKHLRAGKWLVALGGDHSVTHPLVQAHREALGEFSLLHVDAHADLYPEWQGSVYSHASPFYRLLTEGFPLVQVGIRAMDRDSLRLARKRGVALFPAHRIHREGLPLDEILEALGKRVYISLDFDALDPSLMPSVGTPLPGGLSYRQVVDLLEAVFREKEVVGMDFVELSPNGQFHAEMTAAQLVYHAIGLKGLQAGWLSREVDHI

SEQ ID NO: 27351 - protein, 562 aa, Thermus thermophilus HB27
MKGAEALLRALEREGVEVIFGHPGGAIMPTYDALYDSPIRHILVRHEQGGVHAATAYARASGRVGVVMATSGPGALNLVTGLADAMMDSTPVVAITGNVPRALIGTDAFQEADVTGVTMPITKHNYLVQDVNEIPRVVKEAFHIAATGRPGPVLIDIPKDVQLAEFTGSFDVKLDLPGYKPTLKGHPKQIERALDALEKAERPVLMVGGGAQHAHAELLAFAEKTGLPVITTLMGLGAFPGNHPLWLGMPGMHGTVAANRAIHHADVILAIGLRFDDRVTGKVSRFAPHAHTIIHVDIDPAEIGKVVRTHIPIVGDSRLVLKELLKGAKALRLAAWWRELEEWRTRYPLRYRPKPHLQSQEVIRAFYEATGGHAIVTTGVGQHQMFAAQFFPVTRPRSFLTSGGLGTMGVGLPFAIGAKIARPEELVIDFDGDGSFQMTLQELATVVKYKLDVKVVILNNGYLGMVRQWQDLFHAKRYSEVYLADSNPDFARLAEAYGIKGVRVERKEDLMKGVEAVLNADGPVVAEFKVYHEEGVFPMIPAGGAAEDMILEPPEEKEEVGA

SEQ ID NO: 27352 - protein, 600 aa, Thermus thermophilus HB27
MTEDTYSKAFDRALFARILRYVWPYRLQVVLALLFLLVVTLAAAATPLFFKWAIDLALVPTEPRPLAERFHLLLWISLGFLAVRAVHFAATYGETYLIQWVGQRVLFDLRSDLFAKLMRLHPGFYDRNPVGRLMTRVTSDVDAINQFITGGLVGVIADLFTLVGLLGFMLFLSPKLTLVVLLVAPVLLAVTTWVRLGMRSAYREMRLRLARVNAALQENLSGVETIQLFVKEREREEKFDRLNRDLFRAWVEIIRWFALFFPVVGFLGDFAVASLVYYGGGEVVRGAVSLGLLVAFVDYTRQLFQPLQDLSDKFNLFQGAMASAERIFGVLDTEEELKDPEDPTPIRGFRGEVEFRDVWLAYTPKGVEPTEKDWVLKGVSFRVRPGEKVALVGATGAGKTSVVSLIARFYDPQRGCVFLDGVDVRRYRQEELRRHVGIVLQEPFLFSGTVLDNLRLFDPSVPPERVEEVARFLGAHEFILRLPKGYQTVLGERGAGLSTGEKQLLALVRALLASPDILLILDEATASVDSETEKRLQEALYKAMEGRTSLIIAHRLSTIRHVDRILVFRKGRLVEEGSHEELLAKGGYYAALYRLQFQEA

SEQ ID NO: 27353 - protein, 202 aa, Thermus thermophilus HB27
MTQVRETVSFKAGDVILYPGVPGPRDRAYRVLEGLVRLEAVDEEGNALTLRLVRPGGFFGEEALFGQERIYFAEAATDVRLEPLPENPDPELLKDLAQHLSQGLAEAYRRIERLATQRLKNRMAAALLELSETPLAHEEEGKVVLKATHDELAAAVGSVRETVTKVIGELAREGYIRSGYGKIQLLDLKGLKELAESRGQGR

SEQ ID NO: 27354 - protein, 216 aa, Thermus thermophilus HB27
MKGSPLFHGLAPEEVDLALSYFQRRLYPQGKPIFYQGDLGQALYLVASGKVRLFRTHLGGQERTLALLGPGELFGEMSLLDEGERSASAVAVEDTELLALFREDYLALIRRLPLVAHNLAALLARRLREADLELDLLSFEEARNRVAYALLKLLRQGLGPLFQIRHHELAALAGTSRETVSRVLHALAAEGVVRLGPGTVEVREAALLEEIAFGLA

SEQ ID NO: 27355 - protein, 345 aa, Thermus thermophilus HB27
MEFGVPKERSGGEIPERRVPLTPQGVRELVASGHRVYVERGAGEGAGFPDEAYEEAGARLVGREEAFGRPQVVLKVARPTLEEVGLMRKNAVLMAFLHLAVAESPLVEAMAQKGLTAIGYELVGEEGRRPVLKAMSEIAGRMAPQLAGRLLEAPQGPGILLSGLVGIPPADVVVLGAGVLGRAAARAFLGAGASVHLLDRALPPLEEAAREAPGAITALVTQDRLERYVAFADVLVGAVAVPGERTPLLLTRGLLARMRPGSVLLDFSIDQGGVSETSRPGVYQEMGVTHFCLPNVPALVPRTASHALTATLLPYLLRIQEDPLALPGLRQGAYLLFGEKGGHLE

SEQ ID NO: 27356 - protein, 1492 aa, Thermus thermophilus HB27
MSWKDAYPDIPLGRDACGIIAMAEKSGKPSHRVVRRTLESLYRMAHRAGAIRGEGDGTGIQTDIPRELWALFLEQAGLDPGLAHNPRFFVGHFFVPKKEAGRLQEFEDLLRREGQRLGVRPVLFRRGEVVSEVLGPVGRRTEPLFLQVAGLSPDGDAPLWELGLRLEASFPVHVVSLSTHSVVYKVRGAAELLKRYYPELSRPEFKSRIALGHNRYSTNTLSTFEQVQPFGLIGHNGEINTIERLRREMDFLGIPRTGGSDSQDLNRMLEGLIYRYGLTLPEAMDLVFPPVLGEIKALPEDLQDLYMALRQRFGPLAQGPAAIVSRHGDEAVFATDAMGLRPLWQFETPYELVFSSERGVFSAEEFVSEPKPLAPGEKVYLRLTPEGAKVLPFDRHQRQVLERVAARTPVEGYRVHLTGPLRQAPPPLAGGSGVEVEEKPAPPPLGLERAFGWDRWDQAYLEALAKTGNEPIGSLGYDGPLAALNPEKPNLSEFFKETVAVVTNPAIDREREVEHFSTRTLLGRRPLPDGRGGGRVEELLLPIVLEEDQALAEAFGTLTLSEVRARFKTKTLVPQFTVEEGLLAGLKRLEEEAVKAVEEGAEVLILSDREAFQGGVWIDVGLAVAAVNRALMKRDAEGVALRRRTSLLVHSGGVRNLHDVAFLLGLGAEAVAPWLMEEKARALEGRKGLAGVLEALKKGLEKVISTMGIHELRGYGRIFSAIGLKPELAEYFGTRNFLGSEKAGYGFLELERTLLEREGFLRAEKVMPAKDFRFNPRIYKAAQEVASGKAPYAHFQEKVRALERENPVAARQLLEVRFPERSDVAPEEVDLSVGAHSLPFVISAMSFGSQGEASFRAYAEAAKRLNMLCINGEGGEIPDMLGKYTPWRGQQVASGRFGVHAYMLNSASVIEIKIGQGAKPGEGGHLPGKKVSPKVAAARNAVPGVDLISPSNNHDLYSIEDLAQLIEELKTVNPKALVSVKVPVIPGIGTIAVGIAKAGADVITLSGFEGGTGAARLHALKYAGLPVELGVRRVHRALVRAGLRDKVEIWADGGLKTAYDVLRMVLLGADRVGMATMAMVAIGCTICRGCQLDTCHVGITTQIETVEEAMAHGLKRFVPQDLDRAVEQLTRFFGAMGEALRELVAALGARSLQELRGRSDLLYQRDHLEELDLSYFFAPVEEPEWLKDTSAHVLRKPLNQLTRTITEVVMAAYAEGSKRLVFQEGPVDSTDRALGAHLAGEIARQRLYGKGFDAEVELRFDAGSVAGNGLAAFNVEGMKVVVEGGAQDGVAKSAFGGTVAVLKGKNPFGAYVDGSVGKSFAYGAIGGLLIVEGVADSRFCIRLSGADVILGGEPERPLRDDLGNLAARAQAKGFAFEYMTRGRALVLGDPGPWICSGMTGGRVYLRHWPEMGLTEEAMKRRLAKGAKVAVKPLDARGVEDVRELLSAYIRVLREAKREEKAKRLEKLLENPAEHFRMVEPVSQQVDQGVSTE

SEQ ID NO: 27357 - protein, 615 aa, Thermus thermophilus HB27
MAKAVGIDLGTTNSVIAVLEGGKPVVLENAEGERVTPSVVAFRDGETLVGRMAKRQAVLNPEGTIFEIKRFIGRRFEEVQEEAKRVPYKVVPGPDGGVRVEVKGKLYTPEEISAMILRKLVEDASKKLGEKITKAVITVPAYFNNAQREATANAGRIAGLEVLRIINEPTAAALAYGLDKKGNETVLVFDLGGGTFDVTVLEIGEGVFEVKATSGDTHLGGSDMDHAIVNWLAEEFKKEHGVDLKADRQALQRLIEAAEKAKIELSSTLETTISLPFIALDPASKTPLHLEKKLTRAKFEELIQPLLKRLRGPVEQALKDAGLTPAQIDEVILVGGATRVPAVQQVVRELLGKEPNRSVNPDEVVAMGAAIQAGVLMGEVRDVVLLDVTPLSLGVETKGGVMTVLIPRNTTIPTRKCEIFTTAEHNQTAVEIHVLQGERPMAQDNKSLGRFRLEGIPPMPAGVPQIEVCFDIDANGILHVTAKERSTGREASITIQNTTTLSEEEIQRIIEEAKRHAEEDRRRREHAELKNALDSARVQAERVLQERQGAPEARARLEAAIGKAKELVERDAPDPELKAATEELLKAVEEYEKGAQAASGKGPDDVIDADYKPAD

SEQ ID NO: 27358 - protein, 300 aa, Thermus thermophilus HB27
MDVSATMPPMERVAVVGVPMDLGANRRGVDMGPSALRYARLLEQLEDLGYTVEDLGDVPVSLARASRRRGRGLAYLEEIRAAALVLKERLAALPEGVFPIVLGGDHSLSMGSVAGAARGRRVGVVWVDAHADFNTPETSPSGNVHGMPLAVLSGLGHPRLTEVFRAVDPKDVVLVGVRSLDPGEKRLLKEAGVRVYTMHEVDRLGVARIAEEVLKHLQGLPLHVSLDADVLDPTLAPGVGTPVPGGLTYREAHLLMEILAESGRVQSLDLVEVNPILDERNRTAEMLVGLALSLLGKRIF

SEQ ID NO: 27359 - protein, 307 aa, Thermus thermophilus HB27
MEIRLFSGSAHPDLARRVAEALGVPLGKALVDRFPDGEVRVRLLESVRGEDVYLIQPTCPPVNDHLMELLLLADAARRSSAGRINAVIPYFGYARQDKQTEGREPISARLVAGLLERVGVERVIAIDLHAPQIQGFFDIPVDHLSAVRLFARYLREKGYVENAVVVSPDAGRAEEARRLAERLGLPLAMLAKRRLGPRETSVTYVIGDVEGKRPILVDDIVSTGGTIRRGVEALLQAGALPEVVVMATHAVLVGGAKENLAHPAVREVVFTDTIPLKDGGYTVLSTAELLAQAIRHVHTNQSVSALI

SEQ ID NO: 27360 - protein, 207 aa, Thermus thermophilus HB27
MLQGLSLEARQEALKVFRPLRLRRGAVLFAPGDPVDGVYLVRQGLVGLHRPGPGLEGGVLDVVGPGGVFGEEALGEEARRRAGAEALTYAELYFAPREGLAALRARFAEIEAFFLQALYGRLCSLEERLWEARHLSVAQRLARLLLRMGEDGVAPFSHQDLARMVGASRETVTKLLGEWALKGWVDLGYRRVEVLEPKALARLAEEL

SEQ ID NO: 27361 - protein, 310 aa, Thermus thermophilus HB27
MDRPLLIFSGQSNRPLAQAIAEALGLPLGKSTTLRFANDNLFVRYEESLREGDVFIVQSFVPPVQDHLMELLMMVDAAKGASAARVTAVIPYFSYARSDKKDAPRISITARLIADLLQTAGADRVLTMTLHSPQVHGFFKIPVDHLSAEPVIANYFATRVDLENAVVVAPDAGDLKRASALARRLGLPLAFIDKERVSDTEVRVRMLVGEVEGKTALIVDDEISTAGSLVEAVEALMQAGAKEVYAAATHGVYVGPALDRIAKSPVKEVAATDTCPPKEGPKLRTLTVAPLFAEAIWRIHRGESVSSLFT

SEQ ID NO: 27362 - protein, 416 aa, Thermus thermophilus HB27
MFQDVLVITVAAGRGGDGAVSFRREKFVPKGGPDGGDGGRGGSVYLRARGSVDSLSRLSKRTYKAEDGEHGRGSQQHGRGGEDLVIEVPRGTRVFDADTGELLADLTEEGQTVLVARGGAGGRGNMHFVTPTRQAPRFAEAGEEGEKRRLRLELMLIADVGLVGYPNAGKSSLLAAMTRAHPKIAPYPFTTLSPNLGVVEVSEEERFTLADIPGIIEGASEGKGLGLEFLRHIARTRVLLYVLDAADEPLKTLETLRKEVGAYDPALLRRPSLVALNKVDLLEEEAVKALADALAREGLAVLPVSALTGVGLPALKEALHALVRSTPPPEMPKPVPRKEVQAGVEVVPVAEGVYEVRAPEVERYLARIKGDLMEAAGYLQEVFRRQGVEAALRAKGVRAGDLVRIGGLEFEYIPEV

SEQ ID NO: 27363 - protein, 101 aa, Thermus thermophilus HB27
MFAIVKTGGKQYRVEPGLKLRVEKLDAEPGATVELPVLLLGGEKTVVGTPVVEGASVVAEVLGHGRGKKILVSKFKAKVQYRRKKGHRQPYTELLIKEIRG

SEQ ID NO: 27364 - protein, 250 aa, Thermus thermophilus HB27
MSQLEIRDLWASIDGETILKGVNLVVPKGEVHALMGPNGAGKSTLGKILAGDPEYTVERGEILLDGENILELSPDERARKGLFLAFQYPVEVPGVTIANFLRLALQAKLGREVGVAEFWTKVKKALELLDWDESYLSRYLNEGFSGGEKKRNEILQLLVLEPTYAVLDETDSGLDIDALKVVARGVNAMRGPNFGALVITHYQRILNYIQPDRVHVMMDGRVVATGGPELALELEAKGYEWLKEKVKEGA

SEQ ID NO: 27365 - protein, 68 aa, Thermus thermophilus HB27
MNKGIVKWFNAEKGYGFIQQEEGPDVFVHFSAIEADGFRTLSEGERVEFEVEPGRNGKGPQARRVRRL

SEQ ID NO: 27366 - protein, 400 aa, Thermus thermophilus HB27
MKIVLAYSGGLDTSIILKWLKETYGAEVIAFTADIGQGEEVEEAREKALRTGASKAIALDLKEEFVRDFVFPMMRAGAVYEGYYLLGTSIARPLIAKHLVRIAEEEGAEAIAHGATGKGNDQVRFELTAYALKPDIKVIAPWREWSFQGRKEMIAYAEAHGIPVPVTQEKPYSMDANLLHISYEGGVLEDPWAEPPKGMFRMTQDPEEAPDAPEYVEVEFFEGDPVAVNGERLSPAALLQRLNELGGRHGVGRVDIVENRFVGMKSRGVYETPGGTILYHARRAVESLTLDREVLHQRDMLSPKYAELVYYGFWYAPEREALQAYFDHVAKNVTGVARLKLYKGNVYVVGRKAPKSLYRQDLVSFDEAGGYDQKDAEGFIKIQALRLRVRALVEREGHGA

SEQ ID NO: 27367 - protein, 289 aa, Thermus thermophilus HB27
MEKVAFIGLGAMGYPMAGHLARRFPTLVWNRTFEKALRHQEEFGSEAVPLERVAEARVIFTCLPTTREVYEVAEALYPYLREGTYWVDATSGEPEASRRLAERLREKGVTYLDAPVSGGTSGAEAGTLTVMLGGPEEAVERVRPFLAYAKKVVHVGPVGAGHAVKAINNALLAVNLWAAGEGLLALVKQGVSAEKALEVINASSGRSNATENLIPQRVLTRAFPKTFALGLLVKDLGIAMGVLDGEKAPSPLLRLAREVYEMAKRELGPDADHVEALRLLERWGGVEIR

SEQ ID NO: 27368 - protein, 369 aa, Thermus thermophilus HB27
MVIGVPREIKTLENRVALTPGGVESLVRRGHTVLVERGAGEGSGLSDAEYARAGAELVGREEAWGAEMVVKVKEPLPEEYGFLREGLILFTYLHLAADRGLTEAMLRSGVTGIAYETVQLPDGTLPLLVPMSEVAGRMAPQVGAQFLEKPKGGRGVLLGGVPGVAPASVVILGGGTVGTNAAKIALGMGAQVTILDVNHKRLQYLDDVFGGRVVTLTATEANIKKSVQHADLLIGAVLVPGAKAPKLVTRDMLSLMKEGAVIVDVAVDQGGCVETIRPTTHAEPTYVVDGVVHYGVANMPGAVPRTSTFALTNQTLPYVLKLAEKGLDALLEDAALLKGLNTHKGRLTHPGVAEAFGLPYTPPEEALRG

SEQ ID NO: 27369 - protein, 375 aa, Thermus thermophilus HB27
MVTVAVPKERAPGERRVALVPEVVARLVKGGARVRVERGAGEGAYHPDEAYQEAGAEVVERGELLKGAHLLFTVQPPPEDLIQALEPGAIVVGFVQPHKNLELVRALQAKKATVIAMELIPRITRAQSMDALSSQATVAGYLAAIHAARLSPRFFPMLTTAAGTIRPAKVMVMGVGVAGLMAIATAKRLGAQVFAYDVRKAALEQALSLGAKPIELPISAEGEGGYARELTEEEKRIQHEALRDHVAGMDVLITTAQVPGRRAPILLTEDMVERLKPGTVVVDLAAESGGNCVLTKPGEVVEVRGVRVYGPLNLPSELSVHASEMYAKNLYNLSSLLIEKGAFAPKWEDEIVRAALLMKEGEVLHGPTKALLGGA

SEQ ID NO: 27370 - protein, 85 aa, Thermus thermophilus HB27
MRALGPGERRSGMQKGRVKWFNAEKGYGFIEREGDTDVFVHYTAINAKGFRTLNEGDIVTFDVEPGRNGKGPQAVNVTVVEPARR

SEQ ID NO: 27371 - protein, 301 aa, Thermus thermophilus HB27
MAEKTYSGFVAIVGKPNVGKSTLLNNLLGVKVAPISPRPQTTRKRLRGILTEGRRQIVFVDTPGLHKPMDALGEFMDQEVYEALADVNAVVWVVDLRHPPTPEDELVARALKPLVGKVPILLVGNKLDAAKYPEEAMKAYHELLPEAEPRMLSALDERQVAELKADLLALMPEGPFFYPEDYAKSDQTFGEWVAEILREEAMKRLWHEVPYAVATKVEEVAERENGVLYIKAILYVERPSQKAIVIGEGGRKIKEIGQATRKQLEALLGKKVYLDLEVKVYPDWRKDPEALRELGYRSSVG

SEQ ID NO: 27372 - protein, 517 aa, Thermus thermophilus HB27
MGPERQSMEFKDFPLKPEILEALHGRGLTTPTPIQAAALPLALEGKDLIGQARTGTGKTLAFALPIAERLAPSQERGRKPRALVLTPTRELALQVASELTAVAPHLKVVAVYGGTGYGKQKEALLRGADAVVATPGRALDYLRQGVLDLSRVEVAVLDEADEMLSMGFEEEVEALLSATPPSRQTLLFSATLPSWAKRLAERYMKNPVLINVIKDEPVTYEEEAVPAPVRGRLEVLSDLLYVASPDRAMVFTRTKAETEEIAQGLLRLGHPAQALHGDLSQGERERVLGAFRQGEVRVLVATDVAARGLDIPQVDLVVHYRLPDRAEAYQHRSGRTGRAGRGGRVVLLYGPRERRDVEALERAVGRRFKRVNPPTPEEVLEAKWRHLLARLARVPEKDYRLYQDFAGRLFAEGRVEVVAALLALLLGGAPAERSLLTGEEGWRTYKATGPRLSLPRLVALLKGQGLEVGKVAEAEGGFYVDLRPEARPEVAGLRLEPARRVEGLLEIPSRTRRPARA

SEQ ID NO: 27373 - protein, 446 aa, Thermus thermophilus HB27
MRKGTLNGIAALGLSGLALAEGVDGADTAWMLVSTALVLLMTPALAFFYGGLVRSKNALNTMMMSFVALAFVGVGWALLGYTLAFGEGGPLLGGLGHLFLRGVGLEAQGTIPHVLFLAFQGTFAIITAALVSGALVERMRFPAYLAFLTLWGLFVYAPIAHWVWGGGFLGALGALDFAGGTVVHINAGVAALVGALVLGARKDYGRQAILPHNVPFTLLGAALLWFGWFGFNGGSALAANASAALAFANTMLAPAATLLVWTLLDLLRTGKATAVGAATAIVVGLVAVTPAAGFVSPLSALLIGALAAFPSYYVLLWRARTRLDDSLDVFAGHGVGGITGALLTGIFAEKAWNGVADGLLFGNPAQLGIQAAAVLAAVVYSALGTFALLKLVGLLTPLRAGPKEEGVGLDVTQHGEEAYTSGEGAILVLSEKAPAVPSLRPQGGEA

SEQ ID NO: 27374 - protein, 385 aa, Thermus thermophilus HB27
MRGLSRRVQAMKPSATVAVNAKALELRRQGVDLVALTAGEPDFDTPEHVKEAARRALAQGKTKYAPPAGIPELREALAEKFRRENGLSVTPEETIVTVGGKQALFNLFQAILDPGDEVIVLSPYWVSYPEMVRFAGGVVVEVETLPEEGFVPDPERVRRAITPRTKALVVNSPNNPTGAVYPKEVLEALAKLAVEHDFYLVSDEIYEHLLYEGEHFSPGRVAPEHTLTVNGAAKAFAMTGWRIGYACGPKEVIKAMASVSSQSTTSPDTIAQWATLEALTNQEASRAFVEMAREAYRRRRDLLLEGLTALGLKAVRPSGAFYVLMDTSPIAPDEVRAAERLLEAGVAVVPGTDFAAFGHVRLSYATSEENLRKALERFARVLERA

SEQ ID NO: 27375 - protein, 393 aa, Magnetospirillum magnetotacticum MS-1
MELKRQHLIDPVVCIRCNTCEEACPVDAITHDGTNYVVSFDKCTGCRTCVSPCPTGAIDNWLLVDQPWSIDDQFGWDELPLGQTGPGPAEPAPLPPGEVSDLLAAATSTTGPSVPPPASASKPYFNLYSRDKPVTARVAGNMRITGEGAESDIHHVVLDFSHNAFPFLEGQSIGIVPPGVDAKGRAHNIRLYSIASPREGERSGCNNLALTVKRVAGGVGSNYVCDLKKGDEVSVAGPFGQAFLMPDDPHANIIMICTGTGSAPFRAFTERRRRNAADAPGKLMLFFGARTPEELPYFGPLMKLPKSLIDVNLAFSRVADQPKQYVQDKLRERADDLAALLASPQTHIFICGLKGMEQGSDEAFADICRLHGLDWAGLRPKMREEGRYHVETY

SEQ ID NO: 27376 - protein, 621 aa, Magnetospirillum magnetotacticum MS-1
MCGIAGLSAARPEILDEMVRRLAHRGPDGHGTFVCERTGFGLAHARLAVIDLTEGGRQPMHSPCGRWTIAFNGEIYNHAELRLELEGRGHTFRSSSDTEVLLALLAEKGEAALERLVGMFALALLDRADGSVLLARDRVGIKPLVWAGLPGGGLAFASEIKALKAVPGVDLSLDREALSQFLACLYVPAPYSIHAGIRKLAPGHLLRWKPGAAPEIACWWRPAFTAERALSVDDATEELMPALRDAVRSCMVADVPVGCFLSGGIDSSVIAALMAEARREQGASAPASFTMTFDEAAYDERVAARAVSDHVGTLHTELPASARLVDGLERMIAAFGEPFGNPTALLIGDLSAKARQHVTVALVGDGGDEVFGGYPRYQGGLLAAKWRKIPAFLRNGLIEPIVALLPESTSGRHTWRRIREFVAGAGLSDAEMYASWVEYFDPAQRRALLGGGTPPRPVADIYRATGRVHPLDAMQETDLLSFLPGNLMAYGDAMSMMHALELRLPLLDHRLIERVQAISAATRFQAGKKTLLKAAARRLLPAEIVDRPKLGFNPPMGLWLKNELAPMVAERLIPARMADLGLEWKGVEALLAEHRAGRRDLSLPVWALLVLERWQGLEASA

SEQ ID NO: 27377 - protein, 397 aa, Magnetospirillum magnetotacticum MS-1
MDSRFRLRSAPLKPANTILSSFGTTIFETMSRLAQAHGAVNLGQGFPEGLEPADVVAKASEALVSGPNQYPSMMGTPDLRQAIARHEARFYGVELDPMAEVMVTSGATEALAACLFGLIEPGDEVVLIEPLYDSYLPIIRRAGGIAKLVRVEPPHWELPRQALAEAFSPKTKLMILNTPMNPSGKVWTADELAFLAGLLERFDAYCVCDEVYEHLVYDGRRHVPLMTLPGLRPRCLKVGSAGKIFSLTGWKVGWVIAAPEVLVPVAKAHQYLTFTTPPNLQAAVAWGLGKEDSYYDGLAAMLAERRDRLATGLRGVGFEVMEAGGSYFLTADFRPLGFDGDDAAFCRHITEKAGVTAIPVSAFYQGGDVGHFARFCFAKTESAIDEAITRLRRYFRG

SEQ ID NO: 27378 - protein, 294 aa, Magnetospirillum magnetotacticum MS-1
MLLALAVLCAAPAAAEPTLDKVKRTGSIVLGVRETSYPLSYLDQTGQPIGYHVDICRRIAEAVKTQLGLSSLEVRTEVVTSKTRIPKMVDGAIDLECGSTTNNAARQTQVAFAPTTYVASVRIAVKKASRITKLAQLDGKAVVTTAGSTSVQLLKARVQGRDINVIEVFGNDHAESFKMLESDQAAAFVMDDNLLAGLIASSSAPKDYEILAQTLNTEPIAIMLRKNDPAFKALVDQTVKAMMTSGEVGRLYAKWFLSPIPPMNAALAFPMSPVLAGLLKYPGDEPAEAFRPEE

SEQ ID NO: 27379 - protein, 400 aa, Magnetospirillum magnetotacticum MS-1
MPFIADRLSAIKPSPTIAVTQKAAELKAAGRDVIGLGAGEPDFDTPDNIKTAAKVAIDKGLTKYGPPAGTVDLRNAIAAKFKRENGLDYTADQVTVGVGGKGVIFNAFMATINPGDEVIVPAPYWVSYPDIALMFGGKPVFVPCPEAAGFKLQPADLEAAITPKTKWLVLNSPSNPTGAAYSWDEMKALTDVLVKHPHVWIMSDDMYEHLVYDDFKFCTPAQVEPKLYDRTLTMNGVSKAYAMTGWRVGYAAGPVAIIKAINMIQSQSVTHTSSISQAASVEALNGTQDFIPKNAAVFKRRRDLIVGLLNQCPGITCRTPEGAFYVYPSCAGVIGKKTPDGKVINSDTDFVGALLEAEGVAVVQGAAFGLEPYFRISYATSDAALTKAAERIKRFCESLK

SEQ ID NO: 27380 - protein, 183 aa, Magnetospirillum magnetotacticum MS-1
MVMGGAIRPGDPIDDDTLTPAAVLVPLVERPEGLTVMLTKRTAHLAHHPGQISFPGGRLEPEDKGDFTTCALRETEEETGLDRHLVRLLGRLDNYATGTGFVITPLVGVIDPPFTLAPDSFEVAEVFEVPLSFVLDQANHQLQSREIKGFQRPFWALTWQDRLIWGATAGILVNLSEVLAPRE

SEQ ID NO: 27381 - protein, 196 aa, Magnetospirillum magnetotacticum MS-1
MSGDLDQATMDRLFAKARTYSKFTKAPVSDDLLRQAWDLARMGPTSVNCQPMRVVFVRSSAAKERLKPALAPGNLDKTMAAPVTAIIAHDMEFYEQLPKLFPHADARAWFVGNEAMIQSTAFRNGTLQGAYFILALRAIGLDCGPMSGFDNAKLDEAFFKGTTLRSNFLVNIGHGDAAGLYPRGPRLDFDEACRVE

SEQ ID NO: 27382 - protein, 373 aa, Magnetospirillum magnetotacticum MS-1
MRIGVPKEIKSHEYRVGLTPGSARELVHHGHQVLVETGAGMGIGCSDAAYRAAGAEIATSAAEVFAFADLVVKVKEPQPVEFPLLRAGQILFTYLHLAPDPEQTRALVDSGVSAIAYETVTDANGRLPLLAPMSEVAGRMSIQVGAHCLEKEQGGSGVLLGGVPGVAPAKVVVLGGGVVGSNATRMAVGLGARVVVLDRSLTRLAQIDELLLNTVETAYATMDNIEHHVLEADLLIGAVLVPGASAPRLVSRELVGAMRPGSVVVDVAIDQGGCIATARPTTHAAPTYLEQGVVHYCVTNMPGAVARTSAFALNNATLPFVLALADKGLVQALSIDPHFRAGLNIHHGSVTHAAVARDLGYAHVAPETALSSP

SEQ ID NO: 27383 - protein, 401 aa, Magnetospirillum magnetotacticum MS-1
MKFGGTSVADIERIKNVANRVKREFDAGNEVAVVVSAMSGATNQLVAWCNQVAPLHDAREYDAVVATGEQVTIGLLAIALQELGVNARSWCGWQLPIRTDGVHGKARIMSIETDEMIARMGKGEVAVVAGFQGLGPDGRISTLGRGGSDTSAVALAAALHADRCDIYTDVDGVYTTDPRIVSVARKLDKITYEEMLELASVGAKVLQTRSVEMAMKHRVRVQVLSSFEDKPGTLVCDEDEIVEKELVSGIAYSRDEAKITLVRVADRPGVAASIFGPLADAAVNVDMIVQNVSEDGKSTDLTFTVGNADLERAKKVLEDAKANLGFEKLLADPNVVKVSVIGVGMRSHAGIAQKMFQTLASEGINIQVISTSEIKISVLIEEKYTELALRALHTAYGLDAA

SEQ ID NO: 27384 - protein, 69 aa, Magnetospirillum magnetotacticum MS-1
MPNGTVKWFNATKGYGFIQPEDGSADIFVHISAVERAGIGNLKEGQKLSFETERDPRKGKSSAVNLKAL

SEQ ID NO: 27385 - protein, 639 aa, Magnetospirillum magnetotacticum MS-1
MNFSKNLALWVIIAVLLVMLFNLFQASSPPRGPGQTSYSEFLSDVDRGSIADVTIQGSVVNGHFTDGRPFTTYMPQDVNVVDKLRAHNVRITAVPPSDDAPTLWSVLVSWFPMLLLIGVWVFFMRQMQGGGGKAMGFGKSRARLLTEKTGRVTFEDVAGIDEAKQELEEIVEFLKDPQKFQRLGGKIPKGCLLVGPPGTGKTLLARAIAGEANVPFFTISGSDFVEMFVGVGASRVRDMFEQGKKNAPCIIFIDEIDAVGRHRGAGLGGGNDEREQTLNQLLVEMDGFESNEGVILIAATNRPDVLDPALLRPGRFDRQVTVPNPDILGREKIIKVHMRKVPLSPDVDARIIARGTPGFSGADLANLVNEAALLAARAGKRVVTMAEFEAAKDKVMMGAERRSMVMSEDEKKLTAYHEAGHALVMMHVPGHEPLHKVTIIPRGRALGLTMSLPERDRYSLSLKQIKAMIAAFFGGRVAEEMIFGLDAVTTGASNDIQRATDLSRKLVTEFGFSEKLGPLRYNDNQEEIFLGHSVTQHKNVSEATASLIDSEVRRFVEEGENTARDILAKYRAELEIIAKGLLELETLSRDDIDALIRGETITRGDSGDYRPKDPPRRSSVPSSGPGGRPGYDPEPQPGA

SEQ ID NO: 27386 - protein, 526 aa, Magnetospirillum magnetotacticum MS-1
MPKVLISDKLSPAAVQIFKDRGIETDVKTGLAPDELKAIIGQYDGLAIRSNTKVTTEILAAATNLKVVGRAGIGVDNVDVPAATARGIVVMNTPFGNSITTAEHAIAMMFALAREIPEANASTHAGKWEKNRFMGVELTGKVLGIVGCGNIGAIVADRAQGLRMRVIAYDPFLSHERAKELNVEKMELEELFPRADFITLHTPLTDATRNIIDSKAMAKMKKGVRIINCARGGLVVEEDLLAALESGQVAGAALDVFKTEPAKENPLFGNSKVVCTPHLGASTSEAQENVALQVAEQMADYLLTGAVTNALNIPSVSAEDAPKLKPYMTLANQLGSFAGQLTETGIREVKIEYMGHVASLNTKPLTAVVLEGLLKPMNEAVNMVNAPVVAKERNIKVSEVKTETEGDYHTLVRLTVTTDKRERSVAGTLFGGDKARVVEIKGISIEAELGSHMLYVTNQDKPGFIGALGTLLGANGVNIATFHLGRSEAGGDAILLTQVDQPVSNELLEKVRALPQVVQAKFLTFA

SEQ ID NO: 27387 - protein, 394 aa, Magnetospirillum magnetotacticum MS-1
MAKREIVICNAVRTAIGTFGGSLKTIPASDLGGAAIKAVLERSGIDGRDIGTVVMGNVVQAGGKMNPARQAGILGGLPVEVPAMTVNRVCGSGAQAIASAAQEVMLGFVDAAIAGGMENMDLAPYLLTGTRWGQRLGDGQIFDSVLRDGLNDAFSGQHSGWHTEDLVKEMNISREDQDRWAERSQRSFSAAQAAGLFSAEIAPVEIQGRKGPTVFDKDEHNRPDTRFESLAKLKPAFRPDGTITAGSAPGLNSGAAAMIVADRAWAERHGLVPMARLLSYGIGAVEPGMFGLGPVPAVRQALERARWSCADIERIEINEAFAAIAIAVMRQLGLSEDRVNVEGGAIAHGHPIGASGAVLTTRLIHSMRRDGLRRGVVTLCIGGGQGISLALETC

SEQ ID NO: 27388 - protein, 241 aa, Magnetospirillum magnetotacticum MS-1
MDVTNPHILVVDDDREIRDLLTKFLMRHNLRVSAAKDGVEMMKMLDERRIDLVVLDLMLPGEDGLSLCRRMRESRSGVPIVMLTAMGEDTDRIVGLEMGADDYLPKPFNPRELLARIKAVLRRTQASEDAPAKPGGTRLRFLGWTLDLSSRDLLSPDGVMVALSAGEFGLLQVFVEHPRRVLSRDQLLDFARGRSAVPFDRSIDIQVSRLRRRIGDDARDPQIIKTVRGGGYLFTPEVEHL

SEQ ID NO: 27389 - protein, 303 aa, Magnetospirillum magnetotacticum MS-1
MNEVPETDQRCGFVAVVGAPNAGKSTLVNALVGTKVSIVSPKVQTTRFRVMGIAMVGEAQVVLVDTPGIFAPKKRLERAMVAAAWGGTNDADHICLLIDAAKGYDDESRAIVDKLKETKRQAILVLNKVDLVKRDKLLGLTAQLDAEGIFTDVFMISALKGDGIDDLLAHLGKLVSPGPWMFPEDQVSDLPQRLLAAEITREKAFIALYQELPYSLHVETEKWEEKEDGSARIDQVIYVERESQKPIVLGKAGRQIKSIGASARQELEELLERRVHLFIHIKVREDWSEKRGHYSEIGLDFDS

SEQ ID NO: 27390 - protein, 284 aa, Magnetospirillum magnetotacticum MS-1
MVEKRILDLDLRIRIGQDFDLCDPEDDPRFNEYWRLYHSIMERHGVSPEYARTVVRTRNTVIGTLMLKRKEADAMICGTIGRYDKHLSHILNVIGTRDGVKVPAAMNLLIMPAGTFFICDTYVTPEPTPEQVCDMTLLASEEVRRFGIEPKVAFLSHANFGNRSSASAARQREALALLREKAPYLEAEGEMHGDAALSEEIRTRIFPNSKLKGAANLLVMPTLDAANISFNLLKVAGDALSVGPILMGIAQPAHILTPSATVRNIVNITALAAVDAQMHAGKGR

SEQ ID NO: 27391 - protein, 498 aa, Magnetospirillum magnetotacticum MS-1
MCGIAATIGLSDATAFTSLFGAIGHRGPDESGIRESGDIRIGMHRLAIVGRMGDSVPLIGADGLVLAFNGEIYNHQALRADFPDYPFAGQSDAEVLFPLLKRHGLGGLDRLRGMFAFVLTDMESGEFLAVRDPFGIKPLYYAETGGGFAFASEMKAFAAMGITPRFLPPGHLLTRHGLRRWYRVPGRFRLSRRPNLRALLERAVASHLPPEGPCGVFLSGGLDSSLVAALAARSRPDMVAYSVVLPGSPDEEPAALMAAHLGIRHKVLRATADDIRAALPEVIGALESFNPIMVRNAVPLYLLSKMAAKDCKVVLGGDGADELFAGYDYLSRVPRRFWPQAMDYGFSNLHRTELQRVDRMTMAHGLELRVPFLDREVAEAAVNLPLSAKFGIKDGTPMPKLALREAAEGLLPPSIQWRRKLPLADGSGFGGLDLGAGRDKADPVPGWDVGDEDAVAFFPLWRVRFPLARPDSAIWRDCGRYHDFEECHGRPLLELFRR

SEQ ID NO: 27392 - protein, 587 aa, Magnetospirillum magnetotacticum MS-1
MEGAVALGMRRLSVIDLAGGNQPIHNENGSISVVFNGEIYNFRELRRELEEEGHIFSSHTDTEVLVHLYESHGRGMLDRLNGMFAFCLLDRRAGRLFLARDRVGKKPLYYAHGDGAFAFASEIKSLLCHPAVRREADPAAAALYFTHGYVPAPFTPFMGIRKLPAGHWLELDLASGEIQVGRYWDLDYSQVDEDLCEEEAVAGLESALLAAVERRLISDVPLGVFLSGGVDSSLVVAMMARFREGRDIHAFSIGFHEKAFDESGYAESVARAWGVDHHVTRFSDAEMFSVIDEILPRMDEPLSDPSLIPTYLLSKVTQDSGIVVALSGDGADEMFGGYPKYYIHRYAAWLDRLPGILGRDVPAWLFSQVPLKAENNIFNYKVERFVSGLRLAPRHRNQFWVAPFMPDELTRLLPEQEVPRAVWEVTDQYDSRFNGRGVVDRMMYFDAKMMLQDMYLAKVDRASMAVSLEVRSPFLDLEVMDAAVHLPWQLKVRGRETKYLLKKLASRYLPHDVVYRFKRGFGLPLAVWMRTLAPRISETLTQGDCGGIDAAYVQSLLREHLDGTRDHAVKLWAVYAYLTWLRNWGGS

SEQ ID NO: 27393 - protein, 415 aa, Magnetospirillum magnetotacticum MS-1
MAGKTIRTLVVDALLGGLVAAAMALPMLGVRLEDGATGLSLSGRLDWVVWAAGLVALARLLMGLLRLALAGRGPHLPAPPRAAMVYVGWAMVAFALVLPFLPFSGRNLVDKATLVLIYVMLGWGLNIVVGLAGLLDLGFVAFYAVGAYSYALLSQTFGLSFWVCLPLAGLLAASFGLVLGFPVLRLRGDYIAIVTMGLGEIIRVILQNWQDVTGGPNGISGIERPSFFGLSFKMVPPEGSRGFAEFFGLEYSADHRVTFLYFLILALALLTNVITLRIRRLPVGRAWEALREDEIACRSLGINPTLVKLSAFATGAMFAGFAGSFFATRQGFISPESFTFIESAVILAIVVLGGMGSQIGIVLAALLLVGLPEWFRELQQFRMLAFGGAMVLIMLWKPAGLLSTREPTIRLGEAK

SEQ ID NO: 27394 - protein, 397 aa, Magnetospirillum magnetotacticum MS-1
MREGILVINAGSSSIKFSLYISSGDEKPLLSCKGQVEGINVAPHFIAKAPHGGVLNEQRWPDQPNMSHEALFKYMIDWIEAQLGDAELKAAGHRVVHGGSQYSQPLLVTDELMDELDKLVPLAPLHQPHNLAPIRALTKVHPNLTQVACFDTAFHRSNPWTAQSFALPRKITGEGVKRYGFHGLSYEYIARQLHQLSPAAARGKVVVCHLGSGASMCAIEGGKSVASTMGFTALDGLPMGTRTGTLDAGVVLYLLQQKGMTPKEIEDLLYKQSGLLGVSGVSNDMRILLESSEPHAAEAVELFVYRISRELGSLAAAMGGVDALVFTAGIGERSHQIRERVCAHAEWLGVEMDQEANQRDSLLISAVESPVSVWVIPTDEEMMIAKHTREVLKSLRD

SEQ ID NO: 27395 - protein, 542 aa, Magnetospirillum magnetotacticum MS-1
MAALVVFASLPALAEDLAGTLKKVGDSGTLTLGIRESSYPLSYLDDGQKPIGYHIDICTRLAEAVKTRLALPALKVETLPVTSQNRIPLVQNGTVDLECGSTTNNEARARQVAFAPTTFVTKVRMAVKKSSGITSIAQLAGKPVAITTGTTSVQLVRAHKKGQNVAFKEIYGKDHADSFLLLETDRAVAFVMDDNLLAGLIATSKAPGDYAIVGEVLSVEPIAIMLRRDDPQFKALVDDTVKAMMASGEVERIYAKWFQSPIPPRGINMAFPMSGQLKSLIKSPADIPAEAFVRKETSGYRWNWGIYFEPVPSGTETYLSWLLWALVWTLAISLSAWALALVLGVVAGALRTVPDRRVAGLATAYVELFRNIPLLVQMFLWFFVVPELLPSSWALWVKQEMPAKEFVIAFLCLGLFTSSRVAEQVRAGIESRPRGQRMAALALGLTETQVFRHVTLPVALRVVIPPLTSEFMNVFKNSSVAFAIGMAELTFVARQMQEESEQGIETLAAVTLLYFLCAFLANRGMALMERRTRIPGLLGEAR

SEQ ID NO: 27396 - protein, 473 aa, Magnetospirillum magnetotacticum MS-1
  misc_feature (1)..(1): Xaa can be any naturally occurring amino acid
  misc_feature (4)..(5): Xaa can be any naturally occurring amino acid
  misc_feature (8)..(9): Xaa can be any naturally occurring amino acid
  misc_feature (11)..(13): Xaa can be any naturally occurring amino acid
  misc_feature (15)..(17): Xaa can be any naturally occurring amino acid
  misc_feature (20)..(21): Xaa can be any naturally occurring amino acid
  unsure (1)..(473): unsure at all Xaa locations
XLGXXSLXXGXXXAXXXGLXXPGFIYTISFFVGWPIILFLLAERLRNLGRYTFADIASYRLDQSKVRTFAAMGSLTVVCFYLIVQMVGAGQLIKLLFGLDYAVAVIIVGVLMVVYVTFGGMIATTWVQIIKACLLLGGGVLLCVLALSKFGFSLETLAAKAVSSHKAGVKIMGPGTLLADPVSAVSLSLGLVFGTAALPHILMRFFTVPNAKEARKSVFVASGFIGFFFLVVCILGLAAVSIVGTDPQFFEGGKVGGKLLGGGNMPVMHLAKALGGDIFLGFLSAVAFATILAVVSGLALAGASAIAHDIYARVIRKGHATEAEEMRVSKLASLVLGVIAVILGIMFEKQNVAFLVGLTFGIAASANFPVLFLSMYWKGLTTKGALWGGIAGLVSAVACVVLSKAVWVVVLNNPAPIFPYEHPALFSMTLAFAVTILVSKLDKSATAEAEKALFEDQYVRAQTGIGAASASNH

SEQ ID NO: 27397 - protein, 167 aa, Magnetospirillum magnetotacticum MS-1
MAPSSFDRQMVSQANVSATVKWFNASKGFGFVAPSDGSPDAFLHISALERAGLTQVAEGATLVVDLGAGQRGPQVVMVHEVDSTTATPRAPRREERGPTETVEGVVKFFSAEKGFGFVACDEGGKDVFVHVKALERSGIKTLESGQRVRVTTTLGLKGPQADTVAII

SEQ ID NO: 27398 - protein, 512 aa, Magnetospirillum magnetotacticum MS-1
MASVPDVVEKLIKLGFSVVVETGAGALANFDDESYVAAGASIAKSAADLWAASGLVFKVRPPTLDEVALIKEGTTLIGFIWPAQNPDLMQALAARKITVLAMDCVPRQLSRAQKMDALSSMANIAGYRAVVEAANQFGRFFTGQITAAGKVPPAKVFIAGAGVAGLAAIGTAVSLGAIVRANDTRAEVADQVKSMGAEFVRVDYEEEGSGGGGYAKVMSEGFQAAQREMYAQQAREVDIIITTALIPGKPAPRLITAEMVQSMRAGSVIVDMAAEQGGNCELTVPGEVVVRHGVTIVGYTDLPSRLSKQASTLYATNLQRLTEELCKTKDGIIDVNMGDDAIRGLTVVKDGEITWPPPPLVLPAPPAPKAAAAAPVAAKKSGHGHGAGEPMSPKSLAITFGIGALAFWFVGANAPEAFLGHFTVFVLACFVGYMVVWNVTPALHTPLMSVTNAISSIIVIGALVQISPPLGEGISRPGFWIGLLAVISIILTSINMFGGFAVTKRMLAMFRK

SEQ ID NO: 27399 - protein, 91 aa, Magnetospirillum magnetotacticum MS-1
MIGILMQVAMSVTCQITIGDFFMPNGSVKWFNSTKGYGFIAPDNGGADVFVHISAVERAGLSGLNDGQKVSFDEERDPKKGKTSAVNLKVF

SEQ ID NO: 27400 - protein, 223 aa, Magnetospirillum magnetotacticum MS-1
MLANTPLFASVQPELLDELAARAKMVKIDARETLFSKGDPGDRLYLLAKGLIRIGVLSADGREVTYGMIKPGQLFGEIAVLDGKERSADATAMEATELIALERKDVHTFLHKHPAQALHLIEVLCDRIRKADNQLEDMVFLSLPSRLAKHLLMLDQTMGTKSKAGGPSAIKLSQQEIADHLGISRESVNKVLSKWEQAGIVTLGRGQITLNKVNALEGLTSLD

SEQ ID NO: 27401 - protein, 415 aa, Magnetospirillum magnetotacticum MS-1
MFILLGAVMVLAMHSGFAFLEVGTVRKKNQVNALVKIISDFAVSTIAYFFVGYGVAYGTNFLVGADVLIGKTGNAFAASGYDLVKFFFLATFAAAIPAIVSGGIAERAKFTTQLMATAILVGLVYPLFEGMVWGTRFGFQELMKGWFGAAFHDFAGSVVVHAVGGWIGLGAVLMLGTRLGRYRKDGRLVAFPPSNIPFLALGAWILSVGWFGFNVMSAQVIADISGLVAMNSLMAMVGGILTSLVVGRNDPGFIHNGALAGLVAVCAGSDVMHPIGALVTGGIAGALFVWLFNLCQIKWKIDDVLGVWALHGMCGFLGGVACGVFGQEALGGLGGVSFGGQIAGTVIGAAFGLAGGLAVYGGLKAAFGIRLSDEEEFAGADLSIHQIGAYPEDATTVHDDGLAMSVHSANKRKAG

SEQ ID NO: 27402 - protein, 217 aa, Magnetospirillum magnetotacticum MS-1
MREVLGHRCPFPTLATKIAVNKGRHLYHQGDLVEGAYSLATGLVALERVDENGELVILKILHRGAFFPCADLLGSGTHESAGRALTDVTGCFVPAERLNAALHEDPSMGLALLKLSSAEIRENEDAIFRLCSTDLPDRVLSTLNSLANESGERASNGDLSLTLPISWRDLAAMVGTGPEVISRLLRRLAGSGRLSFRGRHVTLHAANSRQGTPPSYS

SEQ ID NO: 27403 - protein, 698 aa, Magnetospirillum magnetotacticum MS-1
MDFEKFTERCKGFIQNAQTLALRSGHQRLTPEHLAQVLLADKEGLAANLIRAAGGDPIRALKAVETLLDKLPKVEGPGAGGVHLSPELARLLDQAVQLADKAGDSFVTAERLLLALTLATGTPSAKALAEAGVTPQGLNAAIEDVRKGRKANSASAEDSYDALKKYARDLTQAARDGKLDPVIGRDEEIRRTIQVLSRRTKNNPVLIGEPGVGKTAIVEGLASRIINGDVPETLKNKRLMVLDLGALVAGAKFRGEFEERLKAVLTEVTAANGEVVLFIDEMHTLIGAGAAEGSMDASNLLKPALARGELHCIGATTLNEYRKHVEKDAALARRFQPVFVTEPGVEDTVSILRGLKEKYELHHGVRIADGALVSAATLSNRYITDRFLPDKAIDLVDEAASRLRMQIDSKPEALDELDRRIVQLKIEREALKKESDAGSRDRLGKIEVELTQLERESFDMSERWRAEKSQLADSTKVKEQLEEARIELANAERAANWGRAGELKFGVIPELEKRIEGGDGTGQRMLTESVTEEHIASVVSRWTGIPVEKMLQGERDKLLGMESRLKTRVVGQSEALVAVSNAVRRARAGLQDPNRPIGSFLFLGPTGVGKTELTKALAEFMFDDETAMVRMDMSEYMEKHSVARLIGAPPGYVGYEEGGALTEAVRRRPYQVILFDEVEKAHPDVFNVLLQVLDDGRL

SEQ ID NO: 27404 - protein, 242 aa, Magnetospirillum magnetotacticum MS-1
MLANNETGIVQPVAEAARVIHAHGAWLHCDAAQAVGRIPVSLSELGADILTISGHKMGGPAGAGALILAESGRTLAPILLGGGQERRRRAGTENVAGIVGLGMAAQLAGDDLAGIDTTSGVRALRDRLEQDALRLVPDATVIGGGMPRLPNTSCLVLPGVEGRTQVMALDLAGVAVSAGAACSSGKVAPSHVLAAMGLEERIKGSAIRVSLGWSSRMEDVDAFLAAWAGLARHKGLKVSEAA

SEQ ID NO: 27405 - protein, 263 aa, Magnetospirillum magnetotacticum MS-1
MGRGRDFRGPQKRGFDDGGAEPRWPDELPPGGGDRFGGGGNRFGGGGGGGFDRGPARAPVAPSGPERDATVKWFNKEKGFGFVELGDGSGDAFLHIRAVEAAGHDDLLPGTRLTVQTAQGQKGPQVTSVTSVDTSTAEAAPPRREAGPRFGGGDRFGGGDRFGGGDRFGGGGDRFGGGGRDRFGGGGRVASGPSVEMTGTVKWYDPAKGFGFVSVNDGGKDVFVHRSALSRAGLDSLAEGQQVTLNVVDGQKGREAQSINVDY

SEQ ID NO: 27406 - protein, 323 aa, Magnetospirillum magnetotacticum MS-1
MPPDETPEILLIRQTRPDVAGRLSERFRLHRLEEAPDRDAFLGAAGPRIRGLAVGAMCPIDARLFDRLPRLEIVASFGVGYDSIDVAEAHRRGIVVTNTPDVLSDEVADLALGLLLATIRRIPQADRYLRAGRWREGSFPLTTSLRERRVGILGLGRIGRAIARRLEGFGVAIAYHGRTPQADVAYTYHDSLLGLAKAVDVLIVASPGGPGTRGLVDAAVLAALGPEGIVVNIARGSVIDEAALIAALQAGTIHGAGLDVFENEPQVPQALIDLDQVVLLPHVGSGSHQTRAAMGRVLTDNLFSWFDGKGPVTPVPETPWTGR

SEQ ID NO: 27407 - protein, 534 aa, Magnetospirillum magnetotacticum MS-1
  misc_feature (263)..(263): Xaa can be any naturally occurring amino acid
  unsure (1)..(534): unsure at all Xaa locations
MTKPKVLISDALSDAAVQIFRDRGIEVDFQPALGKDKEALAAVIGNYDGLAIRSATKVTGKLLAEANRLKVVGRAGIGVDNVDVPAATSRGVIVMNTPFGNSITTAEHAIAMMFALARQIPQADASTQAGKWEKNRFMGVELTGKTLGVIGCGNIGAVVADRAIGLKLKVVAYDPFLTPERAAEIGVEKVELDQLLARADIITLHVPLTDKTRNILSTENLARTKRGVRIVNCARGGLVDEAALRAALDSGHGGGRAGLSDRXFRSPSPAVENPLFGHPNVICTPHLGASTSEAQENVALQVAEQMADYLLSGAITNAINFPSISAEEAPRLKPFVALCEKLGSFLGQLTEAPIKGIRITYEGAVAGMNTRALTSAAVTGVLRPILQDVNMVSAPVIARDRGIVVDEIKREGGASDYESVVRITVEAEDMPRDAAGTVFHDGKPRVIEIRGIDIDAAFAPHMLYVRNHDKPGFIGRFGSVLGEAGVNVATFALGREAEGGNAIAFVAVDGPVPAEVLKTIEAIPQVKRVRPVRF

SEQ ID NO: 27408 - protein, 322 aa, Magnetospirillum magnetotacticum MS-1
MKFLDEAKVYVRSGDGGPGCVSFRREKFIEFGGPNGGDGGRGGDVWIECVQGLNTLIDYRYRQHFKARKGEHGMGSNCHGAKGDDVVLTVPAGTQVFSEDGETLIADMTEIGQRVRLAKGGNGGFGNAYFTTSTNRAPRHANPGQEGQEMWLWLRLKLIADAGLVGLPNAGKSTFLATVTAAKPKIADYPFTTLHPGLGVVRSDAREFVLADIPGLIEGAHEGVGLGDRFLAHVERCRVLLHLVEGTSEHAGKAYKLVRRELEAYGEGLADKPEIVALSKADALDPDTLKDQLARLKRAAGSSRSCSRRFGAGSAGGPARHP

SEQ ID NO: 27409 - protein, 400 aa, Magnetospirillum magnetotacticum MS-1
MGFLADALSRVKPSATIAMTQKARELKASGMDVISLSVGEPDFDTPDHIKEAAIDAIRRGETKYPPVSGIVPLREAIVKKFKRENGLDYKVSQTIVGTGGKHVIYNALLATLNPGDEVVIPRPYWVSYPEMVILCGGTPVFAETDMAHDFKLQPEELERAITPKTKWIILNSPSNPSGAAYTRDEMKKITDVLMRHPHVWVLTDDMYEHLTYGDFEFVTPAQVEPGLYDRTLTMNGVSKAYAMTGWRIGYAAGPEQLIKAMDFVQGQQTSGASSISQWAAVAALDGTQEHLARFKAAFQERRDLVVSMLNQSNGLKCPVPEGAFYVYPSCAELIGKTTESGKTLASDEDFVTELLQAEGVAAVHGSAFGLGPNLRISYATSNKTLEEACRRIQRFCGSLR

SEQ ID NO: 27410 - protein, 158 aa, Magnetospirillum magnetotacticum MS-1
MLVPVIDRAEGVTLLLTKRAAHLRDHSGQVAFPGGKVDPEDTSPIDTALREAREEIGLEAGAVRPLGYLDPYLSGTGFLVIPVVGLVTREARPHPNPAEVAACFEVPLPFVMDPARHVVRSAAWKGRTRYFYAIPFEEHLIWGVTAGIVHNLYERLYA

SEQ ID NO: 27411 - protein, 282 aa, Magnetospirillum magnetotacticum MS-1
  misc_feature (19)..(29): Xaa can be any naturally occurring amino acid
  unsure (1)..(282): unsure at all Xaa locations
MSSSRESHSASPCIISGEXXXXXXXXXXXITPDLARTLVRTNNTVIGALAVRRGESDALICGLEGRFETRLRVIRDVIGLSPDLLDFAAMSLIVTKKGAFFLADTHVRQDPSAEEVADVAIACAGHVGRFGLTPKIALLSHSDFGQSDSPSARKMRRALELIQARAPHLQADGEMQADCALSELIRDRVLPGSNWKGAANILIFPNLDAANIAFQFAKVLADALPVGPLLIGPAKPAHILTPSVTARGIVNVTAAAVVEAQAGASQEAAAPEGEPGTGPLSE

SEQ ID NO: 27412 - protein, 288 aa, Magnetospirillum magnetotacticum MS-1
MANVAFLGLGVMGSPMAGHLAKKGHDVTVYNRTRAKADAWVAAHGGRAASTPREAAAGREIVFACVGNDDDLRSVVLGEEGAFAGMEKGSVFVDHTTASAEVARELAAAADAAGLRFIDAPVSGGQAGAENGVLTVMCGGEEATYMRVEPVVMAYAKSCRLLGPSGSGQLTKMVNQIAIAGVVQGLSEAIHFAKRAGLDVEAVLDVISKGAAGSWQMENRGRTMNAEKFDFGFAVEWMRKDLGILLAESRRNGARLPVTALVDQFYAEVEAMGGKRWDTSSLIARLER

SEQ ID NO: 27413 - protein, 313 aa, Magnetospirillum magnetotacticum MS-1
MYGREHLGPWWGYVAGWGFVVGKTASCAAMALVLAAYAAPPGWERPVAAAAVVVLTAVGYRGVTRTARLARGIVAVALLAIATAVVASLAGTTPRWSVVLDADGAHGGWYGVLQAAGLLFFAFAGYARVATLGEEVRDPRRTIPRAVLVSLGTVVALYAVVAVTLLAVLGPARLAASAAPLADAVAAGSWSWAGPVVSVAAVAASAGALLALLAGVIRTGLAMARTGDLPGWFAAAHPVHRVPHRAELTVGAAVVLLVLATDLRGAIGFSSFGVLVYYLVANLSALRQTAPHRLYPRVLPVLGALGCVALVVT

SEQ ID NO: 27414 - protein, 153 aa, Magnetospirillum magnetotacticum MS-1
MARYLLQRLCEKYEIDIEYHCKPLGDTDWNGSGMHCNFSTTFMRETGGKDYFEAMMAAFERNLEDHMAVYGPDNHMRLTGKHETAPWNKFSYGVADRGASVRVPHSFVNNGYKGYLEDRRPNSMGDPYQIASQVLKTISEVPLPSEAAQKAVA

SEQ ID NO: 27415 - protein, 266 aa, Magnetospirillum magnetotacticum MS-1
  misc_feature (186)..(186): Xaa can be any naturally occurring amino acid
  unsure (1)..(266): unsure at all Xaa locations
MSSDDALSWTNWARTASATPRRRASPRDEAELGGLVARAAAEGMPVRAVGAGHSFTPAAVTDGLLLDLDRLNLVERIARGGADGTDGDAILVTVGAGIRLHRLNEALAAAGLAMRNLGDIDRQSVAGAISTGTHGTGARLGGLATQVRGVRVVGADGEVREASPGHEPGLFEVSRLGLGVTGHLCXAVTLEVVPAFLLRAQEEPWPLDRVLERLGTPDDPDGLVGGNDHFEFYWFPHTRRALTKRNNRLAPEREGRRAGTPAHHRR

SEQ ID NO: 27416 - protein, 266 aa, Magnetospirillum magnetotacticum MS-1
MKYVLDAWGFDKYLAAVEEKLGRKLERVAPEHVAPRKPTDRFSHVGVHKQVQDGLNWIGVVLPVGKMTTDEMRELAKISAECGDGQIRLTVWQNFIFSGVPDAKVAEVEARVEALGLTTKAAGIRSGLVACTGARGCKFAASDTKGHAMVIADHVERAVPSLDVPVNVHLTGCHHSCAQHYIGDIGLIGAKVVVSEEGDTVEGYDIVVGGGFAENPKIGTEIWKAVKAEDAPTRVEALLNAYLARRLGPEESFQAFTARTGPEALR

SEQ ID NO: 27417 - protein, 222 aa, Magnetospirillum magnetotacticum MS-1
MLEDPAVEVPDYVYSRTLSPEEAPDQPTVITIGFEKGDAVSIDGQRLSPATLLAKLNELGRANGIGRLDLVENRFVGMKSRGMYETPGGTILLPAHRAIESITLDRGAAHLKDQLMPQYAELIYNGFWFSPEREMLQALIDKSQEKVTGSVRLKLYKGGVHVIGRESPHSLYDQDLVTFEEGAVAYDHRDAAGFIKLNALRLRTWRSARSARATRTRLVQAS

SEQ ID NO: 27418 - protein, 69 aa, Magnetospirillum magnetotacticum MS-1
MDTGTVKWFNEQKGYGFIQPEDGSKDVFVHISAVERAGLRGLTEGQKVSYVMETDRRSGKQSGGKLQVG

SEQ ID NO: 27419 - protein, 264 aa, Magnetospirillum magnetotacticum MS-1
MASASSKSKLINEAHGRVSFEDVAGVEEAKEDLQEIVEFLRDPQKFQRLGGRIPRGVLLVGPPGTGKTLIARAVAGEANVPFFTISGSDFVEMFVGVGASRVRDMFEQAKKNAPCIIFIDEIDAVGRHRGAGLGGGNDEREQTLNQLLVEMDGFEANEGVIIIAATNRPDVLDPALLRPGRFDRQIMVPNPDVTGRERILRVHVRKVPLAPDVDLKTIARGTPGFSGADLMNLVNESACSPPVAASGSSRCTSSRRTERGGPRL

SEQ ID NO: 27420 - protein, 174 aa, Azospirillum brasilense
MPYKALLLDRDGIVNVDRGYVGDIGRFTFLDGVFTLARHAVDRGFRVVVVTNQSGIARGYFTEAAFLELSDWMRGMFLDQGVELAGIFHCPYHRSGVVERYARDSFWRKPNPGMILDAARRLNLSLSRSVFLGDQPTDMKRPGRPAWSGASCCAQKTIRSDRKRQHPRSAVTRT

SEQ ID NO: 27421 - protein, 553 aa, Azospirillum brasilense
MAWLGHRRLSINDLSPAGNQPLLHAGGGTGDVLALVCNGEIYNAPTLRTELEALGHAFASRSDNEVILHGYRAWGDAVVDRLTGMFAFVLWDDRRRRLLAARDRVGIKPLYWAEPGDGGIAFASEARPLATLPGIGPAVELRALGHALTLGYVPAPLSAWRGIHKLEPGRLLVWEPGQGAALRRYWEAPRSLAAAGDGDAGWAGLFDRAVADHLLSDVPAGLFLSGGLDSAAVATAAVGAGLRPAAYTLCYPGRPDAEAEVAAAVARHLGLEHRLVPAPTDGLADRLAGVAALFDEPQGYSALVTMAGIARAAAAEHKVVLSGDGGDEVLGGYAWYAGLDPDGPPPGAEAGDAHAAFAARSVLHRHAMRLFPRFLPDEVEALFAPAGLRFGEEEMLAPLEAAFEPGLPLRRALQRVDLATFCADSILAKVDRASMAYGLEVRVPFLDHRLVEWGLSRPPAAEEAVHGKPVLRRYLAGRVPERVFGHPKTGFSLKDTGPFDWNAALDRVAAGPLVRHGLLDPGFRRIVEARSPYRQARIWALLALSLWAGSWME

SEQ ID NO: 27422 - protein, 579 aa, Chlamydomonas reinhardtii
MGCNPLQLAQVTALLGGDTATAATICAGTDVAQLGPNGAVTKWTVAELRGAQNALDQVEYGLNVSFVLASAYQVFVMQLGFALFAAGVVRPKNTVSIFIKNFFDTCIAGIAFYLVGYAFAFGAKDGYTNGFIGNWDFALSQTDGSPGSEPPNPWHLFIWNWSFCSASTTILSGSIAERATFASYTIYAAFMPAWVYPVVAHWLWAPDGWLSARNANDRILGIGAIDYAGSGVVHLVGGMAALIGSIAVGPRVGRFDAPGSTGEVSAQLYRATAAPQLYLMGTLLLWFGWYGFNPGSKLAISDYLQATIVSRTAVTTTLAACSGALSNLLLNYGRHRVWDLLSTCIGALAGLVAVTSGCSVIEPWAAIICGAISALFYEAGEQLLEKLKVDDPVSAFPLHAMCGVWGLLFTGLLANEGYITQVYNVPPGGHRMGLFYGGHAQLLLCQVIAIAVIAGWSAFNMCILFFGMKAAGLLRVGADKEATGMDMAACGQYNAAGAVNVHSSKVPTKSDAVLAAMSLNMERRMNGGPGMDYSVRNSSANPSAHNSSLHNTATATTVTTAAATPAAAGGIMLTSAVGG

SEQ ID NO: 27423 - protein, 353 aa, Oryza sativa Japonica Group
MEEGGRGVKRPFFTTPDELLEEEYYDEQLPEKKRRLTPEQVHLLERSFEEENKLEPERKTELARKLGLQPRQVAVWFQNRRARWKTKQLERDFDRLKASFDALRADHDALLQDNHRLHSQVMSLTEKLQEKETTTEGSAGAAVDVPGLPAAADVKVAVPDAEEPALEEAAAAFEEQQEQQVKAEDRLSTGSGGSAVVDTDAQLVVGCGRQASRRRGQQRGVVLPGRRRVPRLRDGPHGPRRGGHPVGGGRRRRQRRGLQLLRRRRRRPLRRPRPPPPPPTRGRRQGGRPADQLLVDVELDFSRARVVVHSILVLKKSFSFSFFRFFVCNVEFRSAMRRKEVYACAWYGRVTHR

SEQ ID NO: 27424 - protein, 303 aa, Daucus carota
MMHPKPRSSNQLEYGSYNLPPISSEPWWQSLGKNSTNTDGIQENGSDSSSQSVDGSEDEDDGSNESQNTGNMPSDPNFAQEHQNQHVATNVPPGNAENPPQASQLELAGQSVAYDPNAYYDPYYYRGMMAAYGQPLVQPHLLDTHHNRMPLPIDMTQEPVYVNAKQYRAILRRRESRAKAELKRKLIKDRKPYLHESRHRHAIRRARASGGRFAKKSDTDASENPQTSEVKGVNISSSVSAQSANSSGSQVFPSNCNLNSHQEARGPDATYVNNSGGYENQEAFRVSTYDLHSNREGGSVCQQ

SEQ ID NO: 27425 - protein, 294 aa, Moraxella bovis
MKPFIKWAGGKNSLLDEIQKRLPDFVHSQDFCLVEPFVGGGAVSLWALSDLPHLKQLVINDCNADLINVYQVIKNNPDDLIGYIENLQSHYDKLTDLESKKPYFYHKRDVFNQRTSNDIEQAGLFIFLNKSAFNGLYRVNKNNQFNVPIGNYKKPTFVDKENILNISKKLQNTKILSGDFELVLAHLPNNFPCLFYLDPPYRPISDTASFTSYSDNGFDDNEQKRLANFCKKIDKLGHYFLLSNSDPKNTNSSDEFFDELYQDFKIERIQANRTISANSNGRKKVNEIIVSNGV

SEQ ID NO: 27426 - protein, 495 aa, Saccharomyces cerevisiae
MTTDNAKAQLTSSSGGNIIVVSNRLPVTITKNSSTGQYEYAMSSGGLVTALEGLKKTYTFKWFGWPGLEIPDDEMDQVRKDLLEKFNAVPIFLSDEIADLLYNWFSNSILWPLFHYHPGEINFDENAWLAYNEANQTFTNEIAKTMNHNDLIWVHDYHLMLVPEMLRVKIHEKQLQNVKVGWFLHTPFPSSEIYRILPVRQEILKGVLSCDLVGFHSYDYARHFLSSVQRVLNVNTLPNGVEYQGRFVNVGAFPIGIDVDKFTDGLKKESVQKRIQQLKETFKGCKILVGVDRLDYIKGVPQKLHAMEVFLNEHPEWRGKVVLVQVAVPSRGDVEEYQYLRSVVNELVGRINGQFGTVEFVPIHFMHKSIPFEELISLYAVSDVCLVSSTRDGMNLVSYEYIACQEEKKGSLILSEFTGAAQSLNGAIIVNPWNTDDLSDAINEALTLPDVKKEVNWEKLYKYISKYTSAFWGENFVHELYSTSSSSTSSSATKN

SEQ ID NO: 27427 - protein, 282 aa, Solanum lycopersicum
MTGGKEIIDKIKEKVGLSSSDTGRGKSKMSKNITHGYHMVEGKSHHTMEDYVFAQFKQVDENELGLFAIFDGHLSHEIPEYLRSHLFNNILNEPNFWAEPESAIRKAYRITDTTILDKAADLGKGGSTAVTAILINGQKLVVANVGDSRAVIYKNGVAKQLSIDHEPGREREIIEGKGGFVSNFPGDVPRVDGQLAVARAFGDKSLKMHLSSEPDVVVELIDDDTEFLILASDGVWKVLSNQEAADCIKDIKDARSAAKHLNEHALARGSTDDISCVVVRFQ

SEQ ID NO: 27428 - protein, 248 aa, Solanum tuberosum
GSFLFLGPTGVGKTELAKALAEQLFDDDKLMVRIDMSEYMEQHSVARLIGAPPGYVGHEEGGQLTEAVRRRPYSVVLFDEVEKAHPTVFNALLQVLDDGRLTDGQGRTVDFTNTVIIMTSNLGAEYLLSGLSGKCTMEKAHEMVMQEVRKQFKPELLNRLDEIVVFDPLSHDQLRQVCRHQLKDVAGRLAEMGIALGVTEAALDVILAQSYDPVYGARPIRRWLEKKVVTELSKMLVKEEIDENSTVY

SEQ ID NO: 27429 - protein, 248 aa, Solanum phureja
GSFLFLGPTGVGKTELAKALAEQLFDDDKLMVRIDMSEYMEQHSVARLIGAPPGYVGHEEGGQLTEAVRRRPYSVVLFDEVEKAHPTVFNALLQVLDDGRLTDGQGRTVDFTNTVIIMTSNLGAEYLLSGLSGKCTMEKAREMVMQEVRKQFKPELLNRLDEIVVFDPLSHDQLRQVCRHQLKDVAGRLAEMGIALGVTEAALDVILAQSYDPVYGARPIRRWLEKKVVTELSKMLVKEEIDENSTVY

SEQ ID NO: 27430 - protein, 500 aa, Panax ginseng
MFPLAYPLLFVLLGALSWWILPIISPLKRHHKLPPGPRGLPIIGSLHTLGALPHRTLQTLAKKYGPIMSMRLGSVPTIVVSSPQAAELFLKTHDNIFASRPKLQAAEYMSYGTKGMSFTAYGPHWRNIRKFVVLELLTPAKINSFVGMRREELGMVVKSIKEASAANEVVDLSAKVANIIENMTYRLLLGRTKDDRYDLKGIMNEALTLAGRFNIADFVPFLGPLDIQGLTRQFKDTGKRLDKILEFIIDEHEQNSSNGNASGDFIDDMLSLKNKPSNTHDELSKVIDRSVIKAIMIDIISAAIDTSDTSIEWILTELIKHPRAMKKCQEEIDAVVGVDRMVEETDLPNLEYVYMVVKEGLRLHPVAPLLGPHESMEDITINGYFIPKQSRVIVNSWALGRDPNVWSEDADEFLPERFEGSNIDVRGRDFQLLPFGSGRRGCPGMQLGLITVQLVVARLVHCFDWNLPNGITPDNLDMTEKFGLTTPRVKHLLAVPKYRL

SEQ ID NO: 27431 - protein, 587 aa, Nicotiana tabacum
MASFSIKFLAPSLPNPARFSKNAVKLHATPPSVAAPPTGAPEVAAERLEPRVEEKDGYWILKEQFRKGINPQEKVKIEKEPMKLFMENGIEELAKIPIEEIDQSKLTKDDIDVRLKWLGLFHRRKNQYGRFMMRLKLPNGVTTSAQTRYLASVIRKYGKEGCADITTRQNWQIRGVVLPDVPEILKGLAEVGLTSLQSGMDNVRNPVGNPLAGIDPEEIVDTRPYTNLLSQFITGNSRGNPAVSNLPRKWNPCVVGSHDLYEHPHINDLAYMPATKDGRFGFNLLVGGFFSAKRCDEAIPLDAWVPADDVVPVCKAILEAFRDLGFRGNRQKCRMMWLIDELGVEGFRAEVEKRMPQQQLERASPEDLVQKQWERRDYLGVHPQKQEGYSFIGLHIPVGRVQADDMDELARLADEYGSGEIRLTVEQNIIIPNIETSKIEALLKEPVLSTFSPDPPILMKGLVACTGNQFCGQAIIETKARSLKITEEVQRQVSLTKPVRMHWTGCPNTCAQVQVADIGFMGCLTRDKNGKTVEGADVFLGGRIGSDSHLGEVYKKAVPCDDLVPLVVDLLVNNFGAVPREREETED

SEQ ID NO: 27432 - protein, 584 aa, Nicotiana tabacum
MASFSVKFSATSLPNHKRFSKLHATPPQTVAVAPSGAAEIASERLEPRVEEKDGYWVLKEKFRQGINPAEKAKIEKEPMKLFMENGIEDLAKISLEEIEGSKLTKDDIDVRLKWLGLFHRRKHHYGRFMMRLKLPNGVTTSSQTRYLASVIRKYGKDGCADVTTRQNWQIRGVVLPDVPEILKGLDEVGLTSLQSGMDNVRNPVGNPLAGIDPHEIVDTRPYTNLLSQYVTANFRGNPAVTNLPRKWNVCVIGSHDLYEHPQINDLAYMPATKDGRFGFNLLVGGFFSPKRCAEAVPLDAWVPADDVVPVCKAILEAYRDLGTRGNRQKTRMMWLVDELGVEGFRAEVVKRMPQQKLDRESTEDLVQKQWERREYLGVHPQKQEGYSFVGLHIPVGRVQADDMDELARLADEYGSGELRLTVEQNIIIPNVKNSKIEALLNEPLLKNRFSTDPPILMKNLVACTGNQFCGKAIIETKARSMKITEEVQLLVSITQPVRMHWTGCPNSCAQVQVADIGFMGCLTRKEGKTVEGADVYLGGRIGSDSHLGDVYKKSVPCEDLVPIIVDLLVDNFGAVPREREEAED

SEQ ID NO: 27433 - protein, 587 aa, Nicotiana tabacum
MASFSVKFSATSLPNPNRFSRTAKLHATPPQTVAVPPSGEAEIASERLEPRVEEKDGYWVLKEKFRQGINPAEKAKIEKEPMKLFMENGIEDLAKISLEEIEGSKLTKDDIDVRLKWLGLFHRRKHHYGRFMMRLKLPNGVTTSAQTRYLASVIRKYGKDGCGDVTTRQNWQIRGVVLPDVPEILKGLDEVGLTSLQSGMDNVRNPVGNPLAGIDPHEIVDTRPYTNLLSQYVTANFRGNPAVTNLPRKWNVCVIGSHDLYEHPHINDLAYMPASKDGRFGFNLLVGGFFSPKRCAEAVPLDAWVPADDVVPVCKAILEAYRDLGTRGNRQKTRMMWLVDELGVEGFRAEVVKRMPQQKLDRESTEDLVQKQWERREYLGVHPQKQEGYSFVGLHIPVGRVQADDMDELARLADNYGSGELRLTVEQNIIIPNVENSKIESLLNEPLLKNRFSTNPPILMKNLVACTGNQFCGQAIIETKARSMKITEEVQRLVSVTKPVRMHWTGCPNSCGQVQVADIGFMGCLTRKEGKTVEGADVYLGGRIGSDSHLGDVYKKSVPCEDLVPIIVDLLVNNFGAVPREREEAED

SEQ ID NO: 27434 - protein, 415 aa, Agrobacterium vitis
  misc_feature (229)..(229): Xaa can be any naturally occurring amino acid
  unsure (1)..(415): unsure at all Xaa locations
MYAAMGQHISLHVTLGYMPCLDSAPLVAAVEKGFASDEGLTLRLVRETSWTQIRDRLTVGHFDGAHLPGPFALAANLGFSPLAPALLVPMALNLGGGALTVSNALATAMQRAGWESHLLEPMAAGAALKRVVEKRRAKSLPPLRIAVGDTHSSQAYYLRYWLAACNLDCGSEVEMVSLPSLLMADGLSAGVLDGFCAAEPWSSVAVDRQVGRIVAATAAIWRGGPDKVXGISRQWGENNPAALDALIRALYRAAQWCGNPGNTEELAGIMAAPRYLGVEGRLLLPGLTGDLVTAPGEVQPLEDFLVLERKAANFPWASHALWFYSQMVLGGHVVHARERIATVLETYRPDLYRRALRPVFAAMPGANIKVEGAMAAADYVGASNGRLLLGPDGFFDGRVFDPDRLDDYLAASLVE

SEQ ID NO: 27435 - protein, 681 aa, Ammi majus
MAGESLATSLPATLLENRDLLMLLTTSIAVLIGCAVVLVWRRSSLRSVKSVEPPKLIVPKVEIEDEVDDGKKKVTVFFGTQTGTAEGFAKAFAEEAKARYEKAKFRVIDLDDYAAEDEEYEEKFKKESFAFFFLATYGDGEPTDNAARFYKWFSEGEEKGEWLNKLQYGVFGLGNRQYEHFNKIAKVVDDGLADQGAKRIVEVGMGDDDQCIEDDFTAWRESVWPELDKLLLDEDDTSAATPYTAAVLEYRVVVYDQPDTATLDQSLSTQNGHTVHDAQHPCRSNVAVKKELHKPASDRSCIHLEFDISHTGLAYETGDHVGVYCENLVEIVEEAEKLLGMPPNTYFSVHTDNEDGTPLTGGSLPPPFPPCTVRSALAKYADLLSSPKKSALLALAAHASDPTEADRLRFLASPAGKDEYAQWIVASHRSLLEVLAEFPSAKPPLGVFFASVAPRLQPRYYSVSSSPRMVPSRIHVTCALVYEKTPTGRIHKGVCSTWMKNAVSLEESHDCSWAPIFVRQSNFKLPSDTKVPIIMIGPGTGLAPFRGFLQERQALKDAGAELGTAVLYFGCRNRNLDFIYEDELNKFVESGSISELIVAFSREGPTKEYVQHKMLQKASEIWNLMSEGAYIYVCGDAKGMARDVHRMLHTIAQEQGALDSSKAESWVKNLQMTGRYLRDVW

SEQ ID NO: 27436 - protein, 188 aa, Oryza sativa Japonica Group
MQEQATSSRPSSSERSSSSGGHHMEIKEGKEAPLRSLLLPFLDFHFTVPLSGMESDEEIGRVPELGLEPGGASTSGRAAGGGGGGAERAQSSTAQASARRRGRSPADKEHKRLKRLLRNRVSAQQARERKKAYLNDLEVKVKDLEKKNSELEERFSTLQNENQMLRQILKNTTVSRRGPGSTASGEGQ

SEQ ID NO: 27437 - protein, 264 aa, Oryza sativa Japonica Group
MELELSLGSANSEMCTRGFDVNTRPADGGAEAGRPSSPSSMQEASTRQQVADQEAADDEDNGGGGARKKLRLSKEQSSFLEDSFKEHSTLTPKQKSDLANRLNLRPRQVEVWFQNRRARTKLKQTEVDCEHLKRCCERLTRENRRLQREVAELRGTLRTTTSSYPPLYGLHHLPAAAGTVFRVCPSCEHSKVVAAAASESFSPRVFAGGGAPAAITAAAAVPSPGAGSPPSSSAALFGARRPHFGPFAAAVIPPVLRRQPSATS

SEQ ID NO: 27438 - protein, 327 aa, Oryza sativa Japonica Group
MAQEGTSSNAPPAAASMGSGDGDNKEGTGESGNNQLLLPAIAASADKGKGVVAGTGNVDAKGKTTAMAPAASSTNAPNNQGGGGGGGGRSRERMHIFAERERRRKIKNMFTDLRDLVPSLTNKCGDVMDEMMFQADKATIVGEAISFIRSLEETVADLERRKRERNSLAARCARLGLGGSSSSSAPPPPPPPAAADDTAAVMPPAPAVPPPDAAAVTAGPEPAPAPAPGTLMVWSGPSVVLNLCGGDQAFINVSVARRPGVLTMIVDVLERHSIDVVTAQIASDLSRSLFTIHTSVDRERGMFMDTATAEEIYQLAVSEIMVWLHSE

SEQ ID NO: 27439 - protein, 365 aa, Oryza sativa Japonica Group
MSQEEQRHGRQLPLATSGVITFNGVPLSPLTAGAESDGDDDDVVIVDACNNGKRKVGDGEEEGRGSQGGDDDDDVVAVHGGGGGGGNRACMFAVRERERRRRMNDMFAGIRRLVPNLPEKSSRVEIIDGAIAYIKMLQGEEVRMEAQKQELQRERDRLAMEVAAAAGGAGASSSSSSAAAAAVTVAAYGPAGAVGSSSSSAAAAARANTVVPVPQRAARGATAPTPRPVAPPQAGTWPLPAPAAMPPPPPPPTGAAAVAPPPSLKTWSWGDNVVVSVLGNIGNMTVRAPLRRTGVLAMASAALKRYNITAVTSLSGTDASRTQNMFMFYTIIDMPDRQPQFVHPKVFEAMYRAAAAEIAAWINCY

SEQ ID NO: 27440 - protein, 487 aa, Oryza sativa Indica Group
MASSTGGLDHGFTFTPPPFITSFTELLSGGGGDLLGAGGEERSPRGFSRGGARVGGGVPKFKSAQPPSLPLSPPPVSPSSYFAIPPGLSPTELLDSPVLLSSSHILASPTTGAIPAQRYDWKASADLIASQQDDSRGDFSFHTNSDAMAAQPASFPSFKEQEQQVVESSKNGGAGASSNKSGGGGNNKLEDGYNWRKYGQKQVKGSENPRSYYKCTYNGCSMKKKVERSLADGRITQIVYKGAHNHPKPLSTRRNASSCATAAACADDLAAPGAGADQYSAATPENSSVTFGDDEADNASHRSEGDEPEAKRWKEDADNEGSSGGMGGGAGGKPVREPRLVVQTLSDIDILDDGFRWRKYGQKVVKGNPNPRSYYKCTTVGCPVRKHVERASHDTRAVITTYEGKHNHDVPVGRGGGGGRAPAPAPPTSGAIRPSAVAAAQQGPYTLEMLPNPAGLYGGYGAGAGGAAFPRTKDERRDDLFVESLLC

SEQ ID NO: 27441 - protein, 527 aa, Oryza sativa Indica Group
MGEVREENERLKTLLSRISHDYRSLQTHFYDVLQQGRAKKLPDSPATDIEEPEFVSLRLGTSTSKCKKEDKSTTSSEVKGSTEDFLKIKGGLSLGLSDCRVDANNSEKVQPDVMTLSPEGSFEDARDDTAETTEQWPPSKMLKNLRSVGAEAEDDIAPQPQVKKARVSVRARCDAPTMNDGCQWRKYGQKIAKGNPCPRAYYRCTVAAGCPVRKQVQRCADDMSILITTYEGTHNHPLSVSATAMASTTSAAASMLISGSSSTSLAAYPAAAASPALAFDASSKPPLIGGRPFFLPTAAAAAITSTPSYPTITLDLTSPAAAATSSHAAFSLSNRFSHTRYPSTGFTFSGSGPSSAPWPGYLSYGASLSAHPYNAGGGKSSSSFEAALSSINGSRQQGGGGGGGSAPPLYQMQQKAAAAAPPPPSVITDTIAKAITADPSFHTALAAAITSYVGKKGSPPASGGEDSKVGLKWGEHLGLGLTHSSLSTAAAAAASSSSQMFLQPSLGLSGSTTSASTSPVANREQAH

SEQ ID NO: 27442 - protein, 358 aa, Tuber borchii
MSENSTIVSNTANLVKFLNLDQKGSILAEYIWIDGANGVRSKTKTLFKKPSSVEDLPEWNFDGSSTGQAPGEDSDIYLRPVAIFPDPFRMGDNILVLAECWNADGSPNKFNHRHECAKIMEAHKDQKPWFGLEQEYTLFDLYGNPYGWPKGGFPGPQGPYYCGVGTGKVYCRDIVEAHYKACLFAGIKISGINAEVLPSQWEFQVGPCVGIEMGDHLWISRYLLHRVAEEFGVKISFHPKPIPGDWNGSGLHTNVSTQAMRDEGGMKAIEEAIQKLSTRHAEHIAVYGDDNTLRLTGRHETGNIDAFSYGVADRGSSIRIPRSCAKEGKGYFEDRRPASNACPYQITGIMMETICGGI

SEQ ID NO: 27443 - protein, 354 aa, Suillus bovinus
MAYQYHNDLLAPYLALSQGDKVQAEYVWIDGDGGLRSKTMTMTKKTTDIGQLRIWDFDGSSTNQAPGGDSDVYLRPAAIFKDPFRGGDNILVLAETFNNDGTPNRTNHRHHTKKVMDLAKDSVPWFGLEQEYTLFDADGTPFGWPKGGFPGPQGPYYCGAGTGKVFARDLIEAHYRACLYAGVNISGINAEVMPSQWEFQVGPCEGISMGDHLWMARYLLVRIAEQWGIKVSFHPKPLAGDWNGAGCHTNYSTKVMREPGGMKYIDEAIEKLSKRHAEHIAVYGEDNDLRLTGRHETGHIGDFSSGVANRGASIRVPRHVAAQGYGYLEDRRPASNIDPYRVTGIIVETTVLDK

SEQ ID NO: 27444 - protein, 354 aa, Amanita muscaria
MANQYHNDLLAPYLALDQGGKFHAEYVWIDGDGGLRSKTTTVDQKVTDISQLRVWDFDGSSTNQAPSGNSDVYLRPSAIFKDPFRGGENILVLSETYNNDGTPNRTNHRHHTAKVMELAKDEIPWFGIEQEYTLFDADGSPYGWPKGGFPGPQGPYYCGAGTGKVFARDLIEAHYRACLYAGVNISGINAEVMPSQWEFQVGPCEGISMGDHLWMARYLLIRVAEQWGVKVSFHPKPLQGDWNGAGAHTNYSTLAMREPGGMKYIEAAIEKLAKRHDEHIAVYGEDNEMRLTGRHETGHIGTFSSGVANRGASIRVPRHVANKGYGYLEDRRPASNIDPYRVTGIIIETTILDK

SEQ ID NO: 27445 - protein, 354 aa, Hebeloma cylindrosporum
MAYRYHNDLLAPYLALPQGDKIQAEYVWVDGDGGLRSKTTTVSKKVTDIGSLRIWDFDGSSTNQAPGHDSDVYLRPAAIFKDPFRGGDNILVLAETYNSDGTPNRTNFRHHAAKVMEQAKEDVPWFGLEQEYTLFDADGSPYGWPKGGFPGPQGPYYCGAGTGKVFARDLIEAHYRACLYSGINISGINAEVMPSQWEFQVGPCEGISMGDHLWMARYLLVRIAEQWAVKVSFHPKPLQGDWNGAGCHTNYSTKAMREPGGMKVIEEAIEKLSKRHDEHIAVYGEDNDLRLTGRHETGHIGAFSSGVANRGASIRVPRHVAAQGYGYLEDRRPASNIDPYRVTSIIVETTLLNA

SEQ ID NO: 27446 - protein, 356 aa, Fusarium phaseoli
MATSAPVTSRTETLAKYLKLDQKGQIMAEYVWVDAAGETRSKSRTLPEKDYKAEDLPVWNFDGSSTNQAPGDNSDVYLRPCAVYPDPFRGSPNIIVLAECWNAGGTPNKFNFRHDCVKVMDTYAEDEPWFGLEQEYTLLGPDNRPYGWPTGGFPAPQGEYYCGVGTGKVVQRDIVEAHYKACLYAGIQISGTNAEVMPAQWEYQVGPCLGIEMGDQLWVSRFFLARITEEFGAKVSLHPKPIAGDWNGAGLHSNFSTKAMREEGGMKVIEEALKKLEPHHAECIAEYGEDNELRLTGRHETGSIDSFSWGVANRGTSIRAPRETAAKGYGYFEDRRPASNADPYRVTKALLQFSLA

SEQ ID NO: 27447 - protein, 593 aa, Francisella tularensis subsp. novicida
MTNHQKVGTLYKRLLLQVKHLMAFSAFGCYRKYIFLSADASMIYLINPILNYGFGPGGGITKQSATILMLMGVGMVGFIALRSVGSFVSQYFIGSLGQKVVYKFRKDIYKRLMDLPASFFDKHSTGQIISRLLYNVDQVTEATSTAIITVVQDGTFVIGLIVVMFVSSWQLSLFLIVVGPFLGLFISIINKKFRNLSRNTQSSMGNVTHTAEETIRNYKEIRIFGAQQKQQNKFFKNLDYTYSQQIRTIALDALTSPVIQIIASLVLAFSLFTIAIFGTNDGGGSSWLTAGSFASFFAAAAAILKPIKNLTKVNVVIQKAVAATEDIFYILDYPAEKETGSKELAKVDGNVTIKDLSFAFGEHKVLSGVSVDIKAGQTVAFVGKSGSGKTTLTSIISRFYTQHKGEILLDGVDTRELTLENLRSHLSIVSQNVHLFDDTVYNNIAFGLSREVSEDEVIDALKRANAYEFVQELSDGIHTNIGNNGSKLSGGQRQRISIARALLKNAPVLIFDEATSALDNESERVVQQALESLTESCTTIVIAHRLSTVENADKIVVMDGGKVVESGKHQELLEQGGLYTGSINRDFNSTYAR

SEQ ID NO: 27448 - protein, 310 aa, Bordetella pertussis
MIFTGTANTRLAVDVVNHLDMSLGKMTVGRYSDGEVMVEINENVRGKDVFVLQPTCAPTNDNLMEIMVMVDALRRASAGRITAAIPYFGYARQDRRPRSARVAISAKVVANMLQVAGVDRVLTMDLHADQIQGFFDIPVDNIYAGPILLGDIWRRNFSNLVVVSPDIGGVVRARALAKQLEADLAIIDKRRPRANVSEVMNIIGEVDGRTCIIMDDMVDTAGTLCKAAQALKDRGAGAVYAYCTHPVLSGGAIERIETSSLDELVVTDTIPLSEQAQACGKIRQLSCAALLGETILRISNAESVSSLFAD

SEQ ID NO: 27449 - protein, 589 aa, Coxiella burnetii
MKTLTSQGIRTYGRLLQATKQYWPIFLIGVVGMIAVSLSDAGFTWLIKPIINRGFIARDLVFIRWLPFIIVLVFLFRGAANFLSTYFINRVARNIVMDFRRAIFSHLLRLPAEFYDRHSSGHLLSTVIYNVEQVAQASSDALIITLQASSLVVGLLVVMFLVSWKLTLFFLVITPLIAWVMRVCSARLRHLSTSVQKSVGEVTHIASEAIEAYKIVRLYGGQKYENEKFRHATKLNQQRELKVVVTNSVGTSLVQLLIAIPIAIVLFFATQPSFHVTAGSFASIVSAMIMMLRPVRRLTMVNSYIQKGIAAAESIFKLLDEDVEKDRGERHLVRARGAIEYQGVSFAYDNSKKTILSEISFSIEPGQMVAIVGRSGAGKSTLINLLPRFYDASTGVIKIDDINIKEFRLQELRNQFGLVSQHTTLFNDTILNNIAYGQAGSIDKRKIIEAARAAHAMEFIEQLPEGLDTVIGENGVRLSGGQRQRIAIARALFKNAPIHILDEATSSLDTHSERHIQAALDNLMDQCTTLVIAHRLSTIERADWIMVLEEGRLIEKGTHQQLLTLNGAYAELYRMQFAEKPAAMTALDE

SEQ ID NO: 27450 - protein, 600 aa, Pseudomonas syringae pv. tomato
MTTPESSATSSVKIYFRLLSYVRPYVGIFLLSILGFVIFASTQPMLAGILKYFVDGLSNPEAVLFPNVPYLRELQLLQAVPLLIVLIAAWQGLGSFLGNYFLAKVSLGLVHDLRVELFNKLLVLPNRYFDTTNSGHLISRITFNVTMVTGAATDAIKVVIREGLTVVFLFIYLLMMNWKLTLVMLAILPLIAVMVSSASKKFRKQSKKIQVAMGDVTHVASETIQGYRVVRSFGGEAYEQNRFAEASDSNTRKQLRMTKTGAIYTPMLQLVIYSAMAVLMFLVLFLRGDATAGDLVAYITAAGLLPKPIRQLSEVSSTIQKGVAGAESIFEQLDVEEEVDTGTIELDRVSGHLEVKNLSFFYPQTERQVLNDISFSAAPGQMIALVGRSGSGKSTLANLIPRFYGHEMGNILLDGVEINDYRLRNLRKHIAQVNQNVTLFNDSIANNIAYGDLAGAPRADIEAAAADAYAKEFIDQLPQGFDTQVGENGVLLSGGQRQRLAIARALLKNAPLLILDEATSALDTESERHIQAALDHVMKGRTTLVIAHRLSTIEKADMILVMDAGKIVERGTHTELLAQNGYYARLHAMGLDEPAPAGAV

SEQ ID NO: 27451 - protein, 1109 aa, Ipomoea nil
MKVAVNTFLLFLCSTSSIYAAFALNSDGAALLSLTRHWTSIPSDITQSWNASDSTPCSWLGVECDRRQFVDTLNLSSYGISGEFGPEISHLKHLKKVVLSGNGFFGSIPSQLGNCSLLEHIDLSSNSFTGNIPDTLGALQNLRNLSLFFNSLIGPFPESLLSIPHLETVYFTGNGLNGSIPSNIGNMSELTTLWLDDNQFSGPVPSSLGNITTLQELYLNDNNLVGTLPVTLNNLENLVYLDVRNNSLVGAIPLDFVSCKQIDTISLSNNQFTGGLPPGLGNCTSLREFGAFSCALSGPIPSCFGQLTKLDTLYLAGNHFSGRIPPELGKCKSMIDLQLQQNQLEGEIPGELGMLSQLQYLHLYTNNLSGEVPLSIWKIQSLQSLQLYQNNLSGELPVDMTELKQLVSLALYENHFTGVIPQDLGANSSLEVLDLTRNMFTGHIPPNLCSQKKLKRLLLGYNYLEGSVPSDLGGCSTLERLILEENNLRGGLPDFVEKQNLLFFDLSGNNFTGPIPPSLGNLKNVTAIYLSSNQLSGSIPPELGSLVKLEHLNLSHNILKGILPSELSNCHKLSELDASHNLLNGSIPSTLGSLTELTKLSLGENSFSGGIPTSLFQSNKLLNLQLGGNLLAGDIPPVGALQALRSLNLSSNKLNGQLPIDLGKLKMLEELDVSHNNLSGTLRVLSTIQSLTFINISHNLFSGPVPPSLTKFLNSSPTSFSGNSDLCINCPADGLACPESSILRPCNMQSNTGKGGLSTLGIAMIVLGALLFIICLFLFSAFLFLHCKKSVQEIAISAQEGDGSLLNKVLEATENLNDKYVIGKGAHGTIYKATLSPDKVYAVKKLVFTGIKNGSVSMVREIETIGKVRHRNLIKLEEFWLRKEYGLILYTYMENGSLHDILHETNPPKPLDWSTRHNIAVGTAHGLAYLHFDCDPAIVHRDIKPMNILLDSDLEPHISDFGIAKLLDQSATSIPSNTVQGTIGYMAPENAFTTVKSRESDVYSYGVVLLELITRKKALDPSFNGETDIVGWVRSVWTQTGEIQKIVDPSLLDELIDSSVMEQVTEALSLALRCAEKEVDKRPTMRDVVKQLTRWSIRSYSSSVRNKSK

SEQ ID NO: 27452 - protein, 320 aa, Deinococcus radiodurans
MNSRRSPLLVFSGQSNRPLAQAICDNLGVPLGRSRTEKFTNDNLIVHYEESLREGDVFIVQTFSTPVSDAIMELMLMIDAAKSASAGRVTAVIPYYSYARSDKKDSPRISIAGRLVADLLQEAGADRVLTMTLHSPQVHGFFKVPVDHLSADVVLSQHFKKCVPDAHNGVVLAPDAGSIKRASQIARRLDSGLAMIDKERLSDTEVRPRALIGDVDGKTVFIVDDEISTAGSLVETVSIARSMGAKDVYVAVTHGVYSGPAIERIAALDVTQVASCNTVLVPQDKLDRAGGKLAVLDVAPLFASAIANIHTGASVSTLFT

SEQ ID NO: 27453 - protein, 498 aa, Hypericum androsaemum
MEFLLITQCSLLFVATYLLVNHVILRGRSKNNGSTKLPPGPRPLPIIGNLLALRDKPHKSLAKLARVHGPLVTLKLGQVTTVVVSSPATAREILQKHDATLSNRYIIDAIRAQGHHEAGLAWVPVGPTWRKFRKVCYSHIFTNQKLNSSQHVRQRTIQQLLAEARESCRVGEAMDVGKAAFRAALSSLSISVMSLDLADAASDTAREFKELARCIMNDVGEPNLADYFPVLKRFDPQGVRGRVEISFGRILDLFGSIIADRMEKRGADEDILDTLLTTHDENPELVEINDIKHLLLDLFVAGTETTSSTLEWAMAELLHKPTTMAKAKAELEQIIGKGNSIDQESEVSRLPYLQAVIQETLRLHPAVPLLLPRRAGEEVHVSGFTIPKDAQVLVNVWAMGRDPEVWEDPCSFTPERFLGSSIDVIGTCFELIPFGAGRRICPGLPLAMRMLQMMLGNLLLSFDWKLPDGVTPECMDMEDRFGITLQKAQPLLAIPLSL

SEQ ID NO: 27454 - protein, 519 aa, Centaurium erythraea
MDIRENQFLQALAADPLLILLLFITPLLFLFLLSRFRLKPYPPGPRGWPLIGNMTMMDQLTHRGLAKLAGKYGGILHLRMGFVHTVAVSSPDIARQVLQVQDNIFSNRPATIAISYLTYDRADMAFADYGPFWRQMRKLCVMKLFSRKRAESWDSVRDEVERMTHIVATNIGSPVNIGEMVFGLTKDVIYRAAFGTSSHEGQDEFIKILQEFSKLFGAFNLADFIPWLSWFDPQGLNKRLEKARASLDGFIDSIIDDHMNRKKIKSGSNDVVESDMVDELLVFFSDEAKVLESEDLQNSIKLTRDNIKAIIMDVMFGGTETVASAIEWAMAELMRNPDDLKRVQQELSDVVGLHRKVQESDFEKLTYFKCCLKETLRLHPPIPLLLHETAEASEIAGYRIPAKSRVMINAWAIGRDKDSWKDPDTFRPARFLEEGVPDFKGSNFEFIPFGSGRRSCPGMQLGLYALEVAVAHLLHCFTWELPDGMKPSELDMGDVFGLTAPRASRLVAVPSPRLLCPLY

SEQ ID NO: 27455 - protein, 1165 aa, Pichia pastoris
MPGITETSQVTGPVLAHVIVTEDPYDASERAFLSTDLYELLFEDYANGSKSGLTLISIQLMGSSLFNEFQTFKVYESEEQLPPNTVNLCNMGNIIDYSSDFTVDSGYVARVDSLVKLDTVIISVLPEVYSLASQSQHQLVDILGGNDQHTVIRQGDYNKDINGKISLCEPTDQGFLESTTKIIVVKENSLNLPLLDQSQDGSLNYEENVKMNLEHSISNYFSLNSLDPENQITTTGVEFSVKCLDSPISVRKTAKSISVAHDSEDESSPKLVEEDISNEDTLLYAFCKTTELAKIGCLSGDIVKMKSGQCQCTTFECNCESCPVQYRYIRIHAFTDPNTYEKGCIYLNPILSFNLNNPKIVKLCPISIPDKRFELQGFHFSKFIPLAKQVTIARVSSPVTLDRTLQTLFLTNLKTYFESGRKVLSKDQLIPIPVDTLLAKSIFSTYEKLGVDDSQFPTVIPEGKPDAIAWFKVTEVSGELADSASQQFIIDPLKTKMMQSGVVSCSPPKNSQHCNWANYLGCGQMFSFPNVSGVTTSTFEYAKTLRKLIKATIDPSRLVNLQTTVLLSSLSRAIGKSLLVHSLALECGVHLVEIDGYEVLNPSSESKTIGTIRGKLDRVVEGCTPLIVFIKHIEALTKKSEQQQKDSLAVKINELIDEYTAKPGVLFVASTNDSDNLSDELRAKFKFEIVLGVPSEQERTLIFKYLIDFDQKTTPKVTEGTRELSFAPRNDLSLSSLSLQSAGLTPRDLISIVENAKTLAVDRVESLAKHHNVSFENMVYSSGGYIKFTPEDVEKSINTARNKFSDSIGAPRIPNVKWEDVGGLDVVKDEILDTIDMPMKHPELFSNGIKKRSGILFYGPPGTGKTLLAKAIATNFALNFFSVKGPELLNMYIGESEANVRKVFQRARDAKPCVVFFDELDSVAPKRGNQGDSEGVMDRIVSQLLAELDGMSGGDGGDGVFVVGATNRPDLLDEALLRPGRFDKMLYLGVSDTHEKQSKIMEALSRKFHLHPSVDLDKVAESCPFTFTGADFYALCSDAMLNAMTRIANTVDEKIKRYNEELPEKSQVSTRWWFDNVATKEDIDVLVTLEDFDKSRKELVPSVSAEELDHYLRVRQNFEGGKEKKVVQENGQTEHFSNGSANNHITFGDEQVVEAIDENGNSIIA

SEQ ID NO: 27456 - protein, 296 aa, Brassica rapa subsp. rapa
QLTTNFYSTSCPNLLSTVKSGVKSAVSSQPRMGASILRLFFHDCFVNGCDGSILLDDTSSFTGEQNAGPNRNSARGFTVINDIKSAVEKACPGVVSCADILAIAARDSVVQLGGPNWNVKVGRRDAKTASQAAANSNIPAPSMSLSQLISSFSAVGLSTRDMVALSGAHTIGQSRCVNFRARVYNETNINAAFATLRQRSCPRAAGSGDANLAPLDINSATSFDNSYFKNLMAQRGLLHSDQVLFNGGSTDSIVRGYSNSPSSFNSDFAAAMIKMGDISPLTGSSGEIRKVCGKTN

SEQ ID NO: 27457 - protein, 1124 aa, Nicotiana tabacum
MSSSRPSQSSTTSARSKHSARIIAQTTIDAKLHADFEESGDSFDYSSSVRVTSVAGDERKPKSDRVTTAYLNQIQKGKFIQPFGCLLALDEKTFKVIAFSENAPEMLTMVSHAVPSVGELPALGIGTDIRTIFTGPSAAALQKALGFGEVSLLNPVLVHCKTSGKPYYAIVHRVTGSLIIDFEPVKPYEVPMTAAGALQSYKLAAKAITRLQALPSGSMERLCDTMVQEVFELTGYDRVMTYKFHDDDHGEVVAEITKPGLDPYLGLHYPATDIPQAARFLFMKNKVRMICDCRAKHVKVVQDEKLPFDLTLCGSTLRAPHYCHLQYMENMSSIASLVMAVVVNDGDEEGESSDSTQSQKRKRLWGLVVCHNTTPRFVPFPLRYACEFLAQVFAIHVNKELELESQILEKNILRTQTLLCDMLMRVAPLGIVSQSPNIMDLVKCDGAALLYKNKIHRLGMTPSDFQLHDIVSWLSEYHTDSTGLSTDSLYDAGFPGALALGDVVCGMAAVRISDKGWLFWYRSHTAAEVRWGGAKHEPGEKDDGRKMHPRSSFKAFLEVVKTRSVPWKDYEMDAIHSLQLILRNASKDADAMDSNTNIIHTKLNDLKIDGLQELEAVTAEMVRLIETASVPIFAVDVDGQLNGWNTKIAELTGLPVDEAIGNHLLTLVEDSSVDTVSKMLELALQGKEERNVEFEIKTHGPSGDSSPISLIVNACASRDVGDSVVGVCFIAQDITGQKNIMDKFTRIEGDYRAIIQNPHPLIPPIFGTDQFGWCSEWNSAMTKLTGWRRDDVIDKMLLGEVFGTQAACCRLKNQEAFVNFGVVLNNAMTGQECAKISFGFFARNGKYVECLLCVSKRLDREGAVTGLFCFLQLASHELQQALHIQRLSEQTALKRLKVLAYIRRQIRNPLSGIIFSRKMLEGTNLGEEQKNILRTSSQCQRQLNKILDDTDLDSIIDGYLDLEMLEFKLHEVLVASISQIMMKSNGKNIMIVNDMVEDLLNETLYGDSPRLQQVLANFLLVCVNSTPSGGQLSISGTLTKDRIGESVQLALLEVRISHTGGGVPEELLSQMFGTEAEASEEGISLLISRKLVKLMNGEVQYLREAGRSTFIISVELAVATKSSC

SEQ ID NO: 27458 - protein, 1123 aa, Solanum tuberosum
MSSSRPSQSSTTSSRSKHSARIIAQTSIDAKLHADFEESGDSFDYSSSVRVTNVAEGEQRPKSDKVTTAYLHQIQKGKFIQPFGCLLALDEKTLKVIAFSENAPEMLTMVSHAVPSVGEHPVLGIGIDIRTIFTGPSGAALQKALGFGEVSLLNPVLVHCKNSGKPFYAIVHRVTGSLIIDFEPVKPYEVPMTAAGALQSYKLAAKAITRLQSLPSGSMERLCDTMVQEVFELTGYDRVMGYKFHDDDHGEVVSEITKPGLEPYLGLHYPATDIPQAARFLFMKNKVRMICDCRAKHVKVVQDEKLPFDLTLCGSTLRAPHYCHLQYMENMNSIASLVMAVVVNDGDEEGESSDSSQSQKRKRLWGLVVSHNTTPRFAPFPLRYACEFLAQVFAILVNKELELENQFLEKNILRTQTLLCDMLMRDAPLGIVSQSPNIMDLIKCDGAALLYKNKIHRLGMNPSDFQLHDIVSWLCEYHTDSTGLSTDSLYDAGFPGALALGDAVCGMAAVRISDKDWLFWYRSHTAAEVRWGGAKHEPGEKDDGRKMHPRSSFKGFLEVVKTRSIPWKDYEMDRIHSLQLILRNAFKDADAVNSNTISIHTKLNDLKIDGMQELEAVTAEMVRLIETASVPIFAVDVDGQVNGWNTKVAELTGLPVDEAIGKHLLTLVEDSSVDTVNKMLELALQGQEERNVEFEIKTHGPSRDSSPISLIVNACASKDVRDSVVGVCFIAQDITGQKSIMDKFTRIEGDYRAIIQNPHPLIPPIFGTDQFGWCSEWNSAMTMLTGWRRDDVMDKMLLGEVFGTQAACCRLKNQEAFVNFGVILNNAITGQESEKIPFGFFARYGKYVECLLCVSKRLDKEGAVTGLFCFLQLASHELQQALHVQRLSEQTALKRLKVLAYIRRQIRNPLSGIIFSRKMLEGTSLGEEQKNILHTSAQCQRQLDKILDDTDLDSIIEGYLDLEMLEFKLHEVLVASISQVMMKSNGKNIMISNDMVEDLLNETLYGDSPRLQQVLANFLLVSVNSTPSGGKLSISGKLTKDRIGESVQLALLEFRIRHTGGGVPEELLSQMFGSEADASEEGISLLVSRKLVKLMNGEVQYLREAGRSTFIISVELAVATKSS

SEQ ID NO: 27459 - protein, 1132 aa, Nicotiana tabacum
MASGSRTKHSHQSGQGQVQAQSSGTSNVNYKDSISKAIAQYTADARLHAVFEQSGESGKSFDYSQSIKTTTQSVVPEQQITAYLTKIQRGGHIQPFGCMIAVDEASFRVIAYSENACEMLSLTPQSVPSLERPEILTVGTDVRTLFTPSSSVLLERAFGAREITLLNPIWIHSKNSGKPFYAILHRVDVGIVIDLEPARTEDPALSIAGAVQSQKLAVRAISHLQSLPGGDVKLLCDTVVESVRELTGYDRVMVYKFHEDEHGEVVAESKIPDLEPYIGLHYPATDIPQASRFLFKQNRVRMIVDCHATPVRVVQDESLMQPLCLVGSTLRAPHGCHAQYMANMGSIASLTLAVIINGNDEEAVGGRSSMRLWGLVVGHHTSARCIPFPLRYACEFLMQAFGLQLNMELQLASQLSEKHVLRTQTLLCDMLLRDSPTGIVIQSPSIMDLVKCDGAALYCQGKYYPLGVTPTEAQIKDIVEWLLTYHGDSTGLSTDSLADAGYPGAALLGDAVCGMAVAYITSKDFLFWFRSHTAKEIKWGGAKHHPEDKDDGQRMHPRSSFKAFLEVVKSRSLPWENAEMDAIHSLLILRDSFKDAEASNSKAVVHAQLGEMELQGIDELSSVAREMVRLIETATAPIFAVDVEGRINGWNAKVAELTDLSVEEAMGKSLVHDLVHKESQETAEKLLFNALRGEEDKNVEIKLRTFGPEQLKKAVFVVVNACSSKDYTNNIVGVCFVGQDVTGQKVVMDKFIHIQGDYKAIVHSPNPLIPPIFASDENTCCSEWNTAMEKLTGWSRGEIIGKMLVGEIFGSCCRLKGPDAMTKFMIVLHNAIGVQDTDKFPFSFFDRNGKYVQALLTANKRVNMEGQIIGAFCFIQIASPELQQALRVQRQQEKKCYSQMKELAYLCQEIKSPLNGIRFTNSLLEATDLTENQKQYLETSAACERQMSKIIRDVDLENIEDGSLTLEKEEFFLGSVIDAVVSQVMLLLRERSVQLIRDIPEEIKTLTVHGDQVRIQQVLADFLLNMVRYAPSPDGWVEIQLQPNMKQISDEVTVVHIEFRIVCPGEGLPPELVQDMFHSSRWVTKEGLGLSMCRKILKLMNGDIQYIRESERCYFLIILDLPMTRRGSKSLG

SEQ ID NO: 27460 - protein, 393 aa, Candidatus Protochlamydia amoebophila UWE25
MVKLPIYLDNSTTSRPSDLSISQMMPYLTDRWGLPSAPHQKGQELYPVLKECYKILYAFLGAQEADQFVLTSSGAEAVNQVISSVYRDVTLPSGKNQFLTSNADEAPALMAMARLEPLGCVAKIIESNQYGIVTAEALAEAISPRTALISLSWANGLTGVVQPLGEIIALCKQRDIRLHLDATHVLGKLFYEFDELSVDFMTFNGDQLHAPKGTGGLYIKQGIKCSPLIAGGSDQAGLRAGGLNMASLVALAYAAKETLECRDLLCTETARLKHKLETGIVKAYPQARICFKECERLPHCTTLLFPGIANEALLFNLNRKGVYANIGGGNFQQLGLLLSACGLEENLAYSAVSFSLSRYTTEEEIDRAIELVVESAWQLNRTSYKLFETERKI

SEQ ID NO: 27461 - protein, 254 aa, Candidatus Protochlamydia amoebophila UWE25
MLKIKELTATVEGTPILKGVNLHIKTGEIHAIMGPNGAGKSTLAKVLAGHPAYEVTGGEVWFKGQNLLELEPEERAHLGLFMSFQYPVEIPGVSNSQFLQIALNAKLKAEGKSELTTAEFERLLNEKMKQMEIKPELRSRNVNENFSGGEKKRNEILQMAVLNPNLALLDETDSGLDIDAMRVVAKGVNQLMNPEMGLLLITHYQRLLDYIKPHFVHVMLGGKIVQSGGPELALELESKGYDWLVQSPKEGVVS

SEQ ID NO: 27462 - protein, 337 aa, Candidatus Protochlamydia amoebophila UWE25
MFVDRVIIELIAGKGGNGVVAWRREKYIPKGGPAGGNGGRGGSVILEADTQISSLDWFRHRRILKAQSGGDGGGNCRQGKNGTDLILKVPCGTLLKDAKSGKVIHDFVEDKERFVLCKGGRGGRGNDSFKTPTHQAPNICTEGTLGEIHHIELELKLIADVGLVGFPNAGKSTLISSLAGLRVKVAAYPFTTLQPNLGFIELDNYKRIYIADIPGIIEGASHNRGLGLEFLRHIERTKLLIFILDASGIDGRTPSHDFRILREEIGAYNPELLERPYLVVLNKIDTEDSPSHIQEFEKNFSISSDMLFKISAVYGEGLQELIEKMTQRLSQKKEIEY

SEQ ID NO: 27463 - protein, 916 aa, Candidatus Protochlamydia amoebophila UWE25
MSDDNKQDFKKGISNSFVWFLMAAFLFALMVQNFIDTKFAKVSFSYQLEHLVNLQLLQPEDSRKIALNDNLVTFSGKFRDRLTEEGKTRYKYLELLDTNHELKAEQARVKDEIKTLKTKVFDSASLFLQLSGLSIPKGGYVVVDDMYNTPEEDQSVVIKDLPKSAVESLVSLEKEYEAARQNPTAESLKNLGNLINELLRNLRSPALGIGSETIKQSLKGIDKEVADSGATSLSEQLAAYGHALVNLKAIIDELNHEEDHIRLAKLRSVRNYKETLDEYNQINTRLDDNQIQLDKARQSVSNVIWYFNNQELSTKALEKQDPEVYNQWFSKAKEEWANFSHNRGGIFRAPDQPLNAVLEKTFKSEEPSPNYFSYLFTLLPVLLVILVLYMLFARQMKGMGNTAMNFGKSPARLLNKGDNKITFKDVAGVDEALEELQEIVEFLKNPQKFTSLGGKIPKGVLCIGPPGTGKTLIAKAVAGEADRPFFSISGSDFVEMFVGVGASRIRDLFEQAKKAAPCIIFMDEIDAVGRHRGVGMGGGHDEREQTLNQLLVEMDGFDTNEGVILMAATNRPDVLDKALLRPGRFDRRVIIGLPDIKGRYDILKVHARRIKMDPSIDLMAIARSTPGSSGADLANILNESALLAARKGRTAVTAQETIEARDKVLYGKERRSLEIDENEKRTTAYHESGHTVVGLIVKSGDPVDKVTIIPRGMSLGATMFLPKKNRVSYWKQELHDQLAVLMGGRVAEEIFVGDVSSGAQQDIERATQLARSMVCKWGMSDKLGAVAYDERSEGGGQYGFGDHHEKTYSDETAQAIDSEVRRILDEALAIARKIILDYKEQVELLTLMLIEFETLDSEDIQEIVVKNNWDAVRKRERLKRAADLHKKEAATPPPPPPREVDISSSGTIPNTLGLSS

SEQ ID NO: 27464 - protein, 389 aa, Candidatus Protochlamydia amoebophila UWE25
MLLLKFRENMNRRVYLDCNSSTAIDPRVLKVLIQELQEEEGNPSSVHYHGQFCRKKLEESRQIIARFLKVKPQEIIFTSGGTEGANLLIKGVLQHFSLGQIISSNVEHACVDEVLKKMEKQGHSVTFLETGSWGAVDPQKLKEAIGSQTRLITLMAANNETGVKTDIEACAAIAQEAQIPFIVDGVALLGKEMFNIPKGVSAMFFSGHKVHVPKGIGFCFVRQGLKLMPQIIGGGQEQNRRSGTENLAGIVALAEGISILSESQEKITNQLRSRRDQLEKGLINQLDQVIINGDAPRIANTSNLSFVGIDGETLLMQLDMQGISVSHGSACSSGALEPSRVLLNMGFSNKRAGSAIRFSVGRMTTEEDIKQTIQVLVKTITKFKSNSFT

SEQ ID NO: 27465 - protein, 868 aa, Candidatus Protochlamydia amoebophila UWE25
MNQNFTDHVAEAIQAAFAEAQRLNHTEVTENHLLWAFLKDKEGYFYSLLNGLGTNPQKLFQETENNIHHLPTYSGGGQAPNPSRSLQSRIVDAQNIAQSWKDTYTSSDHFLISYWKNGGDPFASWKKKTTISLEKLEEQIKKIRGDRHMDSPSSESNLQALEKYCKNLTDLARQGKLDPVIGRDEEIRRTMQVLCRRTKNNPMLIGDPGVGKTAIAEGLAQRIVQQDIPDSLKNKQLLALDMGSLIAGTKYRGEFEERLKGILQDIEKSEGQIILFIDEVHTLIGAGATDGAMDAANLLKPALARGILHCIGATTLNEYQKYIEKDAALERRFQLVLVNEPTIEDSIAILRGLRERYEIYHGVHITESAIHAAVLLSSRYITDRRLPDKAIDLIDESASLIRMQLGSRPLPIDNKERELAGLIVEQEAMKRESTPLAKNEVEKLEGRIAQIKEELKILREQWDQEKKIIESLKEKKDKLEKLRFEEEAAERKADYNRVAELRYNLIPQLQKEIEEAQTQLNNKPNRLLQEEVDESLIAQIVSKWTGIPVHKMLEGEAERLLHLENELEKRVVGQEIAVSAVSEAIRRSRSGLSDPNRPMGVFLFLGPTGVGKTELAKALAFQLFNQDEALIRLDMSEYMEKHTVSKLIGSPPGYIGYEEGGQLTEALRRRPYAVVLFDEIEKAHPDVFNILLQVFDDGRLTDSKGRVVNCKNALFIMTSNIGSDLLLEKMEQNKQGLAKDEIMLVLDPVIKKHFRPEFINRLDDILPFVPLREHDMEKIVVIQLNLLAKRLKDRDVELMWTPQALAHLAKEGYDPHFGARPLKRYIQQEVINQLSTAILEGKIPPHSHIKLELEGNTIRFKSFAGGKN

SEQ ID NO: 27466 - protein, 266 aa, Candidatus Protochlamydia amoebophila UWE25
MFDSYHPKFMKTLVMKFGGASVASPEHFARIADLIIERQCVFPRLVIVVSAMGQTTNELIKLAHQVHPNPPQREYDMLISAGERISMTLLAMILCRKGKDAVSFTGSQSGILTCSQHTSAHIIDVRPQRLIQTLEQGKIVIVAGFQGVSQDKEVTTLGRGGSDTSAVAIGVALKAEKIEFYKDVLGIYNKDPKMYSDAICYPTLNYQEALTIVNQGAKVLHARAIKLAEKNGMPLHVRSFISRHDQGTWITSVDCKKSINPVYEIS

SEQ ID NO: 27467 - protein, 435 aa, Candidatus Protochlamydia amoebophila UWE25
MATNKMGLMSAILLGINMILGSGIFLLPGKVSELTGASSLYVYVFVSLLILSIAWCFAQCAALFDRNGGAYLYAKEAFGDFIGFEIGFMRWIAGAMAWASLIVGFVTALSSIWPNALTEPLRGFLILIFLALLILFNMGGTEKLKNINNVVTIAKVLPLLFFVLIGFFYTKGNFQAIDVSLSHLDSISFGNAAIVIFYAFGGFETLVIAAGEIKNPHRNLPIAVMAVISFCSFLYFLIQIIAMEILGPHLAESSIPLADATEQMIGSAGRWIVTLGMIISIGGVNLTASFITPRSGAALAEDGLVPRWIAKNNKAGVPVVAIFLTASLTTIAALSGSFTQLAVISVVSRFVQYGATCLAVFVLYYRNRATLKMLKKISLVIIPSLSLIGLIWMLFQASSSQLYWGLGALLPGIPIYFFQKWKNNLTLATVSEMGD

SEQ ID NO: 27468 - protein, 866 aa, Candidatus Protochlamydia amoebophila UWE25
MSLSVRYANLLLLNFRFTILFKKFTGYLFMDKRTTLFVIALSLTLFGMNLFFQHQNTQQKQEWVTQQQAKQIQKSKKLEEEIKSRTANSESFSLTTIYDGEQKEAIARGLVKDNYLLTFRWSENLPTEIYIRTSPSNEMQAYELIYNESEQQTPAIYKTKSSSSFLPIANIPDFGRYDLQLVSFNSSDSQYPAHIALGEYTDGHLSILNPQNLQIDKENKNSQQNYYAAIALLKTSQGYLPVGFYDFTSQSLVRFNKIQELSSFIAPTQDTQINSATNGKREQKFYVLENNYQQLVFSNYGGALAEINLPFRTDENQASVVREIEFDRNMVKHHPYNALFPSHAYYTHAKDQGKDFIFHEKGQLGGYYPLLRRDLIQISPRKSVQIKPQHYALNIVSEYPELAELIYEVIHFDNRSITFEAVQNQRRITKTYSFGDSLQEGPYCLNLALQIDGDSRGLWLTSGVPEVEWISGGPAPSLKYRITRNQKSEVEKIDLPKDASTITSIYPDWICNSNGFLGMILDPLKEIDPGFKIQAISGTNVPSRLIEIDQEYNLYQAANLPGYMAYLPLKSQGGLMNFRFFAGPFDDETLKTIDAKYSNSETGYNPDYIACQTMHGWFTFISEPFAKFLLILMKFFHYLTNSWALSIVLLTVSLRLMLYPLNTWSTKSMVRMQQIAPQVTAIQEKYKKDPKKAQLEIMSLYRERGVNPASGCLPLLIQMPFLIGMFDLLKSSFALRGAPFISGWIDDLTAPDVLFSWSKPIFFIGTEFHLLPILLGLVMFLQQRFMSSGPKDLSQMTDQQRQQRAMGTMMTVVFAVMFYNFPSGLNIYWLSSMLLGMVQQWFVSKQIQKTPNPIAVKTVPKKARSR

SEQ ID NO: 27469 - protein, 395 aa, Candidatus Protochlamydia amoebophila UWE25
MPKVLVMNAGSSSHKLSLFSDKIENAGSALWKAHIEWGKKNPSYTLKNGSQESNPIYLQTTSVKQGIQEVIEKLWIGDFAVIKEVHEIEWIGHRVVHGGSLFHQPVLINASVKKDISNLSSLAPLHNPINLEGIELLEKIFPSIPHFAVFDTAFHRTMREEIKTYPIPYEWKEKGIERYGFHGISHSYCAKQIKKWIKPQETPFKLINCHLGNGASLCAIRDGFSIDTTMGFTPMEGLMMGTRSGSIDPGILIYCLRNKNLSLEELDHLLNFESGLKGIGGTSDMREIHAFKNKQSQLALDMYIYRLKTGIGAMTASLGGIDALCFTGGIGENDSYLRKKTCEELAYLGIQLDLQKNQGGNQDKEISLHDSPVKVFVIHTQEEWMIAKSCLEYLT

SEQ ID NO: 27470 - protein, 640 aa, Candidatus Protochlamydia amoebophila UWE25
MSHSHHDEVSLIAFQKDFEKYSWSAFRLDLLSGLSVSMLTVPQVMAYALVAGLPVSCGILASVFSAIVVAIFCSSRHLIVGPSNAIAILIQACISEILFTYYRDISGPEKEQLILQILSQLMLLVGAIQILAAFFKLGRLTHFVSHTVIIGYISGVALALVINQIFPLLGMPVPRHLSSLYEMSVYILTHLTTINWPTALIGVTCLSLLLILRRIDRKLPSGAIVLAIVALVAYFFGYIYNYFIVNEYQFFNWEYIGKIMEPIALVGETNGEGLIPNWGLPYFNTGIMNNLLPVAFAIALLSVMEATTASKSIAVKSGQHLSTNQEIFGVGLGNFFGAFIGAMPVSGSAARSSLNFENGAKTRLAAIVSSLTVALILFAFGFLIRHIPVAAFAALLVASASNIVNLKQLFVCLKATRSDAFVLILTILSCIFFRLDIAFYIGVIMSISLYLKKAAIPQLVEFTVDNEGVLHTIDHHHLQEPRSIRFIKVEGELFFGSADLFQAALKSITEDDTTTRVLILQLKNARDIDATTCLALQQLHHYLKSSGRHLIGCGLTHQIWDVLSDSGIIDIVGKSNLFIFDEKHPQLSVQKAFIRAHELLSIDTANISEIVPPITAMPMPEAISDSQVIDPSSVISPVAN

SEQ ID NO: 27471 - protein, 370 aa, Candidatus Protochlamydia amoebophila UWE25
MIIGIPKEIKNHEYRVGATPSMVRLLVDAGHQVFVQSLAGDKIGYNDEMFTRAGAKIVQSAEEVYNSEMIIKVKEPQLSEFPLLKEGQILFCYLHLAPDPEQTKHLVEKKVVAIAYETVTDVQGRLPLLIPMSEIAGRIAIQVGATSLQLNYGGQGLLLGGVPGVAPAEVVVIGGGVVGTEAARMALGLGASVTIFDRDLNRLRFLDALYGPTLKTMYSSPLTIEEAVSKAALVIGAVLIPGKTAPKLVTRKMIQKMSPGTVVVDVAIDQGGCMETSRPTTHTEPTYVVDGVLHYCVTNMPGTCARTSTQALTNATTEYALVIANKGWKKALLDHVGLRHGLNVCFGQITNESVAYDLGYTYVPAENLLS

SEQ ID NO: 27472 - protein, 654 aa, Candidatus Protochlamydia amoebophila UWE25
MTMSQSQTKKGRIIGIDLGTTNSCVAVMEGGAPKVIASAEGTRTTPSVVAYKGNERLVGIPAKRQAVTNPENTITSSKRFIGRKYQEVLSEIKTVPYKVTNNNNGDAVFEIQGKIVTPEEIAAQILIKMKETAEAYLGEKITEAVITVPAYFNDSQRQSTKDAGRIAGLDVKRIIPEPTAAALAYGLDKENADKKIAVFDLGGGTFDISVLEIGDGVFEVLSTSGDTHLGGDDFDNAILNWMLETFKQEQGIDLRNDKMALQRLRDAAEKAKIELSGVQQTEINQPFITMDASGPKHLTMTLTRSKLESLTHDLIERTREPCLKALKDSGLNKDDISEVILVGGMSRMPAVQEVVKSIFGKEGHKGVNPDEVVAVGAAIQGGVLTGVVKDVLLLDVTPLTLGIETLGGVMTPLVERNTTIPTQKKQIFSTAADNQPAVTIRVLQGERKMANDNKEIGRFDLADIPPSPRGTPQIEVAFDIDADGILHVSAKDLSSGKEQKIRIEAQSGLQEEEIKRMVRDAEEHAEEDKKRKEEVEIRNEADSLAFRAQKALDEYKDKVPQQIADDISNKIEAVKKALETTDIARIRSAKDELERQMQQIGEVMSKAAGQSETQSTGPGSYQESSNQSSQHQTNNNKPDDIEEAEVEILDDKKP

SEQ ID NO: 27473 - protein, 313 aa, Candidatus Protochlamydia amoebophila UWE25
MSFCHQPLLFAGSSHPILATEIAQQLKISLGQMQLSKFPDGEIGVQLLESVRGKDTFVLQSIALDPNFYLMELLIIVDALKRASARNIVAVIPYYGYCRQDRKDKFDVSITAKLVANLLVEAGITRILTMDLHVDQLQGFFDIPVDHLSGRQLLIDELQKLDLTNSIVVAPDIGSVKTARTFASQLSVDFAIVDKHRKSAIEVVDYHLIGDVNGKDVLLADDICSTGATLMSAAKACQEKGANRIFAAFTHGLLVDDSVKQIENSLLEIVWMTNTIPHTKRLKEASKLKTVSIASLLTHAIQCIVSDESISSL

SEQ ID NO: 27474 - protein, 476 aa, Candidatus Protochlamydia amoebophila UWE25
MQIQVILAFIAYFSLLLLIGLVCHKKQTTSSDFIMGNRSLNFWLVALSAHASDMSAWLFMAFPMTIFVLGLPYIWIALGLLLGMFFNWQFVAPKLRSMTESYDTYTLSSFFEKRFKDTSGYIRILSAIIMLIFLTHYLSAGLIAMGYLLESLFGLNYYFGLSVAMLVVVVYTFIGGFTTVAWTDLFQGAFLLLMIILVPTIAMTKIDSWQTISHMAHQKKISLSLFGDSSLDSFIKISSLALGWGLGYFGMPHIITKFMGIKDVNEMHKSKWLGMTWQFVTLGAAAVVGLIGIAYFPNGLAKPEMVFVEMVKDLFNPFTAGFILCAVVAANMSTMDSQILVCGSILSEDLYKYFYKQTPSDQKILWVSKMSVVTVALIALLLAFNKSNTILDTVLYSWSGLGSAFGPLVLMSLYSKQTNRYGAIAGMITGTFVVVVWPSLNPLLFRYELLPMIPGFFTSLTAIYLASKYTRKNSLN

SEQ ID NO: 27475 - protein, 319 aa, Candidatus Protochlamydia amoebophila UWE25
MLKEILDKQHLYTNHYFETLDLIAIEKLVELLLETEKSIFFTGVGKSGLVAKKIALTMVSTGTKALYLSPTDAVHGDIGIVSQDDIFIMLSKSGESDELLNLVPPIRNKGGILVAVVCNPQSRLAAACHYVITLPFQEELCPFDMAPTMSTIFQGLFGDLVTAALMRRKNFSLNDYALNHPSGRIGKRMTLKVKDIMLTGEKVPICYPQDQLTNVLVELSNKRCGCILVVDRDHRLLGIFTDGDLRRMLQKVGGKVLESSMIEIMTPNPRSIESELLAYEAMKLMEADYCKRISVFPVLNLEQQVIGLLHIHDLIQTGL

SEQ ID NO: 27476 - protein, 176 aa, Escherichia coli
MKVAFLDRDGVINKEVNYLYKIEDFEFTKNCISGMKRFIAHGYKIIIVTNQAGIAKGYYTLSDYDKLTKWYRGILKSQGIDILDIYYCPHHPDGIGPEYRCDCPCRKPNTGMFESAARDYSIDLKQSFIVGDKLGDVEAGLKFGLGRVFLVETGHQIPAVGYATYPVYSDLLSIPL

SEQ ID NO: 27477 - protein, 408 aa, Candida tropicalis
MDRLNQLSGQLKPNAKQSILQKNPDDVVIVAAYRTAIGKGFKGSFRSVRSEFILTEFLKEFIKKTNIDPSLIEDVAIGNVLNQAAGATEHRGACLAAGIPYTAAFIAVNRFCSSGLMAISDIANKIKTGEIECGLAGGAESMSTNYRDPRVAPRIDPHLADDAQMEKCLIPMGITNENVANQFNISRERQDEFAAKSYNKAAKAVAAGAFKSEILPIRSIIRNSDGTEKEIIVDTDEGPREGVTAESLGKLRPAFDGTTTAGNASQVSDGAAAVLLMKRSLAEAKGYPIIGKYVLCSTAGVPPEIMGVGPAYAIPEVLKRTGLTVDDIDVFEINEAFAAQCLYSAEQVNVPEEKLNINGGAIALGHPLGETGARQYATIIPLLKPGQIGLTSMCIGSGMGSASILVRE

SEQ ID NO: 27478 - protein, 408 aa, Candida tropicalis
MDRLNQLSGQLKPNAKQSILQKNPDDVVIVAAYRTAIGKGFKGSFRNVHSEFILTEFLKEFIKKTNIDPSLIEDVAIGNVLNQAAGATEHRGACLAAGIPYTAAFIAVNRFCSSGLMAISDIANKIKTGEIECGLAGGAESMSTNYRDPRVAPRIDPHLADDAQMEKCLIPMGITNENVANQFNISRERQDEFAAKSYNKAAKAVASGAFKSEILPIRSIIRNSDGTEKEIIVDTDEGPREGVTAESLGKLRPAFDGTTTAGNASQVSDGAAAVLLMKRSLAEAKGYPIIGKYVLCSTAGVPPEIMGVGPAFAIPEVLKRTGLTVDDIDVFEINEAFAAQCLYSAEQVNVPEEKLNINGGAIALGHPLGETGARQYATIIPLLKPGQIGLTSMCIGSGMGSASILVRE

SEQ ID NO: 27479 - protein, 480 aa, Aspergillus niger
MPSLGGLLKKRRTKDSQTLSKELEAGSAQTQTSPNAAEDHHNHNHHQHHHHLFHHHHQPQPATNSGSAANTPPQPQDSVPQQSNRSSGAEKSSDGQVASMQSAVTQASPSAHHTSGLPQPNANAASIQNIINPSQQGAMHSASSGHTQSHHAGRSDARTTKGKYSLDDFSLQRTLGTGSFGRVHLVQSKHNHRFYAVKVLKKAQVVKMKQIEHTNDERRMLNRVRHPFLITLWGTWQDSRNLYMVMDFVEGGELFSLLRKSQRFPNPVAKFYAAEVTLALEYLHTQNIIYRDLKPENLLLDRHGHLKITDFGFAKEVPDITWTLCGTPDYLAPEVVSSKGYNKSVDWWSLGILIFEMLCGFTPFWDSGSPVKIYENILRGRVKYPPYLHPDAVDLLSQLITADLTKRLGNLHGGSDDVKNHPWFAEVTWDRLARKDIDAPYVPPIRGGQGDASQYDRYPEETEQYGMAGEDPHGHLFPDF

SEQ ID NO: 27480 - protein, 175 aa, endosymbiont ATPs-1 of Lamellibrachia sp.
AFQTRNPMHRAHEELCHMAMDRLGCDGLVIHMLLGKLKKGDIPAPVRDAAIRKMAELYFPPNSVMITGYGFDMLYAGPREAVLHAYFRQNMGASHFIIGRDHAGVGDYYGAFDAQTIFDDEVPAGMLDIEIFRADHTAYSKKLNKVVMMRDAPDHNKEDFVLLSGTKVREMLARL

SEQ ID NO: 27481 - protein, 299 aa, uncultured bacterium
MIKSPLRFPGGKSRAVAQILPLVPDFEEYREPMVGGGSLFLALKQKFPLRRYWINDINYDLYCFWKVAQECPDALADAVHKVRQSTTDGRALFYRLLEQYGQGSEFERAVRFFVLNRITFSGTVDSGGYSEQAFHDRFTHSAVERIRPLGNLLRGVKITCGDYAPVVQQEGESVFIYLDPPYYSVAESRLYGRRGELHLNFDHERLRRILGQTSHKWLLTYDECDYIRERYADYTQLRWTLQYGMNNYKQPRARPGKELFIANYDIEGATTRQLTLILERSGAVYDVLSRRNAESASNP

SEQ ID NO: 27482 - protein, 146 aa, Vitreoscilla stercoraria
MLDQQTVDTSKATVPVLKEHGVTITTTFYQNLFAKHPEVRPLFDMGRQASLEQPKALAMTVGAAAQNIENLPAILPAVQKIAVKHCQAGVAARHYPIVGQELLGAIKELLGDAATDDILDAWGKAYGVIADVFIQVEADLYAQDAE

SEQ ID NO: 27483 - protein, 889 aa, Desulfovibrio vulgaris subsp. vulgaris str. Hildenborough
MCGIAGIISRKDRNVSSQPLNRMLTSQEHRGPDAGYGVSFRRQSTGAFAAGRRHSADALAAGLEPAPVWLGHRRLSILDLSDKSAQPLRRGDLHIVFNGELFNYIELRSELTALGEHFETSGDTEVLLASYRHWGAGCLERFNGIFAFAIFDASRGSLFAARDPFGVKPFHYGVKPFHYAVTHDFLIFASEIKAISASGLVLRKWDPDVASAYLSYALTTAPQGRTFFENIRQIPPGHCLTLASPDDEPSVTRYYAPRITETPRSLHELVDEGAGLIRQSCRIRMRSDRDVGLCLSSGIDSANVAAALVAEGIAPECYSIDAASSSMLDEFPLITALADKLGLHVNPIRHPDAIPTADIVRYMLFNDEPSLFWGSYNQFHLYREMRKLGVIVSMSGHGGDELFCGYQRYYPAVVRDMLAQRRIMSLIWWCLRQSRHLMQDRRTIRSTWDSYSHPLGWANDYAHDIAALHLKHTIADPEEWISTFVGASSWGEQQQKSLFTYELQYLLRDADRNSMAHGIEERVPLLDTRLYEFCASVPLKDLCQDGYLKGLARQLFPAIPESLRFHQIKRGLYTDISSKLPQLQADLMPLVHRSPLLRELVDLQKLPQQLPGIVWWRLCSLAVLDVSGIEEWTAQTPLPRLVDDEMAERIGGVPSGTGRTAVIRHVLDEGLSYLEPGALHGLAETVGLIESAAIPGCIIEAGCALGGSTMVLATAKAKERPLHVFDVFGCIPPPGSNDGEEARARFAVIAAGESTGLNGKRYYGYEPDLLKNVQDNFVALGLPPAEHGITFVPGLYENTLYPSGPVALAHIDCDWYQSVKTCLERIAPHISPGGRMIIDDYDHYSGCRRAVDEFLEASNGQFIRERYARVHLVRTKADGQETDVHRPGD

SEQ ID NO: 27484 - protein, 309 aa, Arabidopsis thaliana
METDSIDSVIDDDEIHQKHQFSSTKSQGGATVVISPATSVYELLECPVCTNSMYPPIHQCHNGHTLCSTCKSRVHNRCPTCRQELGDIRCLALEKVAESLELPCKYYNLGCLGIFPYYSKLKHESQCNFRPYSCPYAGSECAAVGDITFLVAHLRDDHKVDMHTGCTFNHRYVKSNPREVENATWMLTVFQCFGQYFCLHFEAFQLGMAPVYMAFLRFMGDEDDARNYTYSLEVGGSGRKQTWEGTPRSVRDSHRKVRDSHDGLIIQRNMALFFSGGDKKELKLRVTGRIWKEQQNPDSGVCITSMCSS

SEQ ID NO: 27485 - protein, 159 aa, Tamarix androssowii
MSDEEHHFESKADAGASKTFPQQAGTIRKNGHIVIKNRPCKVVEVSTSKTGKHGHAKCHFVGIDIFTGKKLEDIVPSSHNCDVPHVTRTDYQLIDISEDGFVSLLTETGGTKDDLRLPSDETLLTQIKDGFAEGKDLIVSVMCAMGEEQICALKDIGPK

SEQ ID NO: 27486 - protein, 308 aa, Desulfovibrio vulgaris subsp. vulgaris str. Hildenborough
MNQTTHRCGWVALIGPPNAGKSTLLNALIGQKVAIVTSKPQTTRNQIVGILSRKDAQVVFMDTPGIHQLRGRLNKMLLQTAWQSMNAADALIVMLDGDLYIRKPDLLDRDIAPLVEPIAAETRPVVVVVNKIDLFRDKSKMLPLLERLSAMWPKAEVFPASALNKDGMDHLLRLIVGYMPEGPALYPEDQISTLPVRFMTAEIVREKVFNKLRQELPYSTAVDIEQWEEEEGRDQVIVNAVIYVARPSHKSMVIGKGGATIKEIGIEARKDIQELLEKRVHLELWVKVREGWTEDLGFMRSLGLSPDE

SEQ ID NO: 27487 - protein, 653 aa, Desulfovibrio vulgaris subsp. vulgaris str. Hildenborough
MASSSAVDPKGEGEGAQARGSSSGQANQVGQAGEAGEAEEAHTATDAGARTGLSPWQRLRHAALPFLDDLQGYTSRTFRHDVLAALTVAVVALPQSMAYAVIAGVHPKYGLYAAMLPVIVASLWGSSRYLIAGPTNAIAMLLFASLAETAVDGVLIGAMPEETRMAYIFGVAILAGAIQVGMGLARVGELVHFISHSVIVGFTAGAAVLIAVGQLRNLLGVSFAAAPDFPTQVLRTLVHLPQTNPWALGVGLATIALALALRYAPRNLPGPFIAIVVAAAATQLLGLEAHGVRVVGDIPQGLPPLSLPPAPDGDAIRMLFMPALAIALLGAVEALSIAKTLAGAKGEPVDGSREFVAQGLANMAAGLTSGIPGSGSFTRSAVNFTAGARTRFSGAFTGVLTLLAVLAFAPLARAIPVASLAGILCIIAWGMIDRDGIRLSLRATRADRAVLLCTFGATLLLDLEKAVFVGVLLSLGLFLRKVSHPRVVRLDASGSSELRGLDGGPCCPNLAVYAIEGTLFFGAIDELEKKLYEYENFGHKAVVLHLRQVHWIDATGVHAFERFLRKCRDKGVTLVLSGARPQVRRVLVDAGLIEHIGEANVTADLSSALNHCYTTCLRDEVCATCKAGNHGECRRQGAAMCEVDAERHPVAQE

SEQ ID NO: 27488 - protein, 495 aa, Desulfovibrio vulgaris subsp. vulgaris str. Hildenborough
MSAQFMTTVPVVLYLALSFGVALWARGRTAEGGSAKDIIEEYYIGGRSMGGFVLAMTIIASYTSAGSFVGGPGVAYRLGLSWVLLAMIQVPTTFLTLGVLGKRFAIVARRAGAVTLTDYLLARYRSHTVVILCSAALLVFFMAAMLAQFIGGARLFQTVTGYPYVVGLALFGVTVVLYTAVGGFRAVVVTDAVQGIVMVVAVVVVLLAVIDAGGGMTQCIATLKAIDPGLITPTGPGDAVPQPFMLSFWVLVGLGVLGLPQTTQRCMGYRDSRAMHDAMIIGTLLIGFMILCAHLAGTLGRAVLPDLPAGDLAMPSLIVQLLSPFWAGVFIAGPLAAIMSTVDSMLLLASAAIVKDLYVRYRLGGDTSRLRPVTMKRMSVASTAVIGVLVFVAAMEPPDLLVWINLFAFGGLEAVFLWPLVLGLYWRRGNATGAIASILSGVTAFVWLTIAKPDMGGIHAIVPTTLLSLVMFVAGSLAGRPSGREVDALFGGERS

SEQ ID NO: 27489 - protein, 331 aa, Desulfovibrio vulgaris subsp. vulgaris str. Hildenborough
MTDDQIHQTDWLQRGRDVLDIEAEGIRAVRDRLGPSFESALALLAGCRGRVVVTGLGKSGLVGRKLAATFSSTGSPAFFLHPVEGAHGDMGSLKADDVVIAISNSGETDELNAILPSLRAIGTPIIALTGRADSSLGRGADIVLDCGVPREACPLGLAPTASTTAVLALGDALAVCLIDWKSFTENDFLRYHPGGSLGQRLRLRVAELMHTEGIPVVNEEAVCEEAVLALDKGGFGAVALTDGGGRLTGILTDGDVRRAVLRGTYGPRVGVTHIMTRNPRFARQTQSVAELIDIMEQKAITVLPITDDDHRLVGLVHLHDLLGKGGVTFAG

SEQ ID NO: 27490 - protein, 568 aa, Desulfovibrio vulgaris subsp. vulgaris str. Hildenborough
MAIPSGATGKEPFLPRTLTVLREGYDGGTFFKDLAAGLTVGIVALPLAMAFAIASGTTPERGLFTAIVAGFLISLLGGSRYQIGGPTGAFVIIIFNVIMKHGYDGLVVTTLLAGAMLLVFGLCRFGALIKYIPYPVTTGFTAGIAVLIFSQQVKDFLGLSMQSVPPDFFEKWQAYIHNAATFDPATCGIAFLALGAIILTRKTIPRIPGPVVGVVLASLTVWALGLDVETIGSRFGGIPTELPTFTLPTVTLERVRQLLPDAMTIALLAGIESLLSCVVADGMTGDKHNSNVELAAQGAANIASVMFGGIPATGAIARTVTNIRSGGRTPVAGMIHAAVLVGFILYLAPLASFIPLASLAAVLMVVAWDMSEMHKFLRLLHAPKSDVLVMCLTFALTVVIDLTVAVYVGVMLASLLFMRRMSEVTQICTCLDGEATKVQGRETAELDVPEGVKVYEIDGPFFFGVADRFQNVLAALDRQPEVFILRMRKVSTLDSTAVNALEVFWRKCRSDGTQLLLSGVRETMRTTLRRMGTLSLIGEGNICENIDAALARAGQVLAERREAEDRPQ

SEQ ID NO: 27491 - protein, 301 aa, Desulfovibrio vulgaris subsp. vulgaris str. Hildenborough
MKIAITTSSFAKFSDAPLDLLREAGIEYVLNTTGRALTEDEAIDILQGCVGVAAGTEPLTRRVMDALPGLKVISRCGTGMDSVDRVAAEEKGIAVRNTPDGPTLAVAELTLGYALDLMRQVTRMDHELRGGTWKKRMGNLLNGKKVGLVGFGRIGRATARLFEAFGAEVAFSDPYAEDATHQKMEMDALMGWADIISLHCSKPAGGGHLIDATRLGLMREGTWLINAARGGLVDEAALHDALASGRLAGAALDVFEQEPYTGPLRDLPNVILTPHVGSYAVEARIRMETDTIRNLLDALKG

SEQ ID NO: 27492 - protein, 563 aa, Desulfovibrio vulgaris subsp. vulgaris str. Hildenborough
MYRMSGAELVIRLLERQGIDCISGIPGGANLPLYDALSHSKRIRHVLARHEQGAGFIAQGMARSTGRPAVFFATSGPGATNTLTAIADAKLDSVPVICITGQVPRSMIGSDAFQEVDIYGMSIPVTKHNFLVRSVEDLLTVIPEAFRIATSGRPGPVLVDIPKDVQTAEVAFEAWPETGGPDPAEAPDMEGLARAARMLAEAERPILFIGGGVVASGAGEVARVFAERTGLPTAMSLLGLGTLPPEHPLTLGMLGMHGARCTNMLLEECDLLMVVGARFDDRATGRIEQFCPHASIIHVDIDPSEIDKLRTAHVAITGDAGRVLEALLPMLEPVDRKAWHGHVARMKAAHPLLTPGADDPRTPYGLVTCTAACLDDSAIIATDVGQHQMRTAQAYPLRRTRQWLTSGGLGTMGFGLPAAIGAALANPERTVVCFTGDGSLQMNIQELATAAETGANVKIVLANNNALGLVQQQQDLFYGRRIFASDFTHRIDFVRIAEGFGVPAVDLGRSADPKRDLARALRAKGPCLIHVPVAVEENVYPMVPPGAANTEMIGGEAHAPAHA

SEQ ID NO: 27493 - protein, 399 aa, Desulfovibrio vulgaris subsp. vulgaris str. Hildenborough
MSDVFRVSRRVQQIRISATKLMPMLAARVGGCVSLGQGVPSFRTPEHIVEAVCRALRDKADAGRYTLQPGMPALREAIAADLAARKGYMVNPDSEVGVTVGAMEALLMALLTVVDRGDEVIIPSPGYASHAEQVLMAEGVPVHVPLRADDWGLDVDAIRAAVTPRTRAVIVCNPGNPTGTVYDDADVRALCELALERNIMLISDETYDYMVYGGGEPLSPASLPEMRRHVIVVNSFSKKYALTGWRVGYCAADAAWMGELLKVHDAAAICAPAVSQYAALAALTGPQDCVDDMRAALSARRNLACARLDAMAPHFDYVQPRGAFYIMARYTFTDAPSDMVARRLLEEGRVITVPGASFGPTGERHLRLSFGMEEAELDEAFDRMAAWTQRVVASGGLGG

SEQ ID NO: 27494 - protein, 290 aa, Desulfovibrio vulgaris subsp. vulgaris str. Hildenborough
MTDSPHKRFLASELDDIAPEEARFHVIPAPFEASVSYGGGTGAGPDAILDASDQLELWDGLSIPAAQGIHTHPPVDCTGDAEAVLDRISRATRSVLDAGGTPVLLGGEHTVTYGALAALRERFGRFGVVQFDAHADLRDSYEGSRWSHASVMRRAVSDLGLPLVQYGVRALCTEEVAFRREAGVTHWDAAQLARSGVPARPLPDDFPESVYVTFDVDGLDPSIMPATGTPVPGGLGWYDALRLVERSVSGRRVLGFDVVELAPIAGWHAADFAAARLVYDIMGIIQRMAR

SEQ ID NO: 27495 - protein, 370 aa, Desulfovibrio vulgaris subsp. vulgaris str. Hildenborough
MVVGILKEIKAEENRVAMTPAGVEVLCHHGHTVLVEAGAGAGSGFMDEAYVAAGATLIATPAEIYGRADMVMHVKEPQPSEYPLIRKGQVVFTYLHLAADEELTRALMDTGAVCIAYETIQKADGTLPLLTPMSEVAGRMAIQQGAKYLEMAQGGHGVLLGGVPGVDPGTVVVIGGGVVGTNAAKMACGLGAKVYILDMNLDRLRYLSDIMPANCFPLMSSPSLLRKLVREADVVVGAVLITGAKAPRLVTRDMLKTMKRGAVLVDVAIDQGGCFETSHPTTHGSPIFVVDGVVHYCVANMPGAVAKTSTLALTNATLPYAVALADKGWRRAMSESHEMALGANVVDGKITYAGVAEAFGLPLVSVESLF

SEQ ID NO: 27496 - protein, 343 aa, Desulfovibrio vulgaris subsp. vulgaris str. Hildenborough
MSVLQAGTATETPRTSDAGRQNEGADGAVAAPRTLDDIVAAVVRRGIPVRVAVAACAEPNALAAVLEARDMGMAVPVLVGDIAATESIATERGLSLEGCEVEDEPVPVKAVQRAVDRVRTGGADVLMKGLVNTDVLLRVVLNRVSGLSAGGLLSHVAVCSLPATCGGEASASSRLVCITDAAVNISPNMERKLGIVRNAICVARSLGIPSPRVAMLAATEKVMLPAMPATLDAQIVARMADQGEFGDAMVAGPMALDVAISPDIAARKGVSHPVAGRADILCAPDIESGNILYKSLTTLAHVEMAGILTGTTAPVVVPSRGDSRRSKLLSLALAAYVAMECRL

SEQ ID NO: 27497 - protein, 394 aa, Desulfovibrio vulgaris subsp. vulgaris str. Hildenborough
MKTIYFDNNATTQVDPAVLEAMLPFLTEMYGNPSSMHTFGGKVGRYVTEARAQVAAAIGAAPEEIIFTSCGSESDNTAIRSALQAQPDRRHIITTRVEHPAVLSLAQHLEKNGVEVSLLGVDAKGRMDLDELRAAIRKDTAIISIMTANNETGTIFPIAEAGAIAHEHGVPFHTDAVQAVGKVALDMKTMPVDYLALSGHKLHAPKGVGALYVRRGTAYRPFLRGGHQERGRRAGTENVASIVALGKACELATAAMHEENTQVRALRDRLESGLLAAIPDAVVNGDTANRLPNTSNIAFKYVEGEAILLMLDQHGVCASSGSACTSGSLEPSHVLRAMGVPFTFAHGSIRFSLSRFNTMEDVEYVVRELPPIIRRLREISPFRGEMTGKPACTC

SEQ ID NO: 27498 - protein, 273 aa, Desulfovibrio vulgaris subsp. vulgaris str. Hildenborough
MRSIIMTLLGVLMAISVASAADRPLRDQLAEDSVIEQALKRGTLRVGFSTFVPWAMQDKSGAFVGFEVDVATRLAQDLGLNLELVPTKWSGIIPALLTGKFDVIIGGMSVKPVRSLKVNFTIPYDYASISVMASKSAAAGLKSLDDFDNPEVVVVARTGSTAALAAKKRFPKARLRYFDDEGPAIQEVLSGRAHALVSSDPLPRFEVLANPDRLFMPEGKPLALEPVAFAVRKSDPDTLNVLDNWIRMVEMEGWLKERKHYWFETRDWEPLVR

SEQ ID NO: 27499 - protein, 275 aa, Desulfovibrio vulgaris subsp. vulgaris str. Hildenborough
MRLGKIIALAAAFLVFTGSAALAGPAYDNVMKDKKIRVGLMTDSIPGGFYNEKGEWGGFDYDIATEIAKRMGVDIERVQVNNKTRIAYVQQGRVDISVSNMTHTRERDKSVDFSITYFFDGQKVLAKKGQFKSVKDMVGKKIATMQGTTSEVNVKRALKEAGDPNPDQSVISFQKESECFQALQMGRVAGWSTDASILVGYSAKEPGKFELVGNFLAEEPYGIAMPQDDSALRDAVNAALQDMWKDGTYKTIYNKWYGPGTPFEMPLAGQIEMWP

SEQ ID NO: 27500 - protein, 636 aa, Desulfovibrio vulgaris subsp. vulgaris str. Hildenborough
MGKIIGIDLGTTNSCVYVMEGKDPKCITNPEGGRTTPSVVAFTDKERLVGDIAKRQAVTNPERTVFAVKRLMGRRGDAPEVGRWKEHSPYRIVAGANGDAAVEVQGRPYSAPEISAMILGKLKADAEAYLGETVTEAVITVPAYFNDAQRQATKDAGRIAGLDVKRIINEPTAASLAYGFDRKANEKIAVFDLGGGTFDISILEVGDNVVEVRATNGDTFLGGEDFDQRIISYLVDEFRRENGGIDLARDRMALQRLKEAAEKAKKDLSTSMETEVNLPFITADQTGPKHLMMKLSRAKLEKLVEDLVERTVEPCRKALADAGLTAAQIDEVVLVGGMTRMPLVQKRVSEFFGKEPNRSVNPDEVVAMGAAIQGGILAGDVKDVLLLDVTPLSLGIETLGGVFTRLIERNTTIPTRKSQTFTTAADNQPSVSIHVLQGERPMASDNMTLGRFELTGIPPAMRGVPQIEVSFDIDANGIVNVAAKDLGTGKEQSIRITASSGLSEDEIQRLVKEAEAHADDDKKKQELIEARNQADGLIYGTEKSIRDLGDKLDAALKADIETKVTALRGLLESEDVDAIKKASDELAQASHKLAEQLYKQQAQAGGPEAGAQPEGDAGARKQDDDVVDADYTEVKK

SEQ ID NO: 27501 - protein, 160 aa, Desulfovibrio vulgaris subsp. vulgaris str. Hildenborough
MDTVVCVRTANESTKAMEGTMQIRKILVPVDGSEHARRATVYAAEFAAMVQASVLLVHSRMSIPPLLGQAAYDEVRNSLNARAESLLEPYREILRGAGISFEDRILEGPAETAIVDAVRAEKCDHIILGSRGVSELEGLLLGSVTRRVLQLAPCPVTVVR

SEQ ID NO: 27502 - protein, 102 aa, Desulfovibrio vulgaris subsp. vulgaris str. Hildenborough
MYAIIETGGKQFRVEEGSKIFVEKLASEAGSEIVIDKVLMLGGGDVKVGAPYVENAKVTAEVVEHGRGEKVVIFKKWRRNDSRKKQGHRQDFTALKIKAITA

SEQ ID NO: 27503 - protein, 366 aa, Desulfovibrio vulgaris subsp. vulgaris str. Hildenborough
MRFVDEATINVRAGKGGNGCLSFRREKFIPRGGPDGGNGGDGGSVILRPTNRLLSLYDFRLQRNYEARNGQSGMGSQCDGRKGEDLVLELPLGTLVFEVDDEGHEQMIADLSDPDGVFVVARGGRGGKGNEHFKSSTMRAPRFAQKGEPGEERRLRLELKILADAGLLGLPNAGKSTFISRISAARPKIAAYPFTTLTPNLGVMIDEVDPDRRMVIADIPGLIEGAHTGQGLGHRFLKHVERTRFLVHILSIEDIDPENPWTGFDLINEELARFDEVLREREQIEVVNKIDLRTPEEVDALRQQAAQQGRRIFFISAMHGEGIEEVVDAMWRLRDTIDMHEPLVHLQEVEEEDEEFEDIEVVYTRE

SEQ ID NO: 27504 - protein, 476 aa, Desulfovibrio vulgaris subsp. vulgaris str. Hildenborough
MANRQRVLLVDDEQDFANGLARLIARLFPDVHVDVAFSGQDALEHIRKQRVHVMVTDLRMPGMGGMELLRRVMETEPDVSVVVLTAHGTIETAVEALQAGAYDFVTKPVEPEQVARVLRKGLERARLLDENRRLRDLVALVGESGELVGESPAMQSVRRTVATVAPSDYTVLIRGESGTGKEMVARMVHRLSPRVDEPFLALNCPAIPEHLLESELFGHVRGAFTGAERDRKGLFSIADGGTVLLDEIGDISSNIQTKLLRFLQEGEVRPVGSPRNEHVDVRIIASTNQDLEARMASRDFREDLFYRLNVVTIWVPPLRERLSDIPLLAATFLARASRELGVPQRDFDEGVLDHLMRREWPGNVRELQNYVRRLALFSRGDGITLDAVQQAEQSESGAPAALCVPSPVAEGEVMPYKDAKASLVESFSERYLRDLLESTGGNVTEAARLSGLSRVSIQKMVARYGIDAAAMRANGS

SEQ ID NO: 27505 - protein, 258 aa, Desulfovibrio vulgaris subsp. vulgaris str. Hildenborough
MLEIRDLHVCIGDVEVLKGINLHIRPGETFILFGPNGSGKTTLLMTLMGFANYKVTQGQILFKGHDITNAPMYERARLGMGMSFQRPPTIHGLKTGHLVRMCGRGREVDVEGLAQRVNFDRFLERDVNAGFSGGEIKRSELLQLMAQQPDLVLFDEPESGVDLENMSLIGQTARQLLDGIAPASCASIKQRKAACKTAGLIITHTGYILEYVNADRGQVMYDGHLCCEARPRDILEHIGKHGYQECLRCLDSDIKGGL

SEQ ID NO: 27506 - protein, 212 aa, Desulfovibrio vulgaris subsp. vulgaris str. Hildenborough
MALRNLLLDRDGTVIEDRHYLSDPEGVTLLPGVGPALGRLSRAGLRLFLVTNQSGIGRGYFTVPDYEACQARLAALLAPYGVTFVDVACCPHAPDEECSCRKPGTGMWDVLQNRHGLVAGETAMVGDKLDDVLFARNAGLAAAILVLTGKGARAAGSIGLSVPAGGTCLDVAPSGGDASGRPDVVACDLVAAADWLLAVSARRSAPSLEELC

SEQ ID NO: 27507 - protein, 534 aa, Desulfovibrio vulgaris subsp. vulgaris str. Hildenborough
MENKRAIIAVVLSFIVLVGWGYLSEYMGWTPKSVPATEQKTAASAPAPSVVTSAPEAVTPAPAFSPSTGHEVTVTTPLYKAVLHSGGGVLRQFMLSRYHMGIDRDAAPVNLIESSAIRVAPLGLLVNGQPSWNTGQWAFEGGDLNLADGQTGTLRFVGSVDGLRVVRELEFHADSYLVTEKLHLAPEGDAPRTARVGFTLGTTSLTPGESQYNLTRVAWFADGSFSEKSSTGDLEKGVLIDGSIDWAGVMSNYFLAAVAPKDTRAVLKGKLEGGVYRVAVERPDQMVNPGNSDVIVCNYWFGPKERDLLNAAPNNLGKAIDLGWFGFIARPLVTLLDFFYKYVGNYGTAIILLTILIKLVFWPLSHKSYKSMEQMKKLQPMLAKVREKHADDREKMNEEMMRLYKTYKVNPAGGCLPMLVQIPVFFGLYQALLNAIELRHAPFIAHVPFTDIVWLADLSAKDPFYVTPLVMGATMFLQQKLTPPAGDPTQAKVMMFMPVVFTFLFLNFPSGLVVYWLCNNVLSIAQQWWILRKA

SEQ ID NO: 27508 - protein, 396 aa, Desulfovibrio vulgaris subsp. vulgaris str. Hildenborough
MSGIKKVVLAYSGGLDTSVILKWLAVTYNCEVVTLTADLGQEEDLDGVDDKAMRTGASRAYVEDLQEEFARDFIFPMMRAGAVYEGRYLLGTSIARPLIAKRLVEIARAEGAQAVAHGATGKGNDQVRFELAVNALAPDLRVIAPWREWDLRSRTQLNAFAEEHGIPISSSAKQYSMDRNMLHCSFEGGELEDPWNEPGPNSYVMAVPMEQAPDEAEYISIDFEHGNPVAVNGERLSPAALVKKLNSIGGRHGIGRLDMVENRFVGIKSRGVYETPGGTLIHIAHRDLEGICIDRETMHLRDAMLPRYAAAIYNGFWFAPEREAMQAMIDVSQQRVTGTVRLKLYKGNAWPVGRQSPNTLYCHDLATFEDCATYDHKDAAGFIKLQGLRIRGYKKG

SEQ ID NO: 27509 - protein, 656 aa, Desulfovibrio vulgaris subsp. vulgaris str. Hildenborough
MNQFSRNLVLWATISLLMVVLFNLFNQPQGTQQRVTYSEFLQRVEKGEVVEVTIQGQKLSGKTTEGKPFQTFAPEDPSLVSRLLDKKIEVKAEPQEEAAWYMTLLVSWFPMLLLIGVWIFFMRQMQGGGGKAMSFGRSRARMITQESARVTFEDVAGVDEAKEELSEVVEFLSNPRKFTRLGGRIPKGVLLVGPPGTGKTLLARAVAGEAGVPFFSISGSDFVEMFVGVGASRVRDLFMQGKKNAPCLIFIDEIDAVGRQRGAGLGGGHDEREQTLNQLLVEMDGFESNEGVILIAATNRPDVLDPALLRPGRFDRQVVVPTPDVRGRKRILEVHGRRTPLSSGVNLEIIAKGTPGFSGADLENLVNEAALQAAKLNKDVVDMGDFEYAKDKVLMGKERRSLILSDEEKRITAYHEAGHALAAKLIPGSDPIHKVTIIPRGRALGVTMQLPEGDRHGYSRNYLLGNLVVLLGGRVAEEIIFSDVTTGAGNDIDRATKMARKMVCEWGMSEAIGPLAIGEQGEEVFIGREWAHSRNFSEETARLVDAEVKRIIEEARQRCHTLLEENLTALHDIANALLERETISGDDIDILMRGEKLPPERGNGGAPANSGTTPPAGNATDGAKAAQSPQASEDAATPAEEFTLEAEEPEKRDDRA

SEQ ID NO: 27510 - protein, 427 aa, Desulfovibrio vulgaris subsp. vulgaris str. Hildenborough
MSKLVPAHGGKGLVCCLLEGADREAELKKAAGLKQIEISSRAKGDLIMMGIGGFSPLNGFMKKADWKSVCEKMTLADGTFWPVPVTLDVSKDDAAAIKPGQEIALVRKGETFATMLVEEIYEMTEADKKWECELVFKGEGPDSQKFWEVALDDHPGVKMVMEQKEFNIAGTVKVLSEGEFPTKFAGVYKRPAELRKEMEERGWANVAALQLRNPMHRSHEFLAKIAIEVCDGVVIHSLVGSLKPGDIPAEVRVRCIDTLVEKYFVKENVIQAGYPLDMRYAGPREGLLHATFRQNYGINRMIIGRDHAGVGDFYGMFEAQTIFNKIPYINEACPTPGKALLCEPLKIDWTFYCYKCDGMASLRTCPHGKEDRVILSGTKLRKALSEGAEVVDHFGRDEVLVILREYYSGLTEKVEVKMQQAASGSVM

SEQ ID NO: 27511 - protein, 563 aa, Desulfovibrio vulgaris subsp. vulgaris str. Hildenborough
MQLNGAQILLECLKKEGVDVFFGYPGGAVIDIYDEIPRHPELHHVLVRHEQAAVHAADGYARASGKVGVCLVTSGPGATNTVTGIATAYSDSIPVVILTGQVPTPLIGNDAFQEVDIVGITRPCTKHNYLVRDVKELATVVRQAFYLARTGRPGPVLVDLPKDVMQAKTDFVWPEDVSMRSYNPTYKPNLNQIRRAADAFFEAERPLLFVGGGVVMSDASEELGWFARTLRIPVASTLMGLGAFPGDDPLWLGMLGMHGTYAANKAVNNADLIVAVGARFDDRVTGRLSAFASKARIIHIDIDPTSIRKNVQVGIPVVGDCRQSLANIREILVPRLEEKDWGAAHARWLEQLASWRVEQPLGFSREGGIKPQQVIEQLFAITRGDAIITTEVGQNQMWTAQFYTFRKPRTLITSGGLGTMGYGFPAAIGAQFAFPDKLVVDVAGDGSIQMNIQELATAVCNKLPVKILILNNGYLGMVRQWQELFYQRNYCSTCMDAQPDFVKLAEAYGAEGYRITEVESLESTLREALASPHPAIIDVRVEREENVYPMVPAGAALDEMLLV

SEQ ID NO: 27512 - protein, 326 aa, Desulfovibrio vulgaris subsp. vulgaris str. Hildenborough
MRIVALDGYTLNPGDISWAPIEELGELVVHPRTPSDKIIERAAGAHVVLTNKVPLDMSALQALPGLRFVSVLATGYDKVDVAAAGVLGIPVSNVPGYGTDSVAQHVFALLLELCRRTALHDHRIRAGAWTQSPDWCFWDSTQEELTGKTMGIVGFGNTGRRVGRIANALGMNVIAYAPRSRFDPDYRPFEHVGLDELFTSADVVSLHCPLTPETEGLVDARRLASMRPGSYLINTARGPLLDERAVAEALDSGRLAGAGLDVLSQEPPAADNPLLSAKNCLITPHLAWASRTARRTLMDSTAANIRSFIEGTPVNVVNAAHLRTKG

SEQ ID NO: 27513 - protein, 312 aa, Desulfovibrio vulgaris subsp. vulgaris str. Hildenborough
MQGDLKILTGTSNPELAKAICNHLGCQITPALCETFSDGEIRIEIGDNVRGDDVFVVQATCAPVNFNLMQLFLMLDALKRASAGRVTAVMPYYGYARQDRKVSPRAPISAKLVADFLTTAGTDRVVTVDLHAGQIQGFFNSPVDNLYAAPVILDYLRQVEGEIVIVSPDAGGVERARAYAKRLNAGLAIVDKRRDKPNQAQAMHVIGDVRDKVAIVVDDMIDTAGTLCAAGEVLLKNGAREVMACATHPVLSGPAIERLCNSPFKQVIVTDTVPLGDKLNACPKLHVLSVAGLLAKAIHNIHTESSVSVLFV

SEQ ID NO: 27514 - protein, 215 aa, Desulfovibrio vulgaris subsp. vulgaris str. Hildenborough
MQFFIDTANLDEIREAARLGLVDGVTTNPTLMSREGHDWRDVAAAICREVDGPVSLEAVGNTADELVAMGLELVRFGPNVVVKVPMTTEGLKAVRILSGQGVDCNVTLVFSPMQALLAAKAGAAFVSPFVGRLDALSEDGMQLVAETLTIFRNYAMPTRVIVASIRHPMHVSRAALLGAHIATIPFGVLGQLAAHPLTDAGLAAFDRDWARLNGK

SEQ ID NO: 27515 - protein, 601 aa, Desulfovibrio vulgaris subsp. vulgaris str. Hildenborough
MGEPSTTQRASLPLLRRIGRYFLPHKVSIALSMGCMAIVSATTAGTAYLIKPALDDIFINKDEQALLLVPAFFIVLTALKGFGRYFQNYFMNYAGLRVIESLRDQLFTKIIHLPMRFYEDSQIGLLMSRIINDVSMIRDSLPSTVMIVRQILTMVGLIGVVFYQNAELATWAVLVLPLALYPFIYFGRKLRKLGRRNQEKLADISVILQEVFSGIRVVKAFATEKEEAHRFDAENQRLVKLTLKQICVSELSSPVMELIGALGIGLVILYGGHEVISGKTTPGTFFSFMAALVMLYDPIKSLSMANREVQRALVGAERVFEILDAEDLCIETSGDLKFNRDFKEVCIKDVSFAYADGSPALRDINLCVRAGERVAIVGPSGAGKTTLVNLIPRFYEPSSGCIEIDGVPLQDFDLADLRRSISVVSQDAFLFNLSVSDNITYGTPNVGAGRIEAAAHAAFAHEFVQQLAQGYDTVLGERGVKLSGGQKQRLTIARALLKDAPLLILDEATSALDSQAERIVQKALDNLMENRTSIVIAHRLSTVLNADRIVVMEDGRVVDQGPHAELLGRCELYTRLYSIQFGQEKADADRIDGTSEEKLEA

SEQ ID NO: 27516 - protein, 507 aa, Desulfovibrio vulgaris subsp. vulgaris str. Hildenborough
MRSKPISQHFNDFVVERERARCIDCEVCVRQCSYGVHFWDEARKRVEHDSSKCVGCHRCAAMCPTDCLTIRRKPSDFRENALWTPAFIKNIYKQSDTGGVLLSGMGCPSPKPVYWDNMLLDASQVTNPSIDPLREPMELRTFLGGRPDRLVFEETPQGPKLQTEIGPQLQLEYPIMFAAMSFGAINYNLHEAMAKAATELGTFYNTGEGGLHPDLYPYGANTIVQVASGRFGVHKDYLNAGSAVEIKVGQGAKPGIGGHLPGEKIDEEVSRTRMVPKGSDAISPAPHHDIYSIEDLLQLICAIKEATQYRVPVSVKIAAVHNAPAIASGIVRAGADIVVIDGFRGGTGAAPTMIRDNVGIPIELALAAVDDRLRDEGIRNRASIVAAGGVRCSADVVKAIALGADAVYIGTAALIAVGCTLCGRCYTGKCPWGIATNESRLKKRQNPDEAARRLTNLVRAWGHEIQEMLGGMGLNSIESLRGNRDKLRGIGLGDTELDILGIKHAGR

SEQ ID NO: 27517 - protein, 408 aa, Desulfovibrio vulgaris subsp. vulgaris str. Hildenborough
MRILVQKFGGTSVANLECMKQVRAKVLAARERGYKVVVVLSAMSGETNRLLALADEWSSEPDPAETDALVVTGEQVSIALFSMLLKDSGIKARSFLGFQIPIVTSDTFGSARILSIDDSRLRAELETHDVLVVAGFQGCTADGRLTTLGRGGSDTSAVALAAALGSVECEIYTDVDGVYTTDPNLCSTARKLDRITYDEMLEMASMGAKVLQIRSVEFAKKYNVPVHVRSTFTDTTGTLVTQEDSSMEAVLVSGIAYDKDQARITLRSVPDRPGVAAAIFVPLSTNGVVVDMIVQNPSREGVTDMTFTVPRKDLKKTLTLMEGIREETEALEVLHDVSVAKVSAIGVGMRNHSGVAAKAFAALRKENINILMISTSEIKITCLIEEKYTELAVRVLHDAFGLSSNTEH

SEQ ID NO: 27518 - protein, 270 aa, Desulfovibrio vulgaris subsp. vulgaris str. Hildenborough
MKRLLLLALTLGLVLTAAVAHAGKLDEIKQRGTLVCGVKDSVVPFGFIDETSKQLVGFDVDICQFIADRAGVKLEVKTVTSATRIPMLTQGSVDLVAATMTHKFERDDVIDFSITYFDAGQRLLVKKGGGIKSAADLKGKKVATVKGSTSEKNMKAAQPDCVVVSFDEYPQAFLALKQGKAEAVTTDEPILVGLKNSDPEPDKWDIVGDFIASEPYGLGLVENDSKFRDFVNKSLAEMWTTGAYQKSYDKWFGKDTKYFIPLKWKMEVWP

SEQ ID NO: 27519 - protein, 228 aa, Desulfovibrio vulgaris subsp. vulgaris str. Hildenborough
MQRILDLIEGLPLFEGLSQGQLEGVASLVVDRKVERGQMVFCEGAPAEGFYVVAEGRIKVFRSGPDGREAIMHVLGPGEPFGEVAVFQGDRFPANAMAVTPSQVLFLPRRALVDRISRDPTLALNMLAALSRKLRQFTHKVEALTLQETPQRLAAYLLHASELAGGADTFTLDVTKGLLAGLLGTARETLSRCLSRMVERGAVSLDGRSVTILDRAFLEAMVEGTEQL

SEQ ID NO: 27520 - protein, 472 aa, Desulfovibrio vulgaris subsp. vulgaris str. Hildenborough
MPARILIIDDEDDIRFSLRGILEDEGHEVTEAPDGEAGLRTLASDTPDVVFLDIWMPGMDGLTVLEHIHAAAPSLPVIMISGHGTIETAVAAIKKGAHDFIEKPLSLEKVVIAAERALEMRELRRENQALRSSLGAGSKADELIGESAPMRRIREQIARVAPTDAWVLITGENGTGKELAARAVHAGSQRATRPLVAVNCAAIPEELIESELFGHEKGAFTGAESARTGKFEMAHRGTLFLDEIGDMSLKTQAKILRILQEQSFEKVGGTRTIRVDVRVVAATNKNLEEQIAQGTFREDLYYRLRVFPLSLPALRERGDDILRLLDAFMLRLCRDHAFAPLTFTDDAQDVLLRYRWPGNVRELRNFVERMLILHAGESVDVEDLPPECLRDLSPSSDSATGTAAQSATATCGTGVDGILDFKAARNAFETRFLAEQLQECGGNVSRLAERIGLERSHLHRKLKGYGIIAGDQ

SEQ ID NO: 27521 - protein, 570 aa, Desulfovibrio vulgaris subsp. vulgaris str. Hildenborough
MSEQNPNVSERTTEATPGLDFVRSRVVADNRTGRFDGRVHTRFPPEPNGYLHIGHAKSICLNFGIANEYGGKCNLRFDDTNPVKESREYVDSIRTDVAWMGFSWDDREFYASNYFEQLYQFAEQLIMAGKAYVDSLSAEEIRAHRGTLTQPGTESPYRNRSVEENLDLFRRMRAGEFADGTHVLRAKIDMASPNVVMRDPTLYRIRHAHHHRTGDAWCIYPMYDFTHCISDSLEGITHSICTLEFENNRELYDWTLDALGVYHPQQIEFARLNLTYTVLSKRKLIQLVEGGFVKGWDDPRMPTISGLRRRGVPPEALREFCARIGVAKADSTVDYGLFEFCIRERLNATTPRVMGVLDPIRVVIENYPEGQVEEFDMPYHPEDASFGSRIVPFSRVLYIERDDFREDPPKKFFRLAPGAEVRLRYAYYITCREVVKDEAGNIVELRCTYDPESRGGSSPDGRKVKGTLHWVSAAHAVESEVRLYEQLFAVSDPDDVPEGGVFTDNLNPDSLKVVRAMLEPSLGGIEPGTKVQFERMGYFCADPDSVPGAPVFNRTVTLKDTWAKLEKKMG

SEQ ID NO: 27522 - protein, 697 aa, Desulfovibrio vulgaris subsp. vulgaris str. Hildenborough
MCGIAGIVSPGAPVASATLAAMTESLAHRGPDACGLFIRPSGAGSPHVGLGHRRLSILDLSDAGAQPMQSEDGAFTLVFNGEIYNYPDLRRDLEAAGHIFRSTSDTEAILRGYMAWGEGVVARLKGMFAFALWDERKRSLLLARDRFGKKPLHYAVTRQGTLLFASEPKALLAHPEFRPEPDAASLLHFLRYDYVPAPRSIYAGAAKLPPSHLMVWRDGRLEVRRYASLAFSGATGDRGVPLREAEAAVDALLDAAVQRRLASDVPLGVFLSGGLDSSTVLAYMTRHIPAHDIRTFAIGFDEASYDESAHAEAMARHAGSHHTMMRLPAARMLDLLDMVWTTQDEPMADASIIPTLLLCRFAREHITVALGGDGGDELFAGYDPVLADLPARCLDWLPPAALRLLQGIALRLPTGDANMSLGFKVQRFLSGLGAREVAARHQTWLGAFDDEGARAMLHPDLRAATRDVSPLDALDMLREECRDASRFDAMLHFYQRFYMCGSILTKVDSASMAVSLEVRSPFLDQDLADYVNRLPREHKLRGLTRKVLLRRLMRSRMPDALLKRPKKGFGLPLARWFRHELRPLVTAMLDPGRVAQGGLLDPVTVERMVRDHLSGRRDHRKEIWSALCVEAWRERYLHHSRATASDTIEFGTTPHGDGHLITAQAVPARSSAAINDSTNDSPSWAASPSRHRCNDSI

SEQ ID NO: 27523 - protein, 704 aa, Desulfovibrio vulgaris subsp. vulgaris str. Hildenborough
MSNNLYITATESKSGKSAVVLGMMQLLLRDVRKVAFFRPIINQASTDVRDHDINLILRHFGLDIAYEDTYAYSLQDARELINNGQHATLLDNILKKYKKLEDAYDFVLCEGTDFLGKDAAFEFELNADIAANLGCPVMVVANGQQKAARELIASTQLTIDLLDEKGLDVVTAVINRATVTEAEREEIIKSLECKVNCSNPLAVYVLPEESTLGKPTMNDVKKWLGAQVLYGHGRLDTLVDDYIIAAMQIGNFLDYVSQGCLVITPGDRSDIILSSLASRLSTAYPDISGLLLTGGLEPAANVHRLIEGWTGVPIPILSVKDHTYKTIQTLNELYGKIEPDNDRKINTALALFERHIDSSELGSRLINRKSSRITPKMFEFNLIEKAKRNRMRIVLPEGAEERILRAADILVRREVADIILLGDANTVGSRIGDLGLDMDGVQIVQPNLSPKFDEYVAAYHECRKKKGISMEQARDMMNDPTYFGTMMVHKGDADGMVSGAINTTAHTIRPAFEFIKTKPGVSIVSSVFLMCLKDRVLVFGDCAVNPNPTAEQLAEIAISASHTARIFGVDPRVAMLSYSTGSSGKGADVEKVIEATRIAKERAPELLLEGPLQYDAAIDMDVARTKLPGSTVAGQATVFIFPDLNTGNNTYKAVQRAAGAVAIGPVLQGLNKPVNDLSRGCTVADIVNTVAITAIQAQAEKGLI

SEQ ID NO: 27524 - protein, 402 aa, Desulfovibrio vulgaris subsp. vulgaris str. Hildenborough
MNVLVINSGSSSIKYQLIDMEREVPLCSGLVERIGEPMGKLTHKIRPDAEGEEKLTFEQPFTNHVEGMKRVVELITDADKGVIKDKSEIGAIGHRVLLGGEEIKQSVRIDDWAKGVIRDYIPLGPLHNPANLAGIEVAEELFPGLPNVGVFDTEFHQSMPAKAYLYPLPIELYEELKIRRYGFHGTSHRYITKRTAQYLGKPLDELNIITCHLGNGCSMAAVKNGKCVDTTMGITPLEGLMMGTRCGDIDPAIVPFLMEKKNLSPAEADTLMNKQSGLKGMCGMNDMRDLHAARENGNERAQLAFEMFTYRIKKYIGAYYAVLGRVDAVVFTAGIGENDDFVRAEVCAGLDSLGIAVDPARNAVRNGQPRHISPDGSRVAVLVVPTNEELEIAQATLDVLKG

SEQ ID NO: 27525 - protein, 121 aa, Desulfovibrio vulgaris subsp. vulgaris str. Hildenborough
MNILIVDDETEFLELVGKRLARRGMDVTTASSGEEALTLAEGRVFDVVVLDVKMPGIDGLETLRRLRVMHPTMPVLLLTGHASLGSAVSGMELGAFDYMLKPVAINELIIKLNEAARLGGA

SEQ ID NO: 27526 - protein, 390 aa, Desulfovibrio vulgaris subsp. vulgaris str. Hildenborough
MNISDRLTRIKPSATLAVNAKALELKARGVKVVSLAVGEPDFGTPAHICEAAKRAIDEGFTRYTPVPGIIELREAVAGYFGRCYGVEAPAEATIVTNGGKQALYNLFQALLNPGDEVLVPAPYWVSYPALVQLAEGVPVFVPSPAERGFKITPAELDAHRTPRTRVLLLNSPSNPTGACYTREEMDALMQWAVDHDIFVIADEIYDRLVYGDMQPVSVSGWWQRFPDRVAVVNGLAKTFAMTGWRVGYVLAHPDLVKAVAKIQGQSTSNICSIAQKAALAALTGPYDAVEEMRCAFVRRRDLAYDIISGWKDVVCPRPDGAFYLFADIHRHYNASMPDSAAVCTRLLEEAQVALVPGSAFGDDKCIRFSYAVADDVLEDALSRVAKVLFG

SEQ ID NO: 27527 - protein, 544 aa, Desulfovibrio vulgaris subsp. vulgaris str. Hildenborough
MQPAQGITPSTLSVKDLPWQVEWDRATCALCGRCTAVCPVNAIELGVHRQRIVDAPVGLAKRPSNAHTVYHGVRQRTDAAYACVGCGMCTMVCPNNAIRPVHQAEATALRFHNNRGGQPRTRGGRRNDPLGLLDQIKFIRISMLTDPALDAGRHEFELRTLLGRILPPEEGMAALHGNGWVPPVREIYPLVIGGMSFGALSPNMWEGLQMGVAYLNEEMGMPVRMCTGEGGCPPRLLRSRFLKYVILQIASGYFGWDEILHAIPEMKEDPCAIEIKYGQGAKPGDGGLLMWHKVNKLIASIRGVPPGVSLPSPPTHQTKYSIEEAVAKMIQSMSMAWGFRVPVYPKISGTATALAVLNNLVRNPYAAGLAIDGEDGGTGAAYNISMNHMGHPIASNIRDCYNALAAQGRQNEIPIMAGGGIGKNGNLAHNAAALIMLGASMVQSGKYIMQAAAGCVGSEVDRCNICNIGRCPKGITSQDPRVYRRLDPEKVAERLVDVYLAFDTELKKVFAPLGRSTSLPVGMSDALGIADRNAAERLGIRYVV

SEQ ID NO: 27528 - protein, 547 aa, Desulfovibrio vulgaris subsp. vulgaris str. Hildenborough
MNAATLFVRCLEAEGVDHIFGIPGEENLAFLEALRTSSIRLVLTRHEQAAGFMAATYGRLTGRPGVCLSTLGPGATNLVTAVAYARLGGMPLIVITGQKPIKHSKQGRFQILDVVRMMEPITKSTRQVASGSAIPSLVREAFRLAAKEKPGPVHIELPEDIAAEEVATTPHTPSLVRPAQADPELVGEAARRIRKAKRPLLLMAAGANRHDVCGHLRRFIDTTGMFFFSTQMGKGAVDQRHPRSLGTAALSDHDYLHCAIERADCIVNVGHDVVEKPPFFMHRDDGRTVIHVNVFPAQVDDVYFPQLEVVGDIGESLQLMADIVGRCPGADDDYLRRIKEHIDAHVYATGLTNSFPPTPQSIVSEVREAMPENGVLALDNGMYKLWFARNYRAYAPNTLLLDNALATMGAGLPSALAVALLRPGTPVAALCGDGGFMMNSQELETAVRLGVDLTVMVLRDDGYGMIKWKQAGMELPVHGLDFGNPDFVRYAESYGATGHRVSAPDGLRQTLRRCLATPGVHLIEVPVDYSENEKVFIEELRSKTCLL

SEQ ID NO: 27529 - protein, 135 aa, Sulfolobus acidocaldarius
MGIQMSIQYTTVGDLKVGSYVMIDGEPCRVVEITKAKTGKHGSAKANVVAIGLFTGQKRSLMAPVDQQVEVPIIEKHVGQILADKGDNLTIMDLESYETFDLEKPTENEIVSKIRPGAEIEYWSVMGRRKIVRVK

SEQ ID NO: 27530 - protein, 96 aa, Arabidopsis thaliana
MDSKSFVLLLLLFCFLFLHDASDLTQAHAHVQGLSNRKMMMMKMESEWVGANGEAEKAKTKGLGLHEELRTVPSGPDPLHHHVNPPRQPRNNFQLP

SEQ ID NO: 27531 - protein, 233 aa, Rhodobacter sphaeroides f. sp. denitrificans
MNKLDESLLTKLPPFSRLDRPQIRTILDQAVPRRYDEGTTVFGEGMEAERFYLLLDGTIRVVRTTPTGEQIIALHIGPGQLFGIAPALARDTYPATAVAAADCVTLSWPVRLWPTFTANYPGFATESYRTLGARLGEMQSRITELATQQVEQRVAACLLRLVNQSGRKVETGIEISFPITRQNISEMTGTTLHTVSRLLSAWERAGIVESARRRIVVTAPHRLVVLSGASGQA

SEQ ID NO: 27532 - protein, 293 aa, Emericella nidulans
MPPDPDRRRSSNRMAIPYATGLPADNQPLPSFRELLPPHLHEEIESTSYFNSQHNSRQPRERPASSHELGLNSVPREHASSRSSRPSPVLPPIRDLQSYPDRATGVYPDPRGLPPPPEITARPVGPHGYPHAAPAVPGPLADRNADAYRGVPPMHGQVRYHYPSMAYQSDPDHASVPSLSHAPQSNFGILGDSTDARNRRRRGNLPKPVTEILKAWFHAHLDHPYPSEEDKQMLMSRTGLTINQISNWFINARRRHLPALRNQRRTGGSDLDERQSLSDMEQTSPEPSPHRRL

SEQ ID NO: 27533 - protein, 318 aa, Listeria monocytogenes str. 4b F2365
MTASVFVAGKLLPETMEALSKWDVKAFSGEENITEAELIKNVTEVDAIICPLSSPISAKVLESAKNLKIVANIGAGFDNIDVKKAQELGIAVTNTPDVSTEATAELTLGLILDVARRISEGDRLCRETPEQFKGWAPTFFLGTELSGKTLGIIGLGRIGQAVAKRAAAFGMKIIYSGHHPKEAAKEWNAEFVSQEELLKRSDVVTIHAAYSPSLKYLLNETTLKTMKSSAFLINAARGPVVEEAALIKALETGVIAGAALDVFEFEPKIGEDLAKLDNVVLTPHIGNATVETRTAMGKIAIANVEAVLAGKAPLHSVY

SEQ ID NO: 27534 - protein, 588 aa, Listeria monocytogenes str. 4b F2365
MNIKGCEKMESMKWIWQYVRKYRLLMIGVFILIFIASGISIIYPLLGGKVIDDVVYQNKTNLLIPLLLIMIISTIIRTICRYTYQIMCERIGQNSLFRIREDLYKKLQSLDFDFFNNTRVGDIMARMTGDTDAIRHFVSWVSYNILENVFLFSFAIIIMAAIDWKLTLALVIVTPLIAILTMKMSSKAQPVFYEIRESFSRLNSMVEENISGNRVVKAFAREDFEMKKFHEHNEDFKKRNLDSADVSRTYLPVLDSLAGMLVVITLIFGGYLVIKGQMTLGDLVAFNGFLWMLNGPMRMSGWLINDVQRFIASSFKIQDMMATDAKIPIHAEKPAPSLQGHVEFKNVSFHFEDDPNTDVLKNISLKASPGQTIAILGETGAGKSTLVNLICRFYDPTSGEILIDGVDARKWHVRELRNHIATVMQDIFLFSDTIEGNIAFGAPDATMEDVRRMARIADADHFIETMPESYDTIVGERGVGLSGGQKQRISLARALLKNPSILILDDTTSAVDMETEVKIQGELKKITENTTTFIIAHRISSVKEADEILILNHGEIIERGTHSSLLAEKGYYFDIYNKQLGTEANVNG

SEQ ID NO: 27535 - protein, 691 aa, Listeria monocytogenes str. 4b F2365
MNRFFRNAIFYVIIFLVIIGIVASFNSNKEAAKDISYSEFVSKLEDGKVKSVEIQPDRSVYTINGEFKSSDKSSDDKKTGLGQSKTSSTAFTTYALNSDTSLGDLQKTLDKEDVKTTIVPAKQNSGWVTFLTSIVPFVIIFILFFFLMSQSQGGGGGKVMSFGKSKAKLYNDDKKKVRFTDVAGADEEKQELVEVVEFLKDPRKFADLGARIPKGVLLVGPPGTGKTLLARAVAGEAGVPFFSISGSDFVEMFVGVGASRVRDLFENAKKNAPCIIFIDEIDAVGRQRGAGMGGGHDEREQTLNQLLVEMDGFGGNEGIIIIAATNRADVLDPALLRPGRFDRQIMVDRPDVKGREAVLRVHARNKPLAKSVDLKAIAQRTPGFSGADLENLLNEAALVAARSDKKEIDMSDLDEASDRVIAGPAKKNRVISEKERRTVAYHEGGHVIVGMVLDEAEVVHKVTIVPRGQAGGYAVMLPKEDRFLMTKAELMDRITGLLGGRVAEEVTFGEVTTGASNDFERATELARRMVTEWGMSDKIGPLQFTSGNGQVFMGRDFGSDKGYSDKIAYEIDTEVQSLIRYCYDRAKTIITEHQEQHKLIAETLLKVETLDARQIRSLFDDGVMPPDIDTIDVEAEYPSEKDEEVAGKSFEEEKEELKEEEKIEEPKEEPKEVTSEDAPNIEQTPNDKKDE

SEQ ID NO: 27536 - protein, 216 aa, Listeria monocytogenes str. 4b F2365
MHLDSANLEDVKKIQASSIFKGITTNPTILVKEKCNRQTAINRILELTDKQVFVQTVGFSYEEILADARMLLAMFGKEKIAIKIPAHEAGINVIDTLKKEDKTIQILGTAIYSADQAIAAALAGADFVAPYVNRMSAANIDPFKEIAGMRHFFDKKALKTQIMAASFKHSGQVMQAYESGADTVTIPYEIYLQMTNKVLAVEAIRVFNKDATLYEK

SEQ ID NO: 27537 - protein, 200 aa, Listeria monocytogenes str. 4b F2365
MDKQAILDNIHQTWQEEANAISRLPEVTSEEALVKTVEKIAECTGKIVVAGCGTSGVAAKKLVHSFNCIERPAVFLTPSDAVHGTLGVLQKEDILILISKGGNTGELLNLIPACKTKGSTLIGVTENPDSVIAKEADIFFPVSVSKEPDPFNMLATASTMAVIASFDAVIVCLMTYMNYTKEQFSVIHPGGAVGNKLLNK

SEQ ID NO: 27538 - protein, 311 aa, Listeria monocytogenes str. 4b F2365
MAGKMKLFSVTSERPLATKIADYLDIPLCEVELQKFSDGEVKINIEESIRGTNAYVVQSMNSNVNERLMELLIMVDALKRASVHSINIIMPYYGYARQDRKARSREPITAKLMANLIQRAGADRLITVDLHAAQIQGFFNIPIDHLSAIPLIGDYLIENYGEKDVVVVAPDHSGVVRARRIADRLNAPIAILNRKPRPHEDEIMSVIGDVKGKVAIVVDDIIDTGVRATTSADILLEKGAVEVIACATHSVMAGNATERLQNSNIKEVITSDSIDLPEDKQFDKLTTISIGRILGRAIEGVQENRSLHPLF

SEQ ID NO: 27539 - protein, 553 aa, Listeria monocytogenes str. 4b F2365
MFKHILLSLNGYKISYLRNDVISGVGVAALTIPVAMGYAQVAGLPPIYGLYASFLPVIAYVIFASSPQLVFGIDATASAITGSIILGTAGLAAGSKEAIALAPILAFFCAIFLVLFSVLKLGRFAKYISAPVLSGFISGLSVSIIMGQIPKIMGLKESGDSFFSSLGIIFGQFFQSNWISFAMGVVTVIIVITCKKVIPKIPMSLVVLVLGTMAAYFFKLDQYNVDIVGKIPVGFPSLALPDFGASSWALAIGGGLVCAIATFAGSLLPSESFAMRNKYTIDDNRELFAYGISNFVAAFSGCSPASASVSRTAANEQFRGKTQMVSIVAATIIALIVAFLSGLLYYMPQPVLSGIVFAALVGIIDVDVLKGLFKVSRREATVWIVAALGTLLVGVIFGVLLGIFLSFINVVSRSMKSPIAILGVIEGRHGYFDLKRKPEAKPIPNVVIYRYSASLFFGNFNKFADGLKEAVQDDTKLVIFEASAIINIDTTATESMKDLLKWLDDKGIEYYFADLIDHLKTSFRKHDLGYIIDNGYTKKTVEDALEAYYAEHK

SEQ ID NO: 27540 - protein, 605 aa, Listeria monocytogenes str. 4b F2365
MSGPGPGGGMRMQTTAKPKNFKQTLFRLLGYMKPRSVAIIVVFIFAILSTIFNIFSPKELGKATTEIFKGVMSPAGIDNDKIFNILMIVLVLYLGSSLFSFIQQYVMSSVAQRTVYDMRKDLKAKMARLPLKYYDTRSNGDILSRSVNDMDNIANTLQQSLTQAITAIVQMIGVLIMMLTISWQMTLIVLVTVPISIILVAIIAGRSQRYFGAQQRNLGILNDTVEETYGGQTIIKAFGQEKKTLVKFDEVNEDYFKAAKKAQFISGIMMPVMQFVGNLGYVGVCVAGGIFVTNGTLQVGDIQSFTQYVQLFTQPISSVANIANIIQSTIASAERVFEMMDEEEEKDEIPANVNQVAGEEHSIVFDHVKFGYTPDKPLMTDLNIHVEEGQMVAIVGPTGAGKTTIINLLMRFYDVDGGQIRMKGIDTRDMTKDAVREKFGMVLQDTWLFNGTIADNIAYGREGATKEEVIGAAKAAYADDFIRRLPNGYDTVLNEEGSNISQGQKQLLTIARAILSDPSILILDEATSSVDTRTELNIQLAMGNLMEGRTSFVIAHRLSTIRDADLILVMNHGSVIEQGTHQELLDAKGFYADLYNSQFTGAQAV

SEQ ID NO: 27541 - protein, 463 aa, Listeria monocytogenes str. 4b F2365
MNSLFRRKPIEDLMHNKSGSTHLKQTLGPLDLTLLGVGAIVGTGIFILPGTVAAKNAGPAIIFSFVIAAIVCAIAAMCYSEFASSVPVAGSAYTYGYVVFGELIGWLLGWALILEYGLAVASVASGWSSYLNALLSGFHISIPEAISGPFNPEVGTFINLPAIIIVLVIAFLLTLGIKESTRVNTIMVVIKVGVILLFLVVGVFYVKPDNWQPFMPFGISGVMNGAALVFFAYLGFDAVSSAAEEVKDPQRTMPIGIIGSLLICTVLYVAVSAVLTGMVPYTDLNVTDPVAYALQVINQDWVAGIVSLGAVVGMITVILVMSYGATRLIFAMGRDGLLPKVLAEINQKYQTPVKNTWIFAVIVAIISGLVPLDRLAELVNIGTLLAFMMVSIGIIFLRKNKDIQARGFKVPFYPVLPIVSFLLCAFLISRLSVHTWILCGIWFVIGLIVYFAYGRKHSELLKK

SEQ ID NO: 27542 - protein, 458 aa, Listeria monocytogenes str. 4b F2365
MEEQKEELQRGLKNRHIQLIAIGGAIGTGLFLGAGKSIHLAGPSIMLVYLIIGAILFFVMRALGELLIHNPTTGSFTEFAEQFIGPWAGFITGWTYWFCWIVTGIAEITAVGMYVKFWVPDLPQWIPALACVLILLLFNLATVKAFGEIEFWFAIIKVVVIIALIVIGFVLVFIGYKHGTSTASFSNLVDYGGFFPNGIAGFLLAFQMATFSFVGIELVGVTAGEADDPERTLPKAINNIPIRILIFYIGALLVLMSIYPWSNIDPNTSPFVSVFTMIGIPAAAGIINFVVLTAAMSSCNSGIFSTSRMLYTLSAEGKAPKKMHHLSSNGVPATALITSTACLLIGVFLNYFLPEQVFILVTSIATICFIWVWGVILVAHLRFRHKHPEIAEKSKFKMPLSPLMNWVSLIFFGGLLVILGFAADTRIALFVTPVWFLILGIAYQVLKASNRKTKIRHN

SEQ ID NO: 27543 - protein, 545 aa, Listeria monocytogenes str. 4b F2365
MELAFPVAVNHVIDTLLPGKDFGLIITAALALLFFYILNTFMQYIVTYFGHMLGLNIETDMRRDLFSHLQKQPFGFYDNQKTGKLMSRMTTDLFEIGEVAHHGPEDIFISIMSLFGAFFLMLNINVKLAISTFILVPILTVLIVYFNKRMTKVTTGIFKDLGNFNAGVENAISGVRVVQAFANEPHEKGRFRVLNQAYRQSKLMFYKVMGLSFSFNYFLMRLISLFALLFGAYFTINGEISYGEFVGFILLTNVFIRPIEKINNVIESYPKGFAGFKRFLEVMDTEPAIQDEKDAKPAKAFRGDIAYNHVSFEYSDGKNVLNHINLSIKAGETVAFVGPSGAGKTTICNLLPRFYDVSAGEITIDGENIKRFTLPSLRAQIGVVQQDVFLFSGTVRENIAYGKLDASDEEIEHVVKLAHLSKVVEEMPDGLDTIIGERGVKLSGGQKQRLAIARMFLKNPPILILDEATSALDTETEQVIQASLEELAEGRTTLIIAHRLATIKHADRIIVVNETGIAETGTHNELLAQDNGAYKRLYDAQFNTI

SEQ ID NO: 27544 - protein, 270 aa, Listeria monocytogenes str. 4b F2365
MGYYSPQEVTEITIEKGTQKANSSTLTLVLLGFLGGAFISLGYLLYIRAVGTMPHEWGSFATLIGASLFPVGLVCILLGGGELITGNMMAVAIAWYDKKISFQQLLRNWAIVSVMNLVGAFFVAYFFGHFVGLTEGDFLPKTLATAGAKINDPFWVAFVSGIGCNWFVGIAVWLCYAAKDFAGKILGIWFPVMAFVAIGFQHVVANMFIIPAAIFAGYYSWADFIWNIIPVYLGNVVGGAVFVSLFYFLAYKKNAPKKVKEEIHQPIEES

SEQ ID NO: 27545 - protein, 286 aa, Listeria monocytogenes str. 4b F2365
MEKIGFVGTGVMGSSMAGHLLEAGYEVLVYTRTKTKAEDLLEKGALWIKTPGELANKVDILISMVGYPKDVEELYLGENGFLENLAVGTVAIDMTTSSPALAKKMAEFGREKGIGVLDAPVSGGDIGAKNGTLAIMVGGSEDVFLKVKPIFDILGSSVILQGDAGAGQHTKMVNQIAIASNMIGVTEAIIYAEAAGLNPSSVLDSISGGAAGSWSLANLIPRVLKDDFSPGFFIKHFIKDMGIAISEAKQMGLELPGLTLAEKMYQTLAEQGLSEEGTQALIKYYR

SEQ ID NO: 27546 - protein, 381 aa, Listeria monocytogenes str. 4b F2365
MTKSIRPELRDIQVSGIRTFNTRVTGIPDMIRLTLGEPDFPTPEHVKQAAISAIEENFTNYTPNAGMPELLEAASTYFHEKYDLSYNNKEIIVTVGATEAISVALQTILEPGDEVILPDPIYPGYEPLITLNRAHPVKVDTTETNFKLTPEQLRAHITPKTKALIIPYPSNPTGVTLSKKELFALAEVLKETGIFVIADEIYSELTYHEEHVSIAPLLREQTIVINGLSKSHAMIGWRIGFLLAPEALTQEMLKIHQYSVTCASSISQKAALEALTNGKDDAFQMRTEYKTRANFTQDRLEKMGFTVIPPDGAFYFFVKLPDEITENAFDWAVKLAEEAKVAVVPGNAFSEKGDRYFRLSYATSFNNLAEALDRMAQFIAK

SEQ ID NO: 27547 - protein, 397 aa, Listeria monocytogenes str. 4b F2365
MHKIMAINAGSSSLKFQIFTMPGEEVLVKGLIERIGLPDAIFNMSFQNEKIKEIRAINNHGEAVEILLEQLKAHQVINDLSEITGVGHRVAHGGEDFVTSCVVTDEVVKGIEAVTNLAPLHNPANIIGIKTFRELLPNAVSVAVFDTAFHQTIPEENFLYALPYELYEKHHIRKYGFHGTSHKYVAGKAAEVLEKPLEKLKIISCHLGNGASVCAIEAGKSVNTSMGFTPNAGLMMGTRSGTIDATIIPYLVDELGYSLDEVMHMMSSESGVLGVSGISSDFRDIEIAAKEGNSRALLTLRMFTGQICNYIGAYASAMNGCDALLFTAGVGENSPLIRQMVTEQLSYLGVTCHVTKNNAGDMIISNDDEAVKVCIIPTNEELMIARDVEKYAKQTIS

SEQ ID NO: 27548 - protein, 404 aa, Listeria monocytogenes str. 4b F2365
MGLVVLKFGGTSVSTVDKIGKTADQAIYEKKQGNKVIVVVSAMGKSTDKLVAMAEEISEAPDKREMDMLLSTGEQITIALLAMTLKEKGHDAISYTGWQAGIETEAVHSNARIADIDSARIESALDAGQIVVVAGFQGFTTDGEITTLGRGGSDTTAVAIASALNAVKCAICTDVVGVFTTDPRYVKKAQKLEQITYDEMLELANLGAGVLHPRSVEYAKNFRIPLEVRASHEQVPGTMIEEDLTMENTKVVRGIAFEDQITRVTIHWKQKEAMRVSKVFTKLAENNIDVDIIIQGITGLGHGNLSFTIKTSALLATLAVLEESKELLQIEKLESEQDLAKVSIVGSGMVSNPGVAAQMFEALTENNIPIKMISTSEIKVSTVVPARKMVEAAQVLHDQFELDK

SEQ ID NO: 27549 - protein, 355 aa, Listeria monocytogenes str. 4b F2365
MSFDVLTINPGSTSTKLAVYQGDKVLFEETVRHTMQELADFNNVQEQFDFRWQVLRRVMDAHGYDVKKLQAVVGRGGLLRPVAGGTYMVTEKMIDDLKENKYGEHASNLGALLAKKLADELTIPSFIVDPVVVDEMQEIARISGNAFIARKSIFHALNHKAAGRKIAKELGKDYEKMNFVIAHLGGGISVAAHRQGKAVDVNNALDGDGPFSPERSGSLPMNDFLEACFSGKWTKRELHELIVGRGGMISYLGTNSMLEVEAKVQAGDVKAIEAFDAMAYQVSKEIGACSVVLQGKVDAIILTGGLARSELFTNKIIEQTNWITSVIIEPGEDELEALNSGVQRVLAGLEKEKEY

SEQ ID NO: 27550 - protein, 389 aa, Listeria monocytogenes str. 4b F2365
MKEVVIIDAVRTPIGKFGGSLKDISAVDLGATALKGVLERANIAPERVDQVIFGNVLQAGLGQNVARQIAIKAGIPYKVPGVTINEVCGSGLKSVMLGRQAIQLGEADIVAVGGTENMSQAPLLLNPELAGEEIDPKKLRNSMLIDGLTDVYGEYHMGITAENVAEKFSVTREEQDEFAHNSQMKAANAQEKNLFEEEIIPVKLPDGSFFEADETIRANSTLEKLATLKSVFKEGGTVTAGNASGINDGASAIILMSKEKAVAENIPYIATIKVTSEVGVDPALMGYAPYYAVNEALTKGGYSIDDIDLFHLNEAFASQSVAVARDLKIPEEKLNIYGGAIALGHPIGASGARIIASLLNELKHENKHIGVASLCVGGGIGIAIILEKA

SEQ ID NO: 27551 - protein, 403 aa, Listeria monocytogenes str. 4b F2365
MKIIVQKFGGTSVQNEKSRLMAFNHIKQVLKEGYKVVVVVSAIGRYGDPYATDTLLELIGAKNTKLTAREQDTLLSVGETISASVFTNMLKEANIKAEAFSGGQAGIITSDDHLNAKITEVDTARLKDALTNLDVAVVAGFQGITANGDISTLGRGGSDTSAAALGVSLQADYIDIFTDVDGMMTADPRIVEHARSLPRVSYNEVSNMAYQGAKVIHPRAVEIAMTAKIPMRIRSTYLESTGTLVTSLTNDSDHFDVKERIVTGVAHVTNLTQISVQTDTVKAQQLAFKILADAGISLDFINISTNSVIFTVPEEKSHVVKQLLEDADLQTTVRQACAKVSIVGAGITGVPGVTAKIVGALSEKNIPILQSADSHTTIWVLVKEEDLISAVNALHDVFCLEIK

SEQ ID NO: 27552 - protein, 382 aa, Listeria monocytogenes str. 4b F2365
MENRIYLDHAATSPIHPEVIQTMLGAITNTYGNPSSIHYAGREARKALDEARHTIADSIHAIEKEIIFTSGGTEGDNLAIIGAALAQQESGKHIITSQIEHHAVLKTCEYLETQGFEVTYLPVDEHGIVSIESLQEALRPDTILVSIMYGNNEIGTIQPIAEIGAVLRNHQAIFHTDAVQAYGLLNINVTELGVDLLTTSSHKINGPRGVGFLYVKNGTRLIYQMHGGEQERKRRAGTENLAGICGFSAASSIMMNERELKNEEYISFKKRMAEIWRSADLDFEVNGLEANTLPHVFSVRFPGVSIEQLLMNLDMDGIAVSSGSACTAGTVDPSHVLVALFGENHPAIQETVRISFGLGNHLEEVEMAATKISEVVTRLMKI

SEQ ID NO: 27553 - protein, 370 aa, Listeria monocytogenes str. 4b F2365
MLVGVPKEIKNNENRVAMTPASVFSYVNAGHTVYVEKDAGIGSNYQDADFVQAGAKIVETAKEAWDVDMVVKVKEPIASEYTYFKEGLLLFTYLHLANEPTLAKALMESKVNSVAYETVELADHTLPLLSPMSEVAGRMAAQIGAQFLQRTNGGMGVLLGGVPGVEKSEVVIIGGGIAGTNAAKIAAGLGANVTILDMNLKRLRELDDIFGNQVQTLMSNDFNIETAVKKADLVIGAVLIPGAKAPKLVKEHVIKQMIPGSVLVDIAIDQGGIFETTDHVSTHDNPTYEKYGVLHYAVANMPGAVPRTSTLALTNATLPFGLKLANQGLEAAVQNDPFLLRGLNTYQGHITYKAVADSLDLPYTDSKELI

SEQ ID NO: 27554 - protein, 397 aa, Listeria monocytogenes str. 4b F2365
MEKTIAINAGSSSLKFQLYDMPSERVITAGIVERIGLKDSIFTITVDGEKIKEIIDIPDHEIAVQMLLEKLINHKVIGSYDEITGIGHRVVHGGERFPESVYIDDQVIKDIEALSELAPLHNPANVTGIKAFRKILPDVVSVAVFDTAFHQTMPPASYLYSLPYSYYEDYGIRKYGFHGTSHKYVSERAAELLGRPVEELRLLTCHLGNGASIAAIEGGKSMDTSMGFTPLAGVSMGTRSGNIDPALIPFIMEKTGKTAEQVLDVLNKESGMLGVSGISSDLRDLEDEAAKGNDRAELALQVFVDRIHKYIGSYAARMNGVDAIIFTAGIGENSSYIREKVLRGLEFMGVYWDPALNQVRGEERFLNYPHSPVKVIIIPTNEELMIARDVETIKNNH

SEQ ID NO: 27555 - protein, 379 aa, Listeria monocytogenes str. 4b F2365
MIYFDNSATTKPNAAVLETYTKVASNYFANPSSLHRFGAKSKELLDASRKQIAAMVSALPEEIIFTSGGTEGNNLAIKGLVYSYQNRGKHIVTSSIEHPSVRMVMEELEQEGFTVTYLPVDKNGVIKMEALKAALTDETILVSIMGVNNEVGSIQPLHEIGEMLKLLEHTFFHVDFVQGIGKIPLALNENAIDLLTFSGHKFHALRGTGILFKRKNVHLHSEILGGGQEMGYRSGTENLAGNVALAKALRLTLENEPRKEALIEIRDYLLTEIAQMSDMTVHTKQSVAAPHIVCFSAKGHRGEILVHALEKEDIYISTTSACSSKQKLASSTLKAMGVTDEEATGAVRVSLSYENRLSEAKIFIQKLQEIIENLNKVVK

SEQ ID NO: 27556 - protein, 621 aa, Listeria monocytogenes str. 4b F2365
MCGFVGCVHDRITEITGADKETFRQMNSMITHRGPDDEGYFTDDHVQFGFRRLSIIDVENGHQPLTYENERYWIIFNGEVYNYVELREQLVAEGMTFETESDTEVIIATYAKYKEKTAERLRGMFGFVIWDKQEELVYGARDPFGIKPFFYAEEDGKLFMGSEKKSILHALKEKELDEVSLQNYMTYQFVPEPDSLTKNVKRLEPGHQFTKKIGQPMEITTYWKASFAPVTKSEDAWIKEVRDVMYDSVKMHMRSDVPVGSFLSGGIDSSIIAAIAKEYHPAIKTFSVGFERDGFSEIDVAKETADKLGVENISYVISPEEYMKELPKIVWHMDDPLADPAAIPLYFLSREARKQVTVALSGEGADELFGGYNIYNEPNSLAMFNKMPSVFKSMLNSVARIMPEGMRGKSFLERGTTPMEERYIGNAKMFTEKEKQILLPKYQAGHDYTNITDPFYAETTNYHPVERMQYIDIHTWLRGDILLKADRMTMANSLEVRVPFLDKEVYNVARNIPDTMKTTNGTTKYILRKAAATFVPEHVLNRRKLGFPVPIRHWLKDEMNAWVKNIIKESPTDHLINKQYVLGLLDDHCAGKFDYSRKIWTVVIFMIWYDVYVADKYDFGK

SEQ ID NO: 27557 - protein, 367 aa, Listeria monocytogenes str. 4b F2365
MNKELIVRGAPQEYLCQVGAWDTLPTHLERRGLKNVLVVRGNASWEVAKKKFPVLSTVTSTFEVYNGGSTYEERDRLVAIMETNKMDAIIAVGGGKIADVCKATAAVLRLPVIILPTLASTCAAYTPLSVMYDEEGAMIRYDVFASSNALLLIDSEMILDSPKELLVAGIGDTLAKWYEADVIINSLPTKSVEIEIAHFAAKMCRDNLLQYSEEALAAMDKQVLNEGFVKIIETNILVGGMVGGFGDDYGRCAGAHSIHDALTMVPETHHLLHGNKVAYGILVQLVIENRWDEIERLLPFYSELGLPMSLYDMGLATLAEETLVAVSKRATEPHETIHMMPGEMTADVVLNAMKQLEDSMAMKRVAK

SEQ ID NO: 27558 - protein, 393 aa, Listeria monocytogenes str. 4b F2365
MDLPLSKRVKGVAPSPTLAITAKAKQMKQEGIDVIGLGAGEPDFNTPQNIIDAAIESMNKGFTKYTPSSGIIELKQAIVDKLQKDQFLNYETNQIFVGTGAKHVLYSAFQTILDPGDEVIIPVPYWVTYPEQVKLAGGIPVFVETGFDADFKISAANFEKAITKKTKAIVLNSPNNPSGMCYTKEELIAIGEVAEKHQIYILSDEIYEKLYYGNKADLVSIASLSDRLYDLTIVINGVSKAYSMTGWRIGYAAANKEIIAGMSKLADHLTSNPTANAQYAALEAYVGSQEVPEKMYKAFEERMERFYPELSSIPGFKPKKPDGAFYFFIEVKEAAHKKGFQDVDAFVAALLEEAKVAVIPGSGFGMPDYIRLSYATNPDLFQEAINRIKSFMK

SEQ ID NO: 27559 - protein, 127 aa, Listeria monocytogenes str. 4b F2365
MFRTMMNGKIHRATVTEANLNYVGSITIDSAILEAVDMLPNEKVQIVNNNNGARIETYIIPGEPGSGVICLNGAAARHVQVGDVVIIMSYGMFTAEEAKTHEPKIVVLDEKNHIEMILPEEKAHTTL

SEQ ID NO: 27560 - protein, 238 aa, Listeria monocytogenes str. 4b F2365
MSEQVRVLVVDDEDRIRRLLKMYLERENYRIEEASDGDQALSMALNNNYEVILLDLMMPGKDGIEVCRELREFKSTPVVMLTAKGEEANRVQGFEVGADDYIVKPFSPREVVLRVKAVLRRAKQSSEESAGGTPGDIITFPHLKIDNEAHRVIVDGKEIGLTPKEYDLLYYLARSPDKVFDRESLLKEVWRYEFFGDLRTIDTHVKRLREKLHDVSEDAARMIVTVWGLGYKFEVPED

SEQ ID NO: 27561 - protein, 573 aa, Listeria monocytogenes str. 4b F2365
MIDTTKTNEKATKKQNKSGAELLIDSLKKQQVEMIFGYPGGAVLPLYDAFYDCDIPHILTRHEQGAIHAAEGYARVTGKPGVVVVTSGPGATNVLTGIADAMSDSIPLVIFTGQVHTPGIGKDAFQEADMIGLTIPITKYNYQVRDVRDLPKIVNEAFHIASTGRKGPVVVDIPKDMGIIQTESVRPDTIDLPGYQPTYSPNPLQLEKLMQSLSAASKPLILAGAGVNHARATAELLEFAERYQIPIVNTLLGLGSFPQSHDLFLGMGGMHGSYAANMALTDCDLLINFGSRFDDRLASAPKEFATKATIAHIDIDPAEIGKIIETQIPIVADINETLTQLLQMELPVHPDTSHWYKLNMTRKNRHPFNFDRTKKAEIKPQRVIELIGEITQGEALVSTDVGQHQMWAAQFYPFQFDHQIITSGGLGTMGFGFPAAVGAQLAFPDKTVVAIVGDGGFQMTNQELAILNDYQINVKTVIINNGSLGMVRQWQEKFHGERYSHSIFTSQPDFVKLAEAYGVKGVRLTNPETLEKDLRKAFAHPGPIVIDVHVAKDELVLPMVPSGKPNHQMEGVE

SEQ ID NO: 27562 - protein, 565 aa, Listeria monocytogenes str. 4b F2365
MAKLEKDQEKVITQGKSGADLVVDSLINQGVTHVFGIPGAKIDKVFDVMEERGPELIVSRHEQNAAFMAAAIGRLTGKPGVVLVTSGPGASNLATGLVTATAEGDPVVAIAGNVTRQDRLKKTHQSMDNAALFRPITKYSEEVVHAESIPEAITNAFRSAAEPNQGAAFVSLPQDIVNEPNVPVKAIRPLAKPENGPASKEQVAKLVTRLKKAKLPVLLLGMRASSPEVTGAIRRLLQKTSIPVVETFQAAGVISRDLEDNFFGRVGLFRNQPGDILLNKADLVITVGYDPIEYDPKAWNASGDRTIVHLDDIRADIDHYYQPVTELVGNIALTLDRVNAKFSGLELAEKELETLKELHAQLEERDVPPESDETNRVHPLSVIQTLRSAIDDNVTVTVDVGSHYIWMARHFRSYEPRRLLFSNGMQTLGVALPWGIAATLVHPGEKVVSISGDGGFLFSAMELETAVRLRAPLVHLVWNDGSYDMVAFQQKMKYGKEAAVRFGDVDIVKFAESFGAKGLRVTKPSELSDVLKEALETEGPVVVDIPIDYRDNIKLGETLLPDQFY

SEQ ID NO: 27563 - protein, 368 aa, Listeria monocytogenes str. 4b F2365
MIYFDHAATTKMSEASLQVFMDASREFFANSESLHDAGTKSAALLEKCRESFSELLQVPNRGILFTSGGTESNQIAIQTLIHTTDKKEVLVSPLEHASVWQQLMALEQAGKCRIKALPVDSFGQVNPATLEKMISAETGLIIIQHVNSEIGTIQPIAELAHIAKKAGVFFHTDIVQSFGKIDLDLSDATSFSISSHKIYGPKGAGILFMKPDSPLQAVLPDVHHEFGFRPGTVNVPAIAAFTTAAYDIIENREQEAIRAMKLKAAICDTLEARVEVEGGPNTSPYILGLTLPNMQGQEALLALNEADIQISTTSACSLRDLAPSRTLIATGKTTEEANRFIRLSFGRENELNDSIIFKEEIDKLLRKR

SEQ ID NO: 27564 - protein, 404 aa, Listeria monocytogenes str. 4b F2365
MAKEKIVLAYSGGLDTSVAIQWLVESGYEVIACCLDVGEGKNLDFIKEKAITVGASESYTIDAKEEFAEDFALIALQAHAYYEGKYPLISALSRPLIAKKLVEVARQEGASAIAHGCTGKGNDQVRFEVAIHALAPDLKVVSPVRDWKWSREEEINYAKEHNIPVPIDLDNPFSIDQNLWGRSNECGVLENPWTTPPEAAYDLTVSLEDAPDTPDIVEITFDAGIPISLNGENMSLANLILTLNEIAGKHGVGRIDHIENRLVGIKSREVYECPAAVTLITAHKELEDLTFVREVAHFKPIIEQKISETIYNGLWFSPLTEALVAFLKSTQKFVNGTIRVKLFKGHAIVEGRKSPNSLYDENLATYTSSDTFDQDAAVGFIKLWGLPTKVSAEVNSKVTITTEV

SEQ ID NO: 27565 - protein, 507 aa, Listeria monocytogenes str. 4b F2365
MKKLTSVFWGSGCLVLLAVLFGAFLPKQFEAFTTNIQKFLTSNFGWYYLIVVAIIIIFCLFLVLSPIGSIRLGKPGEEPGYSNKSWFAMLFSAGMGIGLVFWGAAEPLSHYAVQAPGGEVGTQAAMKDALRYSFFHWGISAWSIYAIVALALAYFKFRKNAPGLISATLYPILGKHAKGPIGQLIDIIAVFATVIGVATTLGLGAQQINGGLTYLFGVPNNFTVQFTIIIIVTILFMLSAMSGLDKGIQLLSNVNIYVAGVLLVLTLILGPTLFIMNNFTNSFGDYLQNIIQMSFQTAPDAPDARKWIDSWTIFYWAWWLSWSPFVGIFIARISRGRTIRQFLLGVIVLPALVSVFWFAVFGGSAIFVEQHGNSGLSSLATEQVLFGVFNEFPAGMVLSIVAMILIAVFFITSADSATFVLGMQTTGGSLNPPNSVKVTWGLLQAGIASVLLYAGGLTALQNASIIAAFPFSIVIILMIVSLFVSLTREQEKLGLYVRPKKSQRSQL

SEQ ID NO: 27566 - protein, 325 aa, Listeria monocytogenes str. 4b F2365
MSDLFTTIKGQVTGKNVRIVLPEGTDERIVGAAARLQKENIVKPILLGNKGEIEAKAKEIGVSVEGIAIHEPATDPLFDELVAAFVERRKGKATEEAARKMLVDPNYFGTMLVYTGKAEGLVSGAAHSTGDTVRPALQIIKTKPGVSKVAGAMIMVRGEERYLFSDVAINIAPVAADLAENAIVSAETAEIFGIDPRVAMLSFSTKGSAKSDETEKVVEATALAKEKAPELTLDGEFQFDAAFVPTVAEKKAPGSVIKGDANVFIFPSLEAGNIGYKIAQRLGNFEAVGPILQGLNAPVNDLSRGCNTDDVYNLTLITAAQAVNK

SEQ ID NO: 27567 - protein, 383 aa, Listeria monocytogenes str. 4b F2365
MMNNSKIAKKHQQMPVNILADIGTLAKTMPDILDLSIGDPDLITDESIINAAFEDVRAGHTKYTESGGDVELIDAIRGYFSRNYDLSFERSQIRATVGALHGMYLTLQTILDDGDEVIIHEPYFSPYKDQVLNSGGTPIIIPTYEKDDFAINVDILEAAITDKTKALILNSPNNPTGAVFSPETFEKIANLAKKYDFFILSDEVYDGFSFYEDFVPMAKFAPDHTITFGSMSKNFAMTGWRLGYMIAPTYLNEAAKIINEGITYSAPTPSQRAAIYALNHSETLIPLVTETFQKRLEYIAKRVEEIPYLSLHPLKGSIYAFINISKTNMDSVSFTEYVLKETQVLVIPGLAFGESGDNYVRLAATQDISVLEEAFNRLAKLTF

SEQ ID NO: 27568 - protein, 453 aa, Listeria monocytogenes str. 4b F2365
MKVIKFGGSSLASGIQLNKVFQLVAEDPDRKIVVVSAPGKRFKEDTKVTDLLIDCAAKALLGEDTSELFESVIARYAGIALDTGMSDEIINQIRADLQATISSDKSDPDKFLDRMKASGEDNNAKLIAAYFKFKGLNANYINPKDAGLLVTDEHASAQVLPESYDRLFALREREGIIVFPGFFGYTKDGEISTFSRSGSDITGAIVANGAQAELYENFTDVDAVYAVNPAIVKNPKKVLELTYREMRELSYAGFSVFHDEALIPAFHAGIPVHIKNTNNPDSCGTRVVHERENNNGPVVGIASDDGFCSIYISKYLMNREIGFGRKVLQILEDAGLNYEHMPSGIDDLTIIIRENQFGEDTEQTIMSRLKEELNADQVIMQHGISLIMVVGETMRHNVGITSRASKALSDAKVNIEMINQGSSEVSIMFGVKEEQENTAVRALYNEFFSEVLV

SEQ ID NO: 27569 - protein, 463 aa, Listeria monocytogenes str. 4b F2365
MTKVNSFFRKKSFHNPATDKHHLNKTLGAFDLTMLGVGAVVGGGIFILPGQVASVIAGPGIIISFIIAGIACCLAALCYSEFASKLPVAGSAYTYSYHVFGEGVAWILGWSLILEYGLAVAAIASGWSSYMKSLLAGFDLHIPTVISSAYDPSAGTYFDLLAFVVVMVIGILLSFGIRESTRVNNIMVLVKIAVVVLFILVGAFYVKPDNWTPFLPFGVQGVITGASTVFFAYIGFDAVSSAAEEVKNPQKNMPIGIISSLAICTLLYILLSAVLTGVVPYTDLVDVSAPVAFALQAINQNWIAGLLSVGAIVGMTTVVLVMSYGGTRLLFAMGRDGLLPKSFSKISKNDTPVRNTMIFATVMGLIASTVPMADLAQLINIGTLFAFAMVSIGIFFLRRNPDLNQKGFRTPFYPVVPALSFLLCVYLMINLSKTTWIAFGIWFVIGILVYTFYGRKHSALRIK

SEQ ID NO: 27570 - protein, 459 aa, Listeria monocytogenes str. 4b F2365
MRNQSKMPLVERLDAHAKSCPISLHVPGHKSGAIYPDAWQKFLKWDVTEITGMDDLHHPEDVILEAEELLAECYGSKKSYFLVNGTSGGSLAVIMATLKHGEKVLVPRDAHKSILHGIELAGGEPIFLTPATNKEVGVASGVTTELLEETLHNHPDIKLCIFTYPSYYGTTFNLHKCIQIAHDFGAVVFVDEAHGAHFLTSSEFPKSAVELGADVVVQSAHKTLPALTMGSYLHVVNDLPIFEKLPYYLQVFQTSSPSYLIMASLDAARKYAATYTAADVEAFWKMRARWIKWLTKNKFDVILPDDPLKIIVRKTGYTGYELQAIFEESSYFPELADESQVLLILPLIKKGIDFTPISRIHSPVKKEIAKEPYEMSAPFASGLALTYEEMHARATEFVLLDEATTRVSAETISLYPPGIPAIIRGESITEKHIRELKNIRTRHYQGGEKLAENYIRVFR

SEQ ID NO: 27571 - protein, 214 aa, Listeria monocytogenes str. 4b F2365
MRFFIDTANVEEIKKANRMGFIAGVTTNPSLVAKEGRDFNEVIQEITSIVDGPISGEVVSLEADEMIAEGRVIAKIHPNMVVKIPMTGEGLAAVKVLTEEGIKTNVTLVFSATQALLAARAGATYVSPFLGRLDDIGDDGLVLIRDIADIFEIYGIPTEIISASVRHPIHVIECAKAGADIATVPFKVFEQMLKHPLTDSGIDKFLADWEAAKK

SEQ ID NO: 27572 - protein, 575 aa, Listeria monocytogenes str. 4b F2365
MDQKKYSWRKFFQLLISAKPANWIIFCALFASVITTVAGLVVPLFTKNLIDGFSIASLDVKMIALIVLAFVLQAITNGFSIFLLNYMGQKVVATIRERLWKKIVHLPVSYFDNTKTGEMVSRMVNDTVVVKELIADHFPQFVTGIISVVGAIIILFFMDWKMTLIILVAVPITALVVAPLGQKMFKISKGLQNETADFTGSISQTLSEARLVKASNAETLETEAGHQGINRLFGFGIREAKVVAVLGPLIFFVVMGVIVGIIGYGGIRVSAGTMTTGTLIAFLLYLFQIIVPVTSFATFFAQLQKAKGATERIADILNETEEDFDAGKKVDVSGKTIRASDISFSYNEGEPILKHVSFDTKPGEVIAFAGPSGGGKSTLFAILERFYQPKTGEILVGDIPLSEISINSWRTQIGYVSQESAMLSGTIRDNLCYGLDREITEDELWNVAKLAYADGFISELPDKMATEVGERGVKLSGGQRQRIAIARAFLRNPNILMLDEATASLDSQSEQIVQQALANLMEGRTTFVIAHRLSTIVNADQILFIEHGEITGRGTHSELVASHPLYASFAEQQLK

SEQ ID NO: 27573 - protein, 119 aa, Populus deltoides x Populus maximowiczii
AGDMFQAVPPAEAILLKCILHDWSDEDCVKILKRCKQAIMSEGQQKAGKVIIIDMVRENQNGDEGSIETQLIFDLAMMVVVSGVERNEKEWAKLFFDSGFLNYKIHPVPGTRAVIELYP

SEQ ID NO: 27574 - protein, 72 aa, Populus x canadensis
MSLLNDLININLSDTTEKIIAEYIWIGGSGMDLRSKARTLPGPVTDPAKLPKWNYDGSSTGQAPGEDSEVIL

SEQ ID NO: 27575 - protein, 654 aa, Photobacterium profundum SS9
MTISQFMHGIFHDSGVSMIDKKHFELIDKPTFFGALGLLISVVVPLLLFPVQGAEWLAIAKTFMTDKLGFLYLALGIAAFFFMIYIVFSDIGQIKLGDVDEKPEFATASWAAMLFCGGIGASILYWGTIEWAYYYQSPPFQLESGSEEAVRWAATYGIFHWGPIAWSIYMIPAIPIAYFFYVRKQPVLKVSAALMPIIGESRSHGKLGKFIDILFIFGLLGGAATTLGLAAPLINEGISYLFGIPSTTTTQIGVLLLCTALFAYSSYKGMDEGIKVLSNINFWGALGLLAFVLCAGPTLFMLETGLDSIGRMLSNFFVMATWAEPFGGYGTFEDTHFPQDWTIFYWAWWLVFAPSMGLFVARISRGRTIKQMVSGAIFFGSSGCALYFMILGNYGLSLQLSGQLDVVSILNEDGPTRAIFSILEQLPMSTMVIAVFTLLCIIFTATTFDSISFILASVVQNNVTEDPMRWNRLFWAFTLSFMPSVLMFMGDLATLQTAAIVGGLPLLVIAVMLMISGVKAATLDLAHQEGYSDPVINIEDFPDVDPWSKEGMAMAQFERLKDEAISAAEEEREKLNAIWVLKKEIRATALSKGESGMELGDAPQEQLDEIKRLTDEAMAAKEHKLQASEQAQEARKVFDDLMRDRQEMEVEAQV

SEQ ID NO: 27576 - protein, 168 aa, endosymbiont Suiyo-Bathy-1 of Myrina sp. HEE-2004
AFQTRNPMHRAHEELCRMAMESLDADGVVVHMLLGQLKPGDIPAPVRDAAIRTMAEVYFPPNTVMVTGYPFDMLYAGPREAVLHAYFRQNMGATHFIIGREHAGVGDYYGAFDAQTIFDDEVPAGIMDIEIFRADHTAYSKKLNKIVMMRDVPDHNKEDFVLLSGTKV

SEQ ID NO: 27577 - protein, 494 aa, Ammi majus
MKMLEQNPQYLYFFSLFLVTIFLYKWLTLKKTPLKNLPPSPPQYPIIGNLHQIGPDPQASLRDLAQKYGPLMFLKFGTVPVLVVSSADAAREALKTHDLVFADRPYSSVANKIFYNGKDMVFARYTEYWRQVKSICVTQLLSNKRVNSFHYVREEEVDLLVQNLENSHSKVANLTELLIEVTGNVVCRVSVGSGDKVDSYKILILEIMDMLGYSRSIEDFFPLLGWVDWLTGLRGKVAEAAKGVDTFLEGVLKEHLSTTGSKYNDFVSILLEIQEADAGSSMDNECIKSLIWDMLGAGTETISTALEWTLAALIKNPDAMFKLQNEVREIGKGKSKISEADLVKMNYLQAVMKESMRLYFTAPLLVPREARQDIKFMGYDISSGTQVLINAWAIARDPLLWDKPEEFRPERFLNSPIDYKGFHYEFLPFGAGRRGCPGIQFAMCINELVVANLVHKFNFELPDGKRLEDLDMTAASGITLRKKSPLLVVARPHV

SEQ ID NO: 27578 - protein, 509 aa, Ammi majus
MALFLYLIIPCTIILLHQLYHKLRFKLPPGPRPWPIVGNLYDIEPVRFRCFNNWSKTYGPIISVWFGSTLNVIVNNTELAKEVLKDKDQQLADRHRSRSAAKFSRDGQDLIWADYGPHYVKVRKVCTLELFTPKRLEAIRPVREDEVTAMVESIYKDCTNSDTIGKSLLVRQYLGGVAFNNITRLAFGKRFVNSEGVMDEQGKEFKSIIANGLKLGASLATAEHIQWLRWLFPLEEEAFAKHGARRDNLTRAIMEEHTLARQKSGGTKQHFVDALLTLQSKYDLSEDTIIGLLWDMITAGADTTAIVVEWGMAELIKNPRVQEKAQEELDRVIGYERVLTELDFSNLPYLQCVAKEALRLHPPTPLMLPHRANANVKIGGYDIPKGSNVHVNVWAVARDPAVWKNPLEFRPERFLEEDVDMKGHDYRLLPFGAGRRVCPGAQLGINLVTSMLGHLLHHYSWAPPSGLSSDEIDMSESPGMVTYMKTPLQAVPTPRLPSQLYKRLAVEDM

SEQ ID NO: 27579 - protein, 655 aa, Helianthus annuus
MAAPPNPSISFKPPSPAAALPPRSAFLPRFALPITSTTQKRHRLHISNVLSDSKSTTTTTTTTQRPLPVQPFVSRYAPDQPRKGADVLVEALEREGVTDVFAYPGGASMEIHQALTRSSTIRNVLPRHEQGGVFAAEGYARASGLPGVCIATSGPGATNLVSGLADALLDSVPMVAITGQVPRRMIGTDAFQETPIVEVTRSITKHNYLVLDVEDIPRIVREAFYLASSGRPGPVLIDVPKDIQQQLVVPKWDEPMRLPGYLSRMPKPQYDGHLEQIVRLVGEAKRPVLYVGGGCLNSDDELRRFVELTGIPVASTLMGLGAYPASSDLSLHMLGMHGTVYANYAVDKSDLLLAFGVRFDDRVTGKLEAFASRAKIVHIDIDPAEIGKNKQPHVSICGDIKVALQGLNKILEEKNSVTNLDFSTWRKELDEQKMKFPLSFKTFGEAIPPQYAIQVLDELTGGNAIISTGVGQHQMWAAQFYKYNKPRQWLTSGGLGAMGFGLPAAIGAAVARPDAVVVDIDGDGSFMMNVQELATIRVENLPVKILLLNNQHLGMVVQWEDRFYKANRAHTYLGNPSKESEIFPNMVKFAEACDIPAARVTQKADLRAAIQKMLDTPGPYLLDVIVPHQEHVLPMIPAGGGFSDVITEGDGRTKY

SEQ ID NO: 27580 - protein, 654 aa, Helianthus annuus
MAAPPNPSISFKPPSPAAALPPRSAFLPRFALPITSTTQKRHRLHISNVLSDSKSTTTTTTTQPPLQAQPFVSRYAPDQPRKGADVLVEALEREGVTDVFAYPGGASMEIHQALTRSNTIRNVLPRHEQGGVFAAEGYARASGLPGVCIATSGPGATNLVSGLADALLDSVPMVAITGQVPRRMIGTDAFQETPIVEVTRSITKHNYLVLDVEDIPRIVREAFYLASSGRPGPVLIDVPKDIQQQLVVPKWDEPMRLPGYLSRMPKPQYDGHLEQIVRLVGEAKRPVLYVGGGCLNSDDELRRFVELTGIPVASTLMGLGAYPASSDLSLHMLGMHGTVYANYAVDKSDLLLAFGVRFDDRVTGKLEAFASRAKIVHIDIDPAEIGKNKQPHVSICGDIKVALQGLNKILEEKNSVTNLDFSNWRKELDEQKVKFPLSFKTFGEAIPPQYAIQVLDELTGGNAIISTGVGQHQMWAAQFYKYNKPRQWLTSGGLGAMGFGLPAAIGAAVARPDAVVVDIDGDGSFMMNVQELATIRVENLPVKILLLNNQHLGMVVQWEDRFYKANRAHTYLGNPSKESEIFPNMLKFAEACDIPAARVTQKADLRAAIQKMLDTPGPYLLDVIVPHQEHVLPMIPAGGGFSDVITEGDGRTKY

SEQ ID NO: 27581 - protein, 658 aa, Helianthus annuus
MAAPPNPSISFKPPSPAAALPPRSAFLPRFALPITSTTQKRHRLHISNVLSDSKSTTTTTTTTTTTQPPLQAQPFVSRYAPDQPRKGADVLVEALEREGVTDVFAYPGGASMEIHQALTRSSTIRNVLPRHEQGGVFAAEGYARASGLPGVCIATSGPGATNLVSGLADALLDSVPMVAITGQVLRRMIGTDAFQETPIVEVTRSITKHNYLVLDVEDIPRIVREAFYLASSGRPGPVLIDVPKDIQQQLVVPKWDEPMRLPGYLSRMPKPQYDGHLEQIVRLVGEAKRPVLYVGGGCLNSDDELRRFVELTGIPVASTLMGLGAYPASSDLSLHMLGMHGTVYANYAVDKSDLLLAFGVRFDDRVTGKLEAFASRAKIVHIDIDPAEIGKNKQPHVSICGDIKVALQGLNKILEEKNSVTNLDFSNWRKELDEQKVKFPLSFKTFGEAIPPQYAIQVLDELTGGNAIISTGVGQHQMWAAQFYKYNKPRQWLTSGGLGAMGFGLPAAIGAAVARPDAVVVDIDGDGSFMMNVQELATIRVENLPVKILLLNNQHLGMVVQWEDRFYKANRAHTYLGNPSKESEIFPNMVKFAEACDIPAARVTQKADLRAAIQKMLDTPGPYLLDVIVPHQEHVLPMIPAGGGFSDVITEGDGRTKY

SEQ ID NO: 27582 - protein, 652 aa, Helianthus annuus
MAAPPNPSISFKPPSPAAALPPRSAFLPRFALPITSTTQKRHRLHISNVLSDSKSTTTTTQPPLQAQPFVSRYAPDQPRKGADVLVEALEREGVTDVFAYPGGASMEIHQALTRSNTIRNVLPRHEQGGVFAAEGYARASGLPGVCIATSGPGATNLVSGLADALLDSVPMVAITGQVPRRMIGTDAFQETPIVEVTRSITKHNYLVLDVEDIPRIVREAFYLASSGRPGPVLIDVPKDIQQQLVVPKWDEPMRLPGYLSRMPKPQYDGHLEQIVRLVGEAKRPVLYVGGGCLNSDDELRRFVELTGIPVASTLMGLGAYPASSDLSLHMLGMHGTVYANYAVDKSDLLLAFGVRFDDRVTGKLEAFASRAKIVHIDIDPAEIGKNKQPHVSICGDIKVALQGLNKILEEKNSVTNLDFSNWRKELDEQKVKFPLSFKTFGEAIPPQYAIQVLDELTGGNAIISTGVGQHQMWAAQFYKYNKPRQWLTSGGLGAMGFGLPAAIGAAVARPDAVVVDIDGDGSFMMNVQELATIRVENLPVKILLLNNQHLGMVVQWEDRFYKANRAHTYLGNPSKESEIFPNMVKFAEACDIPAARVTQKADLRAAIQKMLDTPGPYLLDVIVPHQEHVLPMIPAGGGFSDVITEGDGRTKY

SEQ ID NO: 27583 - protein, 652 aa, Helianthus annuus
MAAPPNPSISFKPPSPAAALPPRSAFLPRFALPITSTTQKRHRLHISNVLSDSKSTTTTTQPPLQAQPFVSRYAPDQPRKGADVLVEALEREGVTDVFAYPGGASMEIHQALTRSNTIRNVLPRHEQGGVFAAEGYARASGLPGVCIATSGPGATNLVSGLADALLDSVPMVAITGQVPRRMIGTDVFQETPIVEVTRSITKHNYLVLDVEDIPRIVREAFYLASSGRPGPVLIDVPKDIQQQLVVPKWDEPMRLPGYLSRMPKPQYDGHLEQIVRLVGEAKRPVLYVGGGCLNSDDELRRFVELTGIPVASTLMGLGAYPASSDLSLHMLGMHGTVYANYAVDKSDLLLAFGVRFDDRVTGKLEAFASRAKIVHIDIDPAEIGKNKQPHVSICGDIKVALQGLNKILEEKNSVTNLDFSNWRKELDEQKVKFPLSFKTFGEAIPPQHAIQVLDELTGGNAIISTGVGQHQMWAAQFYKYNKPRQWLTSGGLGAMGFGLPAAIGAAVARPDAVVVDIDGDGSFMMNVQELATIRVENLPVKILLLNNQHLGMVVQWEDRFYKANRAHTYLGNPSKESEIFPNMVKFAEACDIPAARVTQKADLRAAIQKMLDTPGPYLLDVIVPHQEHVLPMIPAGGGFSDVITEGDGRTKY

SEQ ID NO: 27584 - protein, 646 aa, Helianthus annuus
MAAIHPPHPSITAKPPPSSAAAVALPPHFAFSITSTSHKRHRLHISNVLSDSTTTTGATTIHPPPFVSRYAPDQPRKGADVLVEALEREGVTDVFAYPGGASMEIHQALTRSNTIRNVLPRHEQGGVFAAEGYARASGVPGVCIATSGPGATNLVSGLADALLDSVPMVAITGQVPRRMIGTDAFQETPIVEVTRSITKHNYLVLDVEDIPRIVREAFYLASSGRPGPVLIDVPKDIQQQLVVPKWDEPMRLPGYLSRMPKPQYDGHLEQIVRLVGEAKRPVLYVGGGCLNSDDELRRFVELTGIPVASTLMGLGAYPASSDLSLHMLGMHGTVYANYAVDKSDLLLAFGVRFDDRVTGKLEAFASRAKIVHIDIDPAEIGKNKQPHVSICGDIKVALQGLNKILEEKNSLDFSNWRKELDEQKVKFPLSFKTFGEAIPPQYAIHVLDELTGGNAIISTGVGQHQMWAAQFYKYNKPRQWLTSGGLGAMGFGLPAAIGAAVARPDAVVVDIDGDGSFMMNVQELATIRVENLPVKILLLNNQHLGMVVQWEDRFYKANRAHTYLGNPSKESEIFPNMLKFAEACDIPAARVTRKGDLRAAIQKMLDTPGPYLLDVIVPHQEHVLPMIPAGGGFSDVITEGDGRMKY

SEQ ID NO: 27585 - protein, 648 aa, Helianthus annuus
MAAIHPPHPSITAKPPPSSAAAVALPPHFAFSITSTSHKRHRLHISNVLSDSTTTTGATTATIHPPPFVSRYAPDQPRKGADVLVEALEREGVTDVFAYPGGASMEIHQALTRSNTIRNVLPRHEQGGVFAAEGYARASGVPGVCIATSGPGATNLVSGLADALLDSVPMVAITGQVPRRMIGTDAFQETPIVEVTRSITKHNYLVLDVEDIPRIVREAFYLASSGRPGPVLIDVPKDIQQQLVVPKWDEPMRLPGYLSRMPKPQYDGHLEQIVRLVGEAKRPVLYVGGGCLNSDDELRRFVELTGIPVASTLMGLGAYPASSDLSLHMLGMHGTVYANYAVDKSDLLLAFGVRFDDRVTGKLEAFASRAKIVHIDIDPAEIGKNKQPHVSICGDIKVALQGLNKILEEKNSLDFSNWRKELDEQKVKFPLSFKTFGEAIPPQYAIHVLDELTGGNAIISTGVGQHQMWAAQFYKYNKPRQWLTSGGLGAMGFGLPAAIGAAVARPDAVVVDIDGDGSFMMNVQELATIRVENLPVKILLLNNQHLGMVVQWEDRFYKANRAHTYLGNPSKESEIFPNMLKFAEACDIPAARVTRKGDLRAAIQKMLDTPGPYLLDVIVPHQEHVLPMIPAGGGFSDVITEGDGRMKY

SEQ ID NO: 27586 - protein, 224 aa, Aristida purpurea var. longiseta
IENKISRQVTFAKRRNGLLKKAYELSLLCDAEVALIIFSGRGRLFEFSSSSCMYKTLERYRSCNYNPQEAKAPQESEINYQEYLKLKTRVEFLQTTQRNILGEDLGPLSMKELVQLENQIEISLKQIRSRKNQMLLDQHYDLKNKEQKLQDLNKDLRKKLQETSGENALHISWEEGGHSGASGNAIEPNQGFLQHPENDSSLQIGYHQQAYMDQLSNEDMGAHH

SEQ ID NO: 27587 - protein, 238 aa, Avena sativa
IENKISRQVTFAKRRNGLLKKAYELSLLCDAEDALIIFSGRGRLFEFSSSSCMYKTLERYRTCNYNSQEAAPLVENEINYREYLKLKTRVEFLQSSQRNILGEDLGPLSMKELDQIESQIDVSLKHIRSRKNQVLLDQLFDLKSKEQELQDQNKDLRKKLQEMSCGENAVHMSWQDGGGQSSSSGQAVDPYPGPLQHPEHDSSMQIGYHQTYMEQLBNEDHTASHHPNAQPGSSAGWI

SEQ ID NO: 27588 - protein, 222 aa, Chasmanthium latifolium
IENKISRQVTFAKRRNGLLKKAYELSLLCDAEVALIIFSGRGRLFEFSSSSCMYKTLERYRSSNYNSQEVKAPLDSEINYQEYLKLRTRVEFLQTTQRNILGEDLGPLSMKELEQLENQIEISLKHIRTRKSQVLLDQLFDLKTKEQELEDISKGLRKKLHETSGENALHISWEEGGHSGASGNAVEPYQGFQQHRENESSLQIGYRQQAYMEQLNNEDMED

SEQ ID NO: 27589 - protein, 225 aa, Danthonia spicata
IENKISRQVTFAKRRNGLLKKAYELSLLCDAEVALIIFSGRGRLFEFSSSSCMYKTLERYRTCNFNSQEAKAPLDSEINYQEYLKLKTRVEFLQTTQRNILGEDLGPLSSKELEQLENQIEISLKHIRTRKNQALLDQLFDLKSKEQELQDLNKDLRKKLQETSGENAVHISWEEGGHSGASGNAMEPSQGFLQHPENDSDLHMGYHQQAYMDHLNNEDMAAPHH

SEQ ID NO: 27590 - protein, 225 aa, Ehrharta erecta
IENKISRQVTFAKRRNGLLKKAYELSLLCDAEVALIIFSGRGRLFEFSSSSCMYKTLERYRSCNYNSQEAAPENEINYQEYLKLKTRVEFLRTTQRNILGEDLGPLSMKELEQLENQIVVSLKQIRDKKNQALLDQLFELKSKEQELRDLNKDLRKKLQETTGDNVLHMSWQDGGGQHSGSSGLTAEHHQGLLHHQDQGNHSLQIGYHQAYMDHLNNEAEMAGHN

SEQ ID NO: 27591 - protein, 229 aa, Eleusine coracana
LENKISRQVTFAKRRNGLLKKAYELSLLCDAEVALIIFSAGRGRLFEFSSSSCMYKTLERYRTCNFNSHEVKAPLDSKINYQDYLKLKTRVEFLQTTQRNILGEDLGPLSNKELEQLEKQIEISLTQIRSRKNQMLLVQLLDLKSKEQELQDLNKDLRKKCQLKKTCGENATHISWEEGGHSGTSRNANEPNQGFLQHAENNYSSLQIGYYQQAYMDQLNNQDIGAAHN

SEQ ID NO: 27592 - protein, 235 aa, Leersia virginica
LENKISRQVTFAKRRNGLLKKAYELSLLCDAEVALIIFSGRSRLFEFSSSSCMYKTLERYRSCNYNSQDAAAPENEINYQEYLKLKTRVEFLQTTQRNILGEDLGPLSMKELEQLENQIEVSLKQIRTRKSQALLDQLFDLKSKEQQLQDLNKDLRKKLQETSAENVLYMSWQDGGGHSGSATVLAADQPHHHQGLLHPHPEGDHSLQIGYHHTHHHHQAYMDHLNNEADMVAHH

SEQ ID NO: 27593 - protein, 225 aa, Lithachne humilis
IENKISRQVTFAKRRNGLLKKAYELSLLCDAEVALVIFSGRGRLFEFSSSSCVHKTLERYRSCNYNTQEANAPVENEINYHEYLKLKTRVDFLQTNQRNILGEDLGPLSMKELEQLDNQIETSLKQIRSRKNQVLLDQLFDLKSKEQELQDINKDLRKKLQETNGDQKVVHINSWQDGGQGSSSGHAIEPYQGLIQHPENDPSMQIAYHQVYMDQLNHEDMAAQH

SEQ ID NO: 27594 - protein, 222 aa, Panicum miliaceum
IENKISRQGTFAKRRNGLLKKAYELSLLCDAEVALIIFSGRGRLFEFSSSSCMYKTLERYRSSNYSSQEVKTPLDGEINYQDYLKLKTRVEFLQTTQRNILGEDLGPLSMKELEQLENQVEISLKHIRTRKNQMLLDHLFDLKSKEQELQDLNKDLRKKLQETNAENVLHVSWEEGGHSGASGNAIEPYQGFLQHPENDPSLQIGYHQQAYMDQLNNEDMAD

SEQ ID NO: 27595 - protein, 222 aa, Pennisetum glaucum
IENKISRQVTFAKRRNGLLKKAYELSLLCDAEVALIIFSGRGRLFEFSSSSCMYKTLERYRSSNYGSQEVKTPSDGEINYQDYLELKTRVEFLQTTQRNILGEDLGPLSMKELEQVENQIEISLKHIKDKKNQMLLNQLFDLKSKEQELQDLNKDLRKKLQETNAESVLHLSWEEGGHSGTGGNAIEPYQGFLQHPENDPSLQIGYHQQAYIDQLNNEDMAD

SEQ ID NO: 27596 - protein, 222 aa, Setaria italica
IENKISRQVTFAERRNGLLKKAYELSLLCDAEVALIIFSGRGRLFEFSSSSCMYKTLERYRSSNYGSQEIKTPLDGEINYQDYLKLKTRVEFLQTTQRNILGEDLGPLSMKELEQLENQIEIFLKHIRTRKNQMLLDQLFDLKSKEQELQDLNKDLRKKLQETNAESVLHVSWEEGGHSGTSGNAIEPYQGFLQHPDNDPSLQIGYHQQAYMDQLNNEDMGD

SEQ ID NO: 27597 - protein, 63 aa, Arabidopsis thaliana
KHYRGVRQRPWGKFAAEIRDPAKNGARVWLGTFETAEDAALAYDRAAFRMRGSRALLNFPLRV

SEQ ID NO: 27598 - protein, 84 aa, Hyacinthus orientalis
PRAAAGRCLPCPRCKSKETKFCYFNNYNVNQPRHFCRNCHRYWTAGGTLRRVPVGAGRRKNRTPPPCGADGVGEADQAVWPAGS

SEQ ID NO: 27599 - protein, 196 aa, Hyacinthus orientalis
PTPGSTRCSTRGCATTPTVVTKKILDTYKGFGDLATLVDVGGGVGGTINMIVKKHPHIKGTNFDLPHVISEAELIAGVEHVGGDMFESVPGGDAIFMKWILHDWSDEHCLKLLKNCWRALPDNGKVILMESILPVYPEPTAAAQGVIHVDMIMLAHNPGGKERTEQEFESLAKDAGFAGSKVVCGYANSWVIEFHK

SEQ ID NO: 27600 - protein, 141 aa, Hyacinthus orientalis
GTKQADSDEEDLFTVPAVESGPSSSGKAVGAAEVGQSASSGHGEGPPPKSRRGRNPADREYRRIKRLLRNRVSAQQARERKKVYVNDLESRAKELHDRNQELEEKISTLINENAMLRKVLMNTRPKFDKSLEQQNDQSGNS

SEQ ID NO: 27601 - protein, 108 aa, Hyacinthus orientalis
LTVSVASGQYFCLHFEAFQLGMAPVYRAFLRFMGDDSEAKNYSYSREVGATGRKMIWQGVPRSIRDSHRKVRDSYDAIVIQRNIALFFSGGDRKELKLRVTGRIWKEQ

SEQ ID NO: 27602 - protein, 407 aa, Synechococcus elongatus PCC 7942
MIHPPFCQCCGLSRRQFLKLSGLFTGSLALAAGCRPSDNTATAPSSPANNQPLKIGYLPITDAAPLLIGHSQKFFEQEGLQVEAPTLFRSWPQIIEAFIARKVNAIHLLMPATISLRYGRNFPAKVVAWNHTNGSALTVGPSVNKVEDLAGRTIAVPFWYSVHNVVLQQVLQDTGLKVVRRPREAAIADDEVNLVVLPPPDMISALANDSIGGYIVADPFNAAAEKRKVGKILRFTGDVWKDHACCVIFMHEDDLKERPEWAQRVVNGLVASQAWMRDRRPEVAEILSKDGAGKYTPHPLPILQQALTAYSPEVYGPIGAIRHADWGSDRIDFQPYPFPSYTEKLVTLLQQTQVEGERTFLDQLSPQQVATDLVDDSFVRKAIAAKGGPAQFGLTPDFRRQEVFQVA

SEQ ID NO: 27603 - protein, 324 aa, Geobacillus stearothermophilus
MYKPKDSSQSPRFCGVRTFMRLEPIKTTNGIDFAVLGVPFDTAASNRTGQRYGPQHIRNFSVLLRPYNPDMDIDIFAYCSGVDYGDVDVIPGNALRTYDRIVEELRPLLKKNIVPILMGGDHSITLGHLRAFYERFGPVALVHFDSHSDTWDHYYGEKYMHGTPFRRAVEEGLLDVNHSIQVGMRGPLYSADDLEDARRLGFEVIPMREVRQIGFSEVMRRIHQRVGNKPVFVSYDIDFVDPAFAPGTGTPEVGGPTSYEALEYVRGLDGLNIVGFDLVEVLPAYDSGEMTAILASAIIYEMITLVALKKRRAQANRLSTATTP

SEQ ID NO: 27604 - protein, 299 aa, Geobacillus stearothermophilus
MKLNTLIEEASQCQGRTVAVAAAEDEEVIEAVAMALEHRLGRFVLYGDRERIGRLLKEKGGARFADVDIVHANSVAQAAELAVRAVHLNEADALMKGHVPTATLLKAVLNKEYGLRTGKVLSHVAVFDVPAFERLVIVTDAAMNIAPDLEQKVQIVNNAVSVARSIGIERPKVAALAAVETVNPAMPATVDAAALAMMQKRGQIEHCLLDGPLALDNAVSMTAAKHKRIESEVAGQADILLVPDIESGNMLYKSLVYFAKAKVGAVIAGAKAPIVLTSRADSAESKLYSLALAICSAAK

SEQ ID NO: 27605 - protein, 336 aa, Pseudomonas sp. ST41
MTHKVALNFEDGVTRFIDANAGETVADAAYRQGINLPLDCRDGACGACKCFAESGRYGLGEEYIEDALSEAEAEQGYVLTCQMRAESDCVIRVPAASDVCKTQQASYQAAISNVRQLSESTISLSIKSASLNQLAFLPGQYVNLQVPGSDQTRAYSFSSLQKDGEVSFLIRNVPGGLMSSFLTSLAKVGDSVSLAGPLGAFYLREIKRPLLLLAGGTGLAPFTAMLEKIAEQGSEHPLHLIYGVTHDYDLVEMDKLEAFAARIPNFSYTACVASPDSAYPQKGYVTQYIEPKHLNGGEVDVYLCGPPPMVEAVSQYIRAQGIQPANFYYEKFAASA

SEQ ID NO: 27606 - protein, 364 aa, uncultured marine group II euryarchaeote DeepAnt-JyKC7
MFDMAGDDAVQFGLGEPDFQPPDIAIEAFSKAMKDGHNKYTTTAGLPALRLKIAEGWQHLVPSLDASSVCMTMSGTNALLDIFLALVDPADEVLLPEPYFPLYPTDVVICGGEPILYPCLFERGFVPTVEDLESRVTDKTVAILYNFPSNPTGGNVTTEERDELVDFARRHDLWVITDEVYDRIVYDTEHVSFIGAGYDKVIMINSFSKTFAMTGWRIGYILSENAEAMEQIAKMQYYVTACSNDAMQYAVLEALNEASDYPEHMRDEFQARRDLICDRLNAMPGVSCHIPTGAFYVFPKVEAAGLNSEEIALALLEGGVLCSPGSAFGAAGEGHLRFAYTIGREGISRGMDRVEKVLAELRGE

SEQ ID NO: 27607 - protein, 463 aa, Listeria monocytogenes str. 4b H7858
MNSLFRRKPIEDLMHNKSGSTHLKQTLGPLDLTLLGVGAIVGTGIFILPGTVAAKNAGPAIIFSFVIAAIVCAIAAMCYSEFASSVPVAGSAYTYGYVVFGELIGWLLGWALILEYGLAVASVASGWSSYLNALLSGFHISIPEAISGPFNPEVGTFINLPAIIIVLVIAFLLTLGIKESTRVNTIMVVIKVGVILLFLVVGVFYVKPDNWQPFMPFGISGVMNGAALVFFAYLGFDAVSSAAEEVKDPQRTMPIGIIGSLLICTVLYVAVSAVLTGMVPYTDLNVTDPVAYALQVINQDWVAGIISLGAVVGMITVILVMSYGATRLIFAMGRDGLLPKVLAEINQKYQTPVKNTWIFAVIVAIISGLVPLDRLAELVNIGTLLAFMMVSIGIIFLRKNKDIQARGFKVPFYPVLPIVSFLLCAFLISRLSVHTWILCGIWFVIGLIVYFAYGRKHSELLKK

SEQ ID NO: 27608 - protein, 483 aa, Listeria monocytogenes str. 4b H7858
MPKQFEAFTTNIQKFLTSNFGWYYLIVVAIIIIFCLFLVLSPIGSIRLGKPGEEPGYSNKSWFAMLFSAGMGIGLVFWGAAEPLSHYAVQAPGGEVGTQAAMKDALRYSFFHWGISAWSIYAIVALALAYFKFRKNAPGLISATLYPILGKHAKGPIGQLIDIIAVFATVIGVATTLGLGAQQINGGLTYLFGVPNNFTVQFTIIIIVTILFMLSAMSGLDKGIQLLSNVNIYVAGVLLVLTLILGPTLFIMNNFTNSFGDYLQNIIQMSFQTAPDAPDARKWIDSWTIFYWAWWLSWSPFVGIFIARISRGRTIRQFLLGVIVLPALVSVFWFAVFGGSAIFVEQHGNSGLSSLATEQVLFGVFNEFPAGMVLSIVAMILIAVFFITSADSATFVLGMQTTGGSLNPPNSVKVTWGLLQAGIASVLLYAGGLTALQNASIIAAFPFSIVIILMIVSLFVSLTREQEKLGLYVRPKKSQRSQL

SEQ ID NO: 27609 - protein, 534 aa, Listeria monocytogenes str. 4b H7858
MIDTLLPGKDFGLIITAALALLFFYILNTFMQYIVTYFGHMLGLNIETDMRRDLFSHLQKQPFGFYDNQKTGKLMSRMTTDLFEIGEVAHHGPEDIFISIMSLFGAFFLMLNINVKLAISTFILVPILTVLIVYFNKRMTKVTTGIFKDLGNFNAGVENAISGVRVVQAFANEPHEKGRFRVLNQAYRQSKLMFYKVMGLSFSFNYFLMRLISLFALLFGAYFTINGEISYGEFVGFILLTNVFIRPIEKINNVIESYPKGFAGFKRFLEVMDTEPAIQDEKDAKPAKAFRGDIAYNHVSFEYSDGKNVLNHINLSIKAGETVAFVGPSGAGKTTICNLLPRFYDVSAGEITIDGENIKRFTLPSLRAQIGVVQQDVFLFSGTVRENIAYGKLDASDEEIEHVVKLAHLSKVVEEMPDGLDTIIGERGVKLSGGQKQRLAIARMFLKNPPILILDEATSALDTETEQVIQASLEELAEGRTTLIIAHRLATIKHADRIIVVNETGIAETGTHNELLAQDNGAYKRLYDAQFNTI

SEQ ID NO: 27610 - protein, 270 aa, Listeria monocytogenes str. 4b H7858
MGYYSPQEVTEITIEKGTQKANSSTLTLVLLGFLGGAFISLGYLLYIRAVGTMPHEWGSFATLIGASLFPVGLVCILLGGGELITGNMMAVAIAWYDKKISFQQLLRNWAIVSVMNLVGAFFVAYFFGHFVGLTEGDFLPKTLATAGAKINDPFWVAFVSGIGCNWFVGIAVWLCYAAKDFAGKILGIWFPVMAFVAIGFQHVVANMFIIPAAIFAGYYSWADFIWNIIPVYLGNVVGGAVFVSLFYFIAYKKNAPKKVKEEIHQPIEES

SEQ ID NO: 27611 - protein, 318 aa, Listeria monocytogenes str. 4b H7858
MTASVFVAGKLLPETMEALSEWDVKAFSGEENITEAELIKNVTEVDAIICPLSSPISAKVLESAKNLKIVANIGAGFDNIDVKKAQELGIAVTNTPDVSTEATAELTLGLILDVARRISEGDRLCRETPEQFKGWAPTFFLGTELSGKTLGIIGLGRIGQAVAKRAAAFGMKIIYSGHHPKEAAKEWNAEFVSQEELLKRSDVVTIHAAYSPSLKYLLNETTLKTMKSSAFLINAARGPVVEEAALIKALEAGVIAGAALDVFEFEPKIGEDLAKLDNVVLTPHIGNATVETRTAMGKIAIANVEAVLAGKAPLHSVY

SEQ ID NO: 27612 - protein, 580 aa, Listeria monocytogenes str. 4b H7858
MESMKWIWQYVRKYRLLMIGVFILIFIASGISIIYPLLGGKVIDDVVYQNKTNLLIPLLLIMIISTIIRTICRYTYQIMCERIGQNSLFRIREDLYKKLQSLDFDFFNNTRVGDIMARMTGDTDAIRHFVSWVSYNILENVFLFSFAIIIMAAIDWKLTLALVIVTPLIAILTMKMSSKAQPVFYEIRESFSRLNSMVEENISGNRVVKAFAREDFEMKKFHEHNEDFKKRNLDSADVSRTYLPVLDSLAGMLVVITLIFGGYLVIKGQMTLGDLVAFNGFLWMLNGPMRMSGWLINDVQRFIASSFKIQDMMATDAKIPIHAEKPAPSLQGHVEFKNVSFHFEDDPNTDVLKNISLKASPGQTIAILGETGAGKSTLVNLICRFYDPTSGEILIDGVDARKWHVRELRNHIATVMQDIFLFSDTIEGNIAFGAPDATMEDVRRMARIADADHFIETMPESYDTIVGERGVGLSGGQKQRISLARALLKNPSILILDDTTSAVDMETEVKIQGELKKITENTTTFIIAHRISSVKEADEILILNHGEIIERGTHSSLLAEKGYYFDIYNKQLGTEANVNG

SEQ ID NO: 27613 - protein, 459 aa, Listeria monocytogenes str. 4b H7858
MRNQSKMPLVERLDAHAKSCPISLHVPGHKSGAIYPDAWQKFLKWDVTEITGMDDLHHPEDVILEAEELLAECYGSKKSYFLVNGTSGGSLAVIMATLKHGEKVLVPRDAHKSILHGIELAGGEPIFLTPATNEEVGVASGVTTELLEETLHNHPDIKLCIFTYPSYYGTTFNLHKCIQIAHDFGAVVFVDEAHGAHFLTSSEFPKSAVELGADVVVQSAHKTLPALTMGSYLHVVNDLPIFEKLPYYLQVFQTSSPSYLIMASLDAARKYAATYTAADVEAFWKMRARWIKWLTKNKFDVILPDDPLKIIVRKTGYTGYELQAIFEESSYFPELADESQVLLILPLIKKGIDFTPISRIHSPVKKEIAKEPYEMSAPFASGLALTYEEMHARATEFVLLDEATTRVSAETISLYPPGIPAIIRGESITEKHIRELKNIRTRHYQGGEKLAENYIRVFR

SEQ ID NO: 27614 - protein, 214 aa, Listeria monocytogenes str. 4b H7858
MRFFIDTANVEEIKKANRMGFIAGVTTNPSLVAKEGRDFNEVIQEITSIVDGPISGEVVSLEADEMIAEGRVIAKIHPNMVVKIPMTGEGLAAVKVLTEEGIKTNVTLVFSATQALLAARAGATYVSPFLGRLDDIGDDGLVLIRDIADIFEIHGIPTEIISASVRHPIHVIECAKAGADIATVPFKVFEQMLKHPLTDSGIDKFLADWEAAKK

SEQ ID NO: 27615 - protein, 403 aa, Listeria monocytogenes str. 4b H7858
MKIIVQKFGGTSVQNEKSRLMAFNHIKQVLKEGYKVVVVVSAIGRYGDPYATDTLLELIGAKNTKLTAREQDTLLSVGETISASVFTNMLKEANIKAEAFSGGQAGIITSDDHLNAKITEVDTARLKDALTNLDVAVVAGFQGITANGDISTLGRGGSDTSAAALGVSLQADYIDIFTDVDGMMTADPRIVEHARSLPRVSYNEVSNMAYQGAKVIHPRAVEIAMTAKIPMRIRSTYLESTGTLVTSLTNDSDHFDVKERIVTGVAHVTNLTQISVQTDTVKAQQLAFEILADAGISLDFINISTNSVIFTVPEEKSHVVKQLLEDADLQTTVRQACAKVSIVGAGITGVPGVTAKIVGALSEKNIPILQSADSHTTIWVLVKEEDLISAVNALHDVFCLEIK

SEQ ID NO: 27616 - protein, 463 aa, Listeria monocytogenes str. 4b H7858
MTKVNSFFRKKSFHNPATDKHHLNKTLGAFDLTMLGVGAVVGGGIFILPGQVASVIAGPGIIISFIIAGIACCLAALCYSEFASKLPVAGSAYTYSYHVFGEGVAWILGWSLILEYGLAVAAIASGWSSYMKSLLAGFDLHIPTVISSAYDPSAGTYFDLLAFVVVMVIGILLSFGIRESTRVNNIMVLVKIAVVVLFILVGAFYVKPDNWTPFLPFGVQGVITGASTVFFAYIGFDAVSSAAEEVKNPQKNMPIGIISSLAICTLLYILLSAVLTGVVPYTDLVDVSAPVAFALQAINQNWIAGLLSVGAIVGMTTVVLVMSYGGTRLLFAMGRDGLLPKSFSKISKNDTPVRNTMIFATVMGLIASTVPMADLAQLINIGTLFAFAMVSIGIFFLRRNPDLNQKGFRTPFYPVVPALSFLLCVYLMINLSKTTWIAFGIWFVIGILVYTFYGRKHSALRVK

SEQ ID NO: 27617 - protein, 368 aa, Listeria monocytogenes str. 4b H7858
MLNKELIVRGAPQEYLCQVGAWDTLPTHLERRGLKNVLVVRGNASWEVAKKKFPVLSTVTSTFEVYNGGSTYEERDRLVAIMETNKMDAIIAVGGGKIADVCKATAAVLRLPVIILPTLASTCAAYTPLSVMYDEEGAMIRYDVFASSNALLLIDPEMILDSPKELLVAGIGDTLAKWYEADVIINSLPTKSVEIEIAHFAAKMCRDNLLQYSEEALAAMDKQVLNEAFVKIIETNILVGGMVGGFGDDYGRCAGAHSIHDALTMVPETHHLLHGNKVAYGILVQLVIENRWDEIERLLPFYSELGLPMSLYDMGLATLAEETLVAVSKRATEPHETIHMMPGEMTADVVLNAMKQLEDSMAMKRVAK

SEQ ID NO: 27618 - protein, 216 aa, Listeria monocytogenes str. 4b H7858
MHLDSANLEDVKKIQASSIFKGITTNPTILVKEKCNRQTAINRILELTDKQVFVQTVGFSYEEILADARMLLAMFGKEKIAIKIPAHEAGINVIDTLKKEDKTIQILGTAIYSADQAIAAALAGADFVAPYVNRMSAANIDPFKEIAGMRHFFDKKALKTQIMAASFKHSGQVMQAYESGADTVTIPYEIYSQMTNKVLAVEAIRVFNEDATLYEK

SEQ ID NO: 27619 - protein, 368 aa, Listeria monocytogenes str. 4b H7858
MIYFDHAATTKMSEASLQVFMDASREFFANSESLHDAGTKSAALLEKCRESFSELLQVPNRGILFTSGGTESNQIAIQTLIHTTDKKEVLVSPLEHASVWQQLMALEQAGKCRIKVLPVDSFGQVNPATLEKMISAETGLIIIQHVNSEIGTIQPIAELAHIAKKAGVFFHTDIVQSFGKIDLDLSDATSFSISSHKIYGPKGAGILFMKPDSPLQAVLPDVHHEFGFRPGTVNVPAIAAFTTAAYDIIENREQEAIRAMKLKAAICDTLEARVEVEGGPNTSPYILGLTLPNMQGQEALLALNEADIQISTTSACSLRDLAPSRTLIATGKTTEEANRFIRLSFGRENELNDSIIFKEEIDKLLRKR

SEQ ID NO: 27620 - protein, 267 aa, Listeria monocytogenes str. 4b H7858
MAVLSGCGYSTDPITSESTGFWSHYIVFPLSWTITWFSDLFGGSYAVGIIVVTILIRLLIMPLMIKQLKSQKAMTNLQPKIKELQEKYSSKDNETKQKLQQETMRLYQENSVNPMMGCLPLLIQMPILLGFYQAISRTAEIKTDSFLWMQLGNPDPYYILPVVAALTTFLSSKISMMGQTQQNKSMAMIVYIMPVMILFMGITLPSALALYWIIGNIFTVFQTLLINNPFKNKREQEALAAAQVAEDRLKKKAANMKASKKGGKKRK

SEQ ID NO: 27621 - protein, 370 aa, Listeria monocytogenes str. 4b H7858
MLVGVPKEIKNNENRVAMTPASVFSYVNAGHTVYVEKDAGIGSNYQDADFVQAGAKIVETAKEAWDVDMVVKVKEPIASEYTYFKEGLLLFTYLHLANEPTLAKALMESKVNSVAYETVELADHTLPLLSPMSEVAGRMAAQIGAQFLQRTNGGMGVLLGGVPGVEKSEVVIIGGGIAGTNAAKIAAGLGANVTILDMNLKRLRELDDIFGNQVQTLMSNDFNIETAVKKADLVIGAVLIPGAKAPKLVKEHVIKQMIPGSVLVDIAIDQGGIFETTDHVSTHDNPTYEKYGVLHYAVANMPGAVPRTSTLALTNATLPFGLKLANQGLKAAVQNDPFLLRGLNTYQGHITYKAVADSLDLPYTDSKELI

SEQ ID NO: 27622 - protein, 405 aa, Listeria monocytogenes str. 4b H7858
MEGIDKNKMEKTIAINAGSSSLKFQLYDMPSERVITAGIVERIGLKDSIFTITVDGEKIKEIIDIPDHEIAVQMLLEKLINHKVIGSYDEITGIGHRVVHGGERFPESVYIDDQVIKDIEALSELAPLHNPANVTGIKAFRKILPDVVSVAVFDTAFHQTMPPASYLYSLPYSYYEDYGIRKYGFHGTSHKYVSERAAELLGRPVEELRLLTCHLGNGASIAAIEGGKSMDTSMGFTPLAGVSMGTRSGNIDPALIPFIMEKTGKTAEQVLDVLNKESGMLGVSGISSDLRDLEDEAAKGNDRAELALQVFVDRIHKYIGSYAARMNGVDAIIFTAGIGENSSYIREKVLRGLEFMGVYWDPALNQVRGEERFLNYPHSPVKVIIIPTNEELMIARDVETIKNNH

SEQ ID NO: 27623 - protein, 355 aa, Listeria monocytogenes str. 4b H7858
MSFDVLTINPGSTSTKLAVYQGDKVLFEETVRHTMQELADFNNVQEQFDFRWQVLRRVMDAYGYDVKKLQAVVGRGGLLRPVAGGTYMVTEKMIDDLKENKYGEHASNLGALLAKKLADELTIPSFIVDPVVVDEMQEIARISGNAFIARKSIFHALNHKAAGRKIAKELGKDYEKMNFVIAHLGGGISVAAHRQGKAVDVNNALDGDGPFSPERSGSLPMNDFLEACFSGKWTKRELHELIVGRGGMISYLGTNSMLEVEAKVQAGDVKAIEAFDAMAYQVSKEIGACSVVLQGKVDAIILTGGLARSELFTNKIIEQTNWITSVIIEPGEDELEALNSGVQRVLAGLEKEKEY

SEQ ID NO: 27624 - protein, 576 aa, Listeria monocytogenes str. 4b H7858
MQFGFRRLSIIDVENGHQPLTYENERYWIIFNGEVYNYVELREQLVAEGMTFETESDTEVIIATYAKYKEKTAERLRGMFGFVIWDKQEELVYGARDPFGIKPFFYAEEDGKLFMGSEKKSILHALKEKELDEVSLQNYMTYQFVPEPDSLTKNVKRLEPGHQFTKKIGQPMEITTYWKASFAPVTKSEDAWIKEVRDVMYDSVKMHMRSDVPVGSFLSGGIDSSIIAAIAKEYHPAIKTFSVGFERDGFSEIDVAKETADKLGVENISYVISPEEYMKELPKIVWHMDDPLADPAAIPLYFLSREARKQVTVALSGEGADELFGGYNIYNEPNSLAMFNKMPSVFKSMLNSVARIMPEGMRGKSFLERGTTPMEERYIGNAKMFTEKEKQILLPKYQAGHDYTNITDPFYAETTNYHPVERMQYIDIHTWLRGDILLKADRMTMANSLEVRVPFLDKEVYNVARNIPDTMKTTNGTTKYILRKAAATFVPEHVLNRRKLGFPVPIRHWLKDEMNAWVKNIIKESPTDHLINKQYVLGLLDDHCAGKFDYSRKIWTVVIFMIWYDVYVADKYDFGK

SEQ ID NO: 27625 - protein, 392 aa, Listeria monocytogenes str. 4b H7858
MSTVDKIGKTADQAIYEKKQGNKVIVVVSAMGKSTDKLVAMAEEISEAPDKREMDMLLSTGEQITIALLAMTLKEKGHDAISYTGWQAGIETEAVHSNARIADIDSARIESALDAGQIVVVAGFQGFTTDGEITTLGRGGSDTTAVAIASALNAVKCAICTDVVGVFTTDPRYVKKAQKLEQITYDEMLELANLGAGVLHPRSVEYAKNFRIPLEVRASHEQVPGTMIEEDLTMENTKVVRGIAFEDQITRVTIHWKQKEAMRVSKVFTKLAENNIDVDIIIQGITGLGHGNLSFTIKTSALLATLAVLEESKELLQIEKLESEQDLAKVSIVGSGMVSNPGVAAQMFEALTENNIPIKMISTSEIKVSTVVPARKMVEAAQVLHDQFELDK

SEQ ID NO: 27626 - protein, 381 aa, Listeria monocytogenes str. 4b H7858
MTKSIRPELRDIQVSGIRTFNTRVTGIPDMIRLTLGEPDFPTPEHVKQAAISAIEENFTNYTPNAGMPELLEAASTYFHEKYDLSYNNKEIIVTVGATEAISVALQTILEPGDEVILPDPIYPGYEPLITLNRAHPVKVDTTETNFKLTPEQLRAHITPKTKALIIPYPSNPTGVTLSKKELFALAEVLNETGIFVIADEIYSELTYHEEHVSIAPLLREQTIVINGLSKSHAMIGWRIGFLLAPEALTQEMLKIHQYSVTCASSISQKAALEALTNGKDDAFQMRTEYKTRANFTQDRLEKMGFTVIPPDGAFYFFVKLPDEITENAFDWAVKLAEEAKVAVVPGNAFSEKGDRYFRLSYATSFNNLAEALDRMAQFIAK

SEQ ID NO: 27627 - protein, 127 aa, Listeria monocytogenes str. 4b H7858
MFRTMMNGKIHRATVTEANLNYVGSITIDSAILEAVDMLPNEKVQIVNNNNGARIETYIIPGEPGSGVICLNGAAARHVQVGDVVIIMSYGMFTTEEAKTHEPKIVVLDEKNHIEMILPEEKAHTTL

SEQ ID NO: 27628 - protein, 553 aa, Listeria monocytogenes str. 4b H7858
MFKHILLSLNGYKISYLRNDVISGVGVAALTIPVAMGYAQVAGLPPIYGLYASFLPVIAYVIFASSPQLVFGIDATASAITGSIILGTAGLAAGSKEAIALAPILAFFCAIFLVLFSVLKLGRFAKYISAPVLSGFISGLSVSIIMGQIPKIMGLKESGDSFFSSLGIIFGQFFQSNWISFAMGVVTVIIVITCKKVIPKIPMSLVVLVLGTMAAYFFKLDQYNVDIVGKIPVGFPSLALPEFGCSSWALAIGGGLVCAIATFAGSLLPSESFAMRNKYTIDDNRELFAYGISNFVAAFSGCSPASASVSRTAANEQFRGKTQMVSIVAATIIALIVAFLSGLLYYMPQPVLSGIVFAALVGIIDVDVLKGLFKVSRREATVWIVAALGTLLVGVIFGVLLGIFLSFINVVSRSMKSPIAILGVIEGRHGYFDLKRKPEAKPIPNVVIYRYSASLFFGNFNKFADGLKEAVQDDTKLVIFEASAIINIDTTATESMKDLLKWLDDKGIEYYFADLIDHLKTSFRKHDLGYIIDNGYTKKTVEDALEAYYAEHK

SEQ ID NO: 27629 - protein, 360 aa, Listeria monocytogenes str. 4b H7858
MLGAITNTYGNPSSIHYAGREARKALDEARHTIADSIHAIEKEIIFTSGGTEGDNLAIIGAALAQQESGKHIITSQIEHHAVLKTCEYLETQGFEVTYLPVDEHGIVSIESLQEALRPDTILVSIMYGNNEIGTIQPIAEIGAVLRNHQAIFHTDAVQAYGLLNINVTELGVDLLTTSSHKINGPRGVGFLYVKNGTRLIYQMHGGEQERKRRAGTENLAGICGFSAASSIMMNERELKNEEYISFKKRMAEIWRSADLDFEVNGLEANTLPHVFSVRFPGVSIEQLLMNLDMDGIAVSSGSACTAGTVDPSHVLVALFGENHPAIQETVRISFGLGNHLEEVEMAATKISEVVTRLMKI

SEQ ID NO: 27630 - protein, 433 aa, Listeria monocytogenes str. 4b H7858
MKVIKFGGSSLASGIQLNKVFQLVAEDPDRKIVVVSAPGKRFKEDTKVTDLLIDCAAKALLGEDTSELFESVIARYAGIALDTGMSDEIINQIRADLQATISSDKSDPDKFLDRMKASGEDNNAKLIAAYFKFKGLNANYINPKDAGLLVTDEHASAQVLPESYDRLFALREREGIIVFPGFFGYTKDGEISTFSRSGSDITGAIVANGAQAELYENFTDVDAVYAVNPAIVKNPKKVLELTYREMRELSYAGFSVFHDEALIPAFHAGIPVHIKNTNNPDSCGTRVVHERENNNGPVVGIASDDGFCSIYISKYLMNREIGFGRKVLQILEDAGLNYEHMPSGIDDLTIIIRENQFGEDTEQTIMSRLKEELNADQVIMQHGISLIMVVGETMRHNVGITSRASKALSDAKVNIEMINQGSSEVSIMFGVKK

SEQ ID NO: 27631 - protein, 216 aa, Listeria monocytogenes str. 1/2a F6854
MHLDSANLDDVKKIQASSIFKGITTNPSILVKEKCNRQTAINRILELTDKQVFVQTVGFTYEEILADARMLLTMFGKDKIAIKIPAHEAGTNVIDTLKKEDKTIQILGTAIYSADQAITAALAGADFVAPYVNRMSAANIDPFKEISQMRHFFDKKALKTQIMAASFKHSGQVMQAYESGADTVTIPYEIYSQMTNKVLAVEAIRVFNEDAVLYEK

SEQ ID NO: 27632 - protein, 200 aa, Listeria monocytogenes str. 1/2a F6854
MDKQAILNNIHQTWQEEANAISRLPEVTSEEALVKTVETIAECTGKIVVAGCGTSGVAAKKLVHSFNCIERPAVFLTPSDAVHGTLGVLQKEDILILISKGGNTGELLNLIPACKTKGSTLIGVTENPDSVIAKEADIFFPVSVSKEPDPFNMLATASTMAVIASFDAVIVCLMTYMNYTKEQFSVIHPGGAVGNKLLNK

SEQ ID NO: 27633 - protein, 311 aa, Listeria monocytogenes str. 1/2a F6854
MAGKMKLFSVTSERPLATKIADYLDIPLCEVELQKFSDGEVKINIEESIRGTNAYVVQSMNSNVNERLMELLIMVDALKRASVHSINIIMPYYGYARQDRKARSREPITAKLMANLIQRAGANRLITVDLHAAQIQGFFNIPIDHLSAIPLIGDYLIENYGEKDVVVVAPDHSGVVRARRIADRLNAPIAILNRKPRPHEDEIMSVIGDVKGKVAIVVDDIIDTGVRATTSADILLEKGAVEVIACATHSVMAGNATERLQNSSIKEVITSDSIDLPEDKQFDKLTTISIGRILGRAIEGVQENRSLHPLF

SEQ ID NO: 27634 - protein, 534 aa, Listeria monocytogenes str. 1/2a F6854
MIDTLLPGKDFGLIITAALALLFFYILNTFMQYIVTYFGHMLGLNIETDMRRDLFSHLQKQPFGFYDNQKTGKLMSRMTTDLFEIGEVAHHGPEDIFISIMSLFGAFFLMLNINVKLAISTFILVPILTVLIVYFNKRMTKVTTGIFKDLGNFNAGVENAISGVRVVQAFANEPHEKGRFKVLNQAYRKSKLMFYKVMGLSFSFNYFLMRLISLFALLFGAYFTINGEISYGEFVGFILLTNVFIRPIEKINNVIESYPKGFAGFKRFLEVMDTEPAIQDEKDAKPAEAFRGDIAYSQVSFEYSDGKNVLNHINLSIKAGETVAFVGPSGAGKTTICNLLPRFYDVSAGEITIDGENIKRFTLPSLRAQIGVVQQDVFLFSGTVRENIAYGKLDASEEEIEHVVKLAHLSKVVEEMPDGLDTIIGERGVKLSGGQKQRLAIARMFLKNPPILILDEATSALDTETEQVIQASLEELAEGRTTLIIAHRLATIKHADRIIVVNETGIAETGTHDELLAQDNGAYKRLYDAQFNTI

SEQ ID NO: 27635 - protein, 397 aa, Listeria monocytogenes str. 1/2a F6854
MHKIMAINAGSSSLKFQIFTMPGEEVLVKGLIERIGLPDAIFNMSFQNEKIKETRAINNHGEAVEILLEQLKAHQVINDLNEITGVGHRVAHGGEDFVTSCVVTDEVVKGIEAVTNLAPLHNPANIIGIKTFRELLPNAVSVAVFDTAFHQTIPEENFLYALPYELYEKHHIRKYGFHGTSHKYVAGKAAEVLEKPLEKLKIISCHLGNGASVCAIEAGKSVNTSMGFTPNAGLMMGTRSGTIDATIIPYLVDELGYSLDEVMHMMSSESGVLGVSGISSDFRDIEIAAKEGNSRALLTLRMFTGQICNYIGAYASAMNGCDALLFTAGVGENSSLIRQMVTEQLSYLGVTCHVTKNNAGDMIISNDDEAVKVCIIPTNEELMIARDVEKYAKQTIS

SEQ ID NO: 27636 - protein, 318 aa, Listeria monocytogenes str. 1/2a F6854
MTASVFVAGKLLPETMEALSKWDVKAFSGEENITEAELIKNVTEVDAIICPLSSPISAKVLESAKNLKIVANIGAGFDNIDVKKAQELGIAVTNTPDVSTEATAELTLGLILDVARRISEGDRLCRETPEQFKGWAPTFFLGTELSGKTLGIIGLGRIGQAVAKRAAAFGMKIIYSGHHPKEVAKEWDAEFVSQAELLKRSDVVTIHAAYSPSLKHLLNETTLKTMKSSAFLINAARGPVVEEAALIKALEAGVIAGAALDVFEFEPKIGEGFAKLDNVVLTPHIGNATVETRVAMGKIAIANVEAVLAGKAPLHSVY

SEQ ID NO: 27637 - protein, 366 aa, Listeria monocytogenes str. 1/2a F6854
MVFGELIGWLLGWALILEYGLAVASVASGWSSYLNALLSGFHISIPEAISGPFNPEVGTFINLPAIIIVLVIAFLLTLGIKESTRVNTIMVVIKVGVILLFLVVGVFYVKPDNWQPFMPFGISGVMNGAALVFFAYLGFDAVSSAAEEVKDPQRTMPIGIIGSLLICTVLYVAVSAVLTGMVPYTDLNVTDPVAYALQVINQDWVAGIVSLGAVVGMITVILVMSYGATRLIFAMGRDGLLPKVLAEINQKYQTPVKNTWIFAVIVAIISGLVPLDRLAELVNIGTLLAFMMVSIGIIFLRKNKDIQSRGFKVPLYPVLPIVSFLLCAFLISRLSVHTWILCGIWFVIGLIVYFAYGRKHSELLKK

SEQ ID NO: 27638 - protein, 403 aa, Listeria monocytogenes str. 1/2a F6854
MKIIVQKFGGTSVQNEKSRLMAFNHIKQVLKEGYKVVVVVSAIGRYGDPYATDTLLELIGAKNTKLTAREQDTLLSVGETISASVFTNMLKEANIKAEAFSGGQAGIITSDDHLNAKITEVDTARLKDALTNLDVAVVAGFQGITANGDISTLGRGGSDTSAAALGVSLQANYIDIFTDVDGMMTADPRIVEHARSLPRVSYNEVSNMAYQGAKVIHPRAVEIAMTAKIPMRIRSTYLESTGTLVTSLADDSGHFDVKERMVTGVAHVTNLTQISVQTDTVKAQQLAFKILADAGISLDFINISTNSVIFTVPEEKSHVVKQLLEDADLQTTVRQACAKVSIVGAGITGVPGVTAKIVGALSEKNIPILQSADSHTTIWVLVREKDLISAVNALHDVFCLEIK

SEQ ID NO: 27639 - protein, 459 aa, Listeria monocytogenes str. 1/2a F6854
MRDQSKMPLVERLDAHAKSCPISLHVPGHKSGAIYPDAWQKLLKWDVTEITGMDDLHHPEDVILEAEELLAECYGSKKSYFLVNGTSGGNLAVIMATLKRGEKVLVPRDAHKSILHGIELAGGEPIFLTPATNKEVGVASGVTTELLEETLHNHPDVKLCIFTYPSYYGTTFNLQKCIRIAHDFGAVVFVDEAHGAHFLTSSEFPKSAVELGADVVVQSAHKTLPALTMGSYLHVVNDLPIFEKLAYYLQVFQTSSPSYLIMASLDAARKYVATYTAADVEAFWKMRARWIKWLTKNKFEVILPDDPLKIIVRKTGYTGYELQAIFEESSYFPELADESQVLLILPLIKKGIDFTPISRIHSPMKKEIAKEPYEMSTPCASGLALTYEEMHARATEFVLLDEATTRVSAETISLYPPGIPAIIRGEGITEKHIRELKNIRTRHYQGGEKLAENYIRVFR

SEQ ID NO: 27640 - protein, 575 aa, Listeria monocytogenes str. 1/2a F6854
MDQKKYSWRKFFQLLISAKPANWIIFCALFASVITTVAGLVVPLFTKNLIDGFSIASLDVKMIALIVLAFILQAITNGFSIFLLNYMGQKVVATIRERLWKKIVHLPVSYFDNTKTGEMVSRMVNDTVVVKELIADHLPQFVTGIISVVGATIILFFMDWKMTLIILVAVPITALVVAPLGQKMFKISKGLQNETANFTGSISQTLSEARLVKASNAETLETEAGHQGINRLFGFGIREAKVVAVLGPLIFFVVMGVIVGIIGYGGIRVSAGTMTTGTLIAFLLYLFQIIVPVTSFATFFAQLQKAKGATERIADILNETEEDFDAGKKVDVSGKTIRASDISFSYNEGEPILKHVSFDTKPGEVIAFAGPSGGGKSTLFAILERFYQPKTGEILVGDIPLSEISINSWRTQIGYVSQESAMLSGTIRDNLCYGLDREITEDELWNVAKLAYADGFISELPDKMATEVGERGVKLSGGQRQRIAIARAFLRNPNILMLDEATASLDSQSEQIVQQALANLMEGRTTFVIAHRLSTIVNADQILFIEHGEITGRGTHSELVASHPLYASFAEQQLK

SEQ ID NO: 27641 - protein, 368 aa, Listeria monocytogenes str. 1/2a F6854
MLNKELIVRGAPQEYLCQVGAWDTLPTHLERRGLKNVLVVRGNASWEVAKKKFPVLSTVTSTFEVYNGGSTYEERDRLVAIMETNKMDAIIAVGGGKIADVCKAAAAVLRLPVIILPTLASTCAAYTPLSVMYDEEGAMIRYDVFASSNALLLIDPEMILDSPKELLVAGIGDTLAKWYEADVIINSLPTKSVEIEIAHFAAKMCRDNLLQYSGEALAAMDKQVLNEAFVKIIETNILVGGMVGGFGDDYGRCAGAHSIHDALTMVPETHHLLHGNKVAYGILVQLVIENRWDEIERLLPFYSELGLPMSLYDMGLATLAEETLVAVSKRATELHETIHMMPGEMTADVVLNAMKQLEDSMAMKRVTK

SEQ ID NO: 27642 - protein, 404 aa, Listeria monocytogenes str. 1/2a F6854
MAKEKIVLAYSGGLDTSVAIQWLVESGYEVIACCLDVGEGKNLDFIKEKAITVGASESYTIDAKEEFAEDFALIALQAHAYYEGKYPLISALSRPLIAKKLVEVARQEGASAIAHGCTGKGNDQVRFEVAIHALAPDLKVVSPVRDWKWSREEEINYAKEHDIPVPIDLDNPFSIDQNLWGRSNECGVLENPWTTPPEAAYDLTVSLEDAPDTADIVEITFDAGIPISLNGENMSLANLILTLNEIAGKHGVGRIDHIENRLVGIKSREVYECPAAVTLITAHKELEDLTFVREVAHFKPIIEQKISETIYNGLWFSPLTEALVAFLKSTQKFVNGTIRVKLFKGHAIVEGRKSPNSLYDENLATYTSSDTFDQDAAVGFIKLWGLPTKVSAEVNSKVTITTEV

SEQ ID NO: 27643 - protein, 507 aa, Listeria monocytogenes str. 1/2a F6854
MKKLTNVFWGSGFLVLLAVLFGAFLPEQFETFTNHIQKFLTSNFGWYYLIVVAIIIIFCLFLVLSPIGSIRLGKPGEEPGYSNKSWFAMLFSAGMGIGLVFWGAAEPLSHYAVQAPGGEVGTQAAMKDALRYSFFHWGISAWSIYAIVALALAYFKFRKNAPGLISATLYPILGKHAKGPIGQLIDIIAVFATVIGVATTLGLGAQQINGGLTYLFGVPNNFTVQFTIIVIVTILFMLSAMSGLDKGIQLLSNVNIYVAGVLLVLTLILGPTLFIMNNFTNSFGDYLQNIIQMSFQTAPDAPDARKWIDSWTIFYWAWWLSWSPFVGIFIARISRGRTIRQFLLGVIVLPALVSVFWFAVFGGSAIFVEQHGNSGLSSLATEQVLFGVFNEFPGGMVLSIVAMILIAVFFITSADSATFVLGMQTTGGSLNPPNSVKVTWGLLQAGIASVLLYAGGLTALQNASIIAAFPFSIVIILMIVSLFVSLTREQEKLGLYVRPKKSQRSKL

SEQ ID NO: 27644 - protein, 453 aa, Listeria monocytogenes str. 1/2a F6854
MKVIKFGGSSLASGIQLNKVFQLVAEDPDRKIIVVSAPGKRFKEDTKVTDLLIDCAAKALLGEDTSELFESVIARYAGIALDTGMSDEIINQIRADLQATISSDKSDPDKFLDRMKASGEDNNAKLIAAYFKFKGLNANYINPKDAGLLVTDEHASAQVLPESYDRLFALREREGIIVFPGFFGYTKDGEISTFSRSGSDITGAIVANGAQAELYENFTDVDAVYAVNPAIVKNPKKVLELTYREMRELSYAGFSVFHDEALIPAFHAGIPVHIKNTNNPDSCGTRVVHERENNNGPVVGIASDDGFCSIYISKYLMNREIGFGRKVLQILEDAGLNYEHMPSGIDDLTIIIRENQFGEDTERTIMSRLKEELNADQVIMQHGISLIMVVGETMRHNVGITSRASKALSDAKVNIEMINQGSSEVSIMFGVKEEQENTAVRALYNEFFSEVFV

SEQ ID NO: 27645 - protein, 463 aa, Listeria monocytogenes str. 1/2a F6854
MTKVNSFFRKKSFHNPATDKHHLNKSLGAFDLTMLGVGAVVGGGIFILPGQVASVIAGPGIIISFIIAGIACCLAALCYSEFASKLPVAGSAYTYSYHVFGEGVAWILGWSLILEYGLAVAAIASGWSSYMKSLLAGFDLHIPTAISSAYDPSAGTYFDLLAFVVVMVIGILLSFGIRESTRVNNIMVLVKIAVVVLFILVGAFYVKPNNWTPFLPFGVQGVITGASTVFFAYIGFDAVSSAAEEVKNPQKNMPIGIISSLAVCTLLYILLSAVLTGVVPYTDLVDVSAPVAFALQAINQNWIAGLLSVGAIVGMTTVVLVMSYGGTRLLFAMGRDGLLPKSFSKISKNDTPVRNTMIFATVMGLIASTVPMADLAQLINIGTLFAFAMVSIGIFFLRRNPDLNQKGFKTPFYPVVPALSFLLCVYLMINLSKTTWIAFGIWFVIGILVYTFYGRKHSALRIK

SEQ ID NO: 27646 - protein, 605 aa, Listeria monocytogenes str. 1/2a F6854
MSGPGPGGGMRMQTAAKPKNFKQTLFRLLGYMKPRSVAIIVVFIFAILSTIFNIFSPKELGKATTEIFKGVMSQDGINNDKIFNILMIVLVLYLGSSLFSFIQQYVMSSVAQRTVYDMRKDLKAKMARLPLKYYDTRSNGDILSRSVNDMDNIANTLQQSLTQAITAIVQMIGVLIMMLTISWQMTLIVLVTVPISIILVAIIAGRSQRYFGAQQRNLGILNDTVEETYGGQTIIKAFGQEKKTLVKFDEVNEDYFKAAKKAQFISGIMMPVMQFVGNLGYVGVCVAGGIFVTNGTLQVGDIQSFTQYVQLFTQPISSVANIANIIQSTIASAERVFEMMDEEEEKDEIPANINQVAGEEHSIVFDHVKFGYTPDKPLMTDLNIHVEEGQMVAIVGPTGAGKTTIINLLMRFYDVDGGQIRMKGIDTRDMTKDAVREKFGMVLQDTWLFNGTIADNIAYGREGATKDEVIGAAKAAYADDFIRRLPNGYDTILNEEGSNISQGQKQLLTIARAILSDPSILILDEATSSVDTRTELNIQLAMGNLMEGRTSFVIAHRLSTIRDADLILVMNHGSVIEQGTHQELLDAKGFYADLYNSQFTGAQAV

SEQ ID NO: 27647 - protein, 216 aa, Listeria monocytogenes str. 1/2a F6854
MFLDTGNLEEIKKTLQFPFFEGVTTNPTILLKENRPRKTHIGSIQAKVVFVQAAGLTEEEIWEDVLRIQAIEPAEGTVIGLKIPAHEAGIKVIAKVRANFPNEIILATAIFSSEQGYIAALSGADYLAPYYNRMEVSGLDAAKTIEELRYVLDLQGLEDVKIMGASFKNSRQIMQALASGADTVTIGYDLFLQMMNKPLALESIEKFNEHHAALPK

SEQ ID NO: 27648 - protein, 286 aa, Listeria monocytogenes str. 1/2a F6854
MEKIGFVGIGVMGSSMAGHLLEAGYEVLVYTRTKTKAEDLLDKGALWVETPGELANKVDILISMVGYPKDVEELYLGENSFLENLAVGTVAIDMTTSSPALAKKMAEFGHEKGIGVLDAPVSGGDIGAKNGTLSIMVGGSEDVFLKVKPIFDILGSSVILQGDAGAGQHTKMVNQIAIASNMIGVTEAIIYAEAAGLNPSRVLDSISGGAAGSWSLANLIPRVLKDDFSPGFFIKHFIKDMGIAISEAKQMGLELPGLTLAEKMYQTLAEQGLSEEGTQALIKYYR

SEQ ID NO: 27649 - protein, 393 aa, Listeria monocytogenes str. 1/2a F6854
MKISKRLQNLPDQFFSSLVEKVGKKVAEGHDVINLGQGNPDQPTPKHIVEAMKTASEKPLNHKYSLFRGKQELKQAAADFYAREYNVTIDPNTEVAILFGTKTGLVELPMCLMDPGDTMLLPDPGYPDYLSGVVLGEVQFEKMPLIAENDFLPDFTKIPEDIAEKTELMYLNYPNNPTGAVATADFFEETVAFAKNHNIVVAHDFAYGGIGFDGKKPISFLETNGAKEVGIELYTLSKTYNMAGWRVGFAVGNSEVIEAINLIQDHMYVSLFPGIQDAAIEALTGDQTCVRELTARYENRRDAFISACREIGWEAVAPAGSFFAWMPVPEDFTSSEFADYLLEEVSVAVADGSGFGEFGEGYVRVGLLMDEERLEEAVTRVSKLHLFDKVTQQ

SEQ ID NO: 27650 - protein, 393 aa, Listeria monocytogenes str. 1/2a F6854
MDLPLSKRVKGVAPSPTLAITAKAKQMKQEGIDVIGLGAGEPDFNTPQNIIDAAIESMNKGFTKYTPSSGIIELKQAIVDKLKKDQFLNYETNQIFVGTGAKHVLYSAFQTILDPGDEVIIPVPYWVTYPEQVKLAGGIPVFVETGFDADFKISAADFEKAITKKTKAIVLNSPNNPSGMCYTKEELIAIGEVAEKHQIYILSDEIYEKLYYGNKADLVSIASLSDRLYDLTIVINGVSKAYSMTGWRIGYAAANKEIIAGMSKLADHLTSNPTANAQYAALEAYVGSQEVPEKMYKAFEERMERFYPELNSIPGFKPKKPDGAFYFFIEVKEAAHKKGFQDVDAFVAALLEEAKVAVIPGSGFGMPDYIRLSYATNPDLFQEAINRIKSFMK

SEQ ID NO: 27651 - protein, 573 aa, Listeria monocytogenes str. 1/2a F6854
MIDTTKTNEKATKKQSKSGAELLIDALKKQQVDMIFGYPGGAVLPLYDAFYDCDIPHILTRHEQGAIHAAEGYARVTGKPGVVVVTSGPGATNVLTGIADAMSDSIPLVIFTGQVHTPGIGKDAFQEADMIGLTIPITKYNYQVRDVRDLPKIVNEAFHIASTGRKGPVVVDIPKDMGIIQTESVRPDTIDLPGYQPTYSPNPLQLEKLMQSLSAASKPLILAGAGVNHARATAELLEFAERYQIPIVNTLLGLGSFPQSHDLFLGMGGMHGSYAANMALTDCDLLINFGSRFDDRLASAPKEFATKATIAHIDIDPAEIGKIIETQIPIVADINETLTQLLQMELPVHPDTSHWYKLNMTRKNRHPFNFDRTKKAEIKPQRVIELIGEITQGEALVSTDVGQHQMWAAQFYPFQFDHQIITSGGLGTMGFGFPAAVGAQLAFPDKTIVAIVGDGGFQMTNQELAILNDYQINVKTVIINNGSLGMVRQWQEKFHGERYSHSIFTSQPDFVKLSEAYGVKGVRLTNPETLEKDLRKAFAHPGPIVIDVHVAKDELVLPMVPSGKPNHQMEGVE

SEQ ID NO: 27652 - protein, 565 aa, Listeria monocytogenes str. 1/2a F6854
MAKLEKEQEKVITKGKSGADLVVDSLINQGVTHVFGIPGAKIDKVFDVMEERGPELIVSRHEQNAAFMAAAIGRLTGKPGVVLVTSGPGASNLATGLVTATAEGDPVVAIAGNVTRQDRLKRTHQSMDNAALFRPITKYSEEVVHAESIPEAITNAFRSATEPNQGAAFVSLPQDIVNEPNVPVKAIRPLAKPENGPASKEQVAKLVTRLKKAKLPVLLLGMRASSPEVTGAIRRLLQKTSIPVVETFQAAGVISRDLEDNFFGRVGLFRNQPGDILLNKADLVITVGYDPIEYDPKAWNASGDRTIVHLDDIRADIDHYYQPVTELVGNIALTLDRVNAKFSGLELAEKELETLKELHAQLEERDVPPESDETNRVHPLSVIQTLRSAIDDNVTVTVDVGSHYIWMARHFRSYEPRRLLFSNGMQTLGVALPWGIAATLVHPGEKVVSISGDGGFLFSAMELETAVRLRAPLVHLVWNDGSYDMVAFQQKMKYGKEAAVRFGDVDIVKFAESFGAKGLRVTNPAELSDVLKEALETEGPVVVDIPIDYRDNIKLGETLLPDQFY

SEQ ID NO: 27653 - protein, 368 aa, Listeria monocytogenes str. 1/2a F6854
MIYFDHAATTRMSEAAIEVFTSASREFFANSESLHDAGTKSAALLEKCRGSFAEILHVPTRGIMFTSGGTESNQIAIQTLLHSTEKKEVLVSPMEHASVWQQLEALEEAGACRMTILPVDSVGKVDPAVLREMISPDTGLIIIQHVNSEIGTIQPIRELANIAKQAGIFFHTDIVQSFGKLDLALCDVTSFSISSHKIYGPKGAGLLFIKPDVPMQAPLPNVHHEFGYRPGTVNVPAIAAFTTAAYDIMENREKEARRIAELKKAICEALTAKVKVEGGLITSPFILGITLPNMQGQEALLALNEADIQISTTSACSLRDPAPSRTLLATGKTIEEASRFIRLSFGRENELSDSLIFKKELDKLLRKR

SEQ ID NO: 27654 - protein, 405 aa, Listeria monocytogenes str. 1/2a F6854
MEGIDKNKMEKTIAINAGSSSLKFQLYDMPSERVITAGIVERIGLKDSIFTITVDGEKIKEIIDIPDHEIAVQMLLEKLINHKVIGSYDEITGIGHRVVHGGERFPESVYIDDQVIKDIEALSELAPLHNPANVTGIKAFRKILPDVVSVAVFDTAFHQTMPPASYLYSLPYSYYEDYGIRKYGFHGTSHKYVSERAAELLGRPVEELRLLTCHLGNGASIAAIEGGKSMDTSMGFTPLAGVSMGTRSGNIDPALIPFIMEKTGKTAEQVLDVLNKESGMLGVSGISSDLRDLEDEAAKGNDRAELALQVFVDRIHKYIGSYAARMNGVDAIIFTAGIGENSSYIREKVLRGLEFMGVYWDPALNQVRGEERFLNYPHSPVKVIIIPTNEELMIARDVETIKNNR

SEQ ID NO: 27655 - protein, 382 aa, Listeria monocytogenes str. 1/2a F6854
MENRIYLDHAATSPIHPEVIQTMLGAITNTYGNPSSIHYAGREARKALDEARHTIAKSIHATEKEIIFTSGGTEGDNLALIGTALAHKENGTHIITSQIEHHAVLKTCEYLETQGFEVTYLPVDEHGIVSVESVQAALRPDTILVSIMYGNNEIGSIQPIAEIGALLRDQQAIFHTDAVQAYGLLNINVMELGVDLLTTSSHKINGPRGVGFLYVKNGTRLAYQMHGGEQERKRRAGTENLAGICGFSAASSIMTNERELKNEEYISFKKRMAEIWRSAELDFEVNGLEADTLPHVFSVRFPGVSIEQLLMNLDMEGIAVSSGSACTAGTVDPSHVLVALFGENHPAIQETVRISFGLGNHLEEVEMAATKISEVVTRLMKI

SEQ ID NO: 27656 - protein, 691 aa, Listeria monocytogenes str. 1/2a F6854
MNRFFRNAIFYVIIFLVIIGIVASFNSNKEAAKDISYSEFVSKLEDGKVKSVEIQPDRSVYTINGEFKSSDKSSDDKKTGLGQSKTSSTAFTTYALNSDTSLGDLQKTLDKEDVKMNVVPAKQNSGWVTFLTSIVPFVIIFILFFFLMSQSQGGGGGKVMSFGKSKAKLYNDDKKKVRFTDVAGADEEKQELVEVVEFLKDPRKFAELGARIPKGVLLVGPPGTGKTLLARAVAGEAGVPFFSISGSDFVEMFVGVGASRVRDLFENAKKNAPCIIFIDEIDAVGRQRGAGMGGGHDEREQTLNQLLVEMDGFGGNEGIIIIAATNRADVLDPALLRPGRFDRQIMVDRPDVKGREAVLRVHARNKPLAKSVDLKAIAQRTPGFSGADLENLLNEAALVAARSDKKEIDMSDLDEASDRVIAGPAKKNRVISEKERRTVAYHEGGHVIVGMVLDEAEVVHKVTIVPRGQAGGYAVMLPKEDRFLMTKAELMDRITGLLGGRVAEEVTFGEVTTGASNDFERATELARRMVTEWGMSDKIGPLQFTSGNGQVFMGRDFGSDKGYSDKIAYEIDTEVQSLIRYCYDRAKTIITEHQEQHKLIAETLLKVETLDARQIRSLFDDGVMPPDIDAIDVEAEYPSEKDEEVAGKSFEEEREELKEEEKVEETQEEPKEVTSEDAPNIEQTPNDKKDE

SEQ ID NO: 27657 - protein, 458 aa, Listeria monocytogenes str. 1/2a F6854
MEEQKEELQRGLKNRHIQLIAIGGAIGTGLFLGAGKSIHLAGPSIMLVYLIIGAILFFVMRALGELLIHNPTTGSFTEFAEQFIGPWAGFITGWTYWFCWIVTGIAEITAVGMYVKFWVPDLPQWIPALACVLILLLFNLATVKAFGEIEFWFAIIKVVVIIALIVIGFVLVFIGYKHGTSTASFSNLVDYGGFFPNGIAGFLLAFQMATFSFVGIELVGVTAGEADDPERTLPKAINNIPIRILIFYIGALLVLMSIYPWSNIDPNTSPFVSVFTMIGIPAAAGIINFVVLTAAMSSCNSGIFSTSRMLYTLSAEGKAPKKMHHLSSNGVPATALITSTACLLIGVFLNYFLPEQVFILVTSIATICFIWVWGVILVAHLRFRHKHPEIAEKSKFKMPLSPLMNWVSLIFFGGLLVILGFAADTRIALFVTPVWFLILGIAYQILKASNRKTKIRHN

SEQ ID NO: 27658 - protein, 404 aa, Listeria monocytogenes str. 1/2a F6854
MGLVVLKFGGTSVSTVDKIGKTADQAIYEKKQGNKVIVVVSAMGKSTDKLVAMAEEISEAPDKREMDMLLSTGEQITIALLAMTLKEKGHDAISYTGWQAGIETEAVHSNARIADIDSACIESALDAGQIVVVAGFQGFTTDGEITTLGRGGSDTTAVAIASALNAEKCAICTDVVGVFTTDPRYVKKAQKLEQITYDEMLELANLGAGVLHPRSVEYAKNFRIPLEVRASHEQVPGTMIEEDLTMENTKVVRGIAFEDQITRVTIHWKQKEAMRVSKVFTKLAENNIDVDIIIQGITGLGHGNLSFTIKTSALLATLAVLEESKELLQIEKLESEQELAKVSIVGSGMVSNPGVAAQMFEALTENNIPIKMISTSEIKVSTVVPARKMVEAAQVLHDQFELDK

SEQ ID NO: 27659 - protein, 621 aa, Listeria monocytogenes str. 1/2a F6854
MCGFVGCVHDRITEITGADKETFRQMNSMITHRGPDDEGYFTDDHVQFGFRRLSIIDVENGHQPLTYENERYWIIFNGEVYNYVELREQLVAEGMTFETESDTEVIIATYAKYKEKTAERLRGMFGFVIWDKQEELVYGARDPFGIKPFFYAEEDDKLFMGSEKKSILHALKEKELDEVSLQNYMTYQFVPEPDSLTKNVKRLEPGHQFTKKIGQPMEITTYWKASFAPVTKSEDAWIKEVRDVMYDSVKMHMRSDVPVGSFLSGGIDSSIIAAIAKEYHPAIKTFSVGFERDGFSEIDVAKETADKLGVENISYVISPEEYMKELPKIVWHMDDPLADPAAIPLYFLSREARKQVTVALSGEGADELFGGYNIYNEPNSLAMFNKMPGVFKSLLNNVARIMPEGMRGKSFLERGTTPMEERYIGNAKMFTEKEKQILLPKYQAGHDYTNITDPFYAETTNYHPVERMQYIDIHTWLRGDILLKADRMTMANSLEVRVPFLDKEVYNVARNIPDTMKTTNGTTKYILRKAAATFVPEHVLNRRKLGFPVPIRHWLKDEMNAWVKNIIKESPTDHLINKQYVLDLLDDHCAGKFDYSRKIWTVVIFMIWYDVYVADKYDFGK

SEQ ID NO: 27660 - protein, 383 aa, Listeria monocytogenes str. 1/2a F6854
MMNHSKIAKKHQQMPVNILADIGTLAKTMPDILDLSIGDPDLITDESIINAAFEDVRAGHTKYTESGGDVELIDAIRGYFSRNYDLSFERSQIRATVGALHGMYLTLQTILDDGDEVIIHEPYFSPYKDQVLNSGGTPIIIPTYEKDDFAINVDILEAAITDKTKALILNSPNNPTGAVFSPETFEKIANLAKKYDFFILSDEVYDGFSFYEDFVPMAKFAPDHTITFGSMSKNFAMTGWRLGYMIAPTYLNEAAKIINEGITYSAPTPSQRAAIYALNHSETLIPLVAETFQKRLEYIAKRVEKIPYLSLHPLKGSIYAFINISKTNMDSVSFTEYVLKETQVLVIPGLAFGESGDNYVRLAATQDISVLEEAFNRLAKLTF

SEQ ID NO: 27661 - protein, 100 aa, Listeria monocytogenes str. 1/2a F6854
MYAIIETGGKQIKVEAGQEIYVEKLAGEVGDVVTFDKVLFVGGDSAKVGVPFVEGATVTAKVEKQGRAKKLTVYKYKPKKNYHKKKGHRQPYTKLTIDAI

SEQ ID NO: 27662 - protein, 420 aa, Methylocystis sp. SC2
MKKFVKLAAIGAAAAVAATLGAVAPASAHGEKSQQAFLRMRTLNWYDVQWSKTTVNVNEEMVLSGKIHVFSAWPQAVANPRVSFLNAGEPGPVLVRTAQFIGEQFAPRSVSLVPGNDYAFSINLRGRRAGRWHVHAQINVEGGGPIIGPGQWIEIKGDMKDFTDPVTLLDGSTVDLETYGISRVYAWHLPWLAVGAAWILFWFVRKGIIASYLRVATGKVDEQVTDDDKRIGAIVLALTILATIVGYAVTNSTFPRTIPLQAGLQKPLTPLVTDGTAGVGKERVTSELNGGVYKVPGRELTINVKVTNSTSEPLRLGEYTAAGLRFLNPDVFTTKPDFPDYLLADRGLSTDPTPIAPGETKEIAVKVQDARWDIERLSDLAYDTDSQIGGLLMFFSPTGRRFAAEIGGPVIPKFVAGDMP

SEQ ID NO: 27663 - protein, 429 aa, Methylocystis sp. SC2
MKSLNLHSMAKCATARVVRLWILGLAVAGALTTLPAATPAAAHGERSQQAFLRMRTLNWYDVKWSKTELNVNDEMELTGKVHVFSGWPQAVARPGESFLNVGEPGPVLIRKSAFVGEVPVPRTFSMDVGNDYEYKIVLKARRQGRYHVHVQINVKDGGPIVGPGQWITIKGDMKDFTNPVTLLEGSTIDLETYGITWTYIYHFFWMAAAAAWILYWFMTKGIIVRYWQVKAGKGRELIGQDEKRIGAVTLAAVLLAVLVFYASANREFPRTLPMQAGLLTGISPIDEPRSTVAVQFKGGSYTVPGRELRIRAKVTNNGKEPIRLGEFTSAGLRFLNPDVFTTRPDFPDYLLADRGLSVSDPNPIAPGETRDLEVIVQDARFDIERLSDLAYDTDSQFGGLLFFFSPSGERQRAEIGGPVIPKFQAGATL

SEQ ID NO: 27664 - protein, 331 aa, Thermococcus litoralis
MKPKVFITRQIPENGIKMIEKFYEIELWKDPKAPPRGVLLEKVREVDALVTLVTDKVDKELLENAPKLKIIAQYAVGYDNIDIEEATKRGIYVTNTPGVLTDATADLAFALLLAVARRIVEADAFVRSGEWKKSEVGWHPLMFLGYGLKGKTLGIVGFGRIGQALAKRAKGFGMKIIYYSRTRKPEAEEEIGAEYVDFETLLKESDFISLHVPLTKETYHMIGEKELKLMKPNAILINTSRGAVVDTNALIKALKEGWIAGAGLDVFEEEPYYNEELFKLKNVVLAPHIGSATHEAREGMAELVAKNLIAFAKGEIPPNLVNKDVLTSSPP

SEQ ID NO: 27665 - protein, 295 aa, Anabaena sp.
DVPVNLYRPNAPFIGKVISNEPLVKEGGIGIVQHIKFDLTGGNLKYIEGQSIGIIPPGVDKNGKPEELRLYSIASTRHGDDVDDKTISLCVRQLEYKHPESGETVYGVCSTYLTHIEPGSEVKITGPVGKEMLLPDDPEANVIMLATGTGIAPMRTYLWRMFKDAERAANPEYQFKGFSWLVFGVPTTPNILYKEELEEIQQKYPDNFRLTYAISREQKNPQGGRMYIQDRVAEHADQLWQLIKNQKTHTYICGLRGMEEGIDAALSAAAAKEGVTWSDYQKDLKKAGRWHVETY

SEQ ID NO: 27666 - protein, 296 aa, Capsicum annuum
ISKKQDEGVVVNKFRPKEPYIGRCLLNTKITGDDAPGETWHMVFSTEGEIPYREGQSIGVIADGVDANGKPHKLRLYSIASSALGDFGDSKTVSLCVKRLVYTNDKGEEVKGVCSNFLCDLKPGADVKITGPVGKEMLMPKDPNATVIMLGTGTGIAPFRSFLWKMFFEKHDDYKFNGLAWLFLGVPTSSSLLYKEEFEKMKEKAPENFRLDFAVSREQTNEKGEKMYIQTRMAQYAEELWTLLKKDNTFVYMCGLKGMEQGIDDIMSSLAAKEGIDWADYKKQLKKAEQWNVEVY

SEQ ID NO: 27667 - protein, 118 aa, Nicotiana benthamiana
DDTPPTKSHSEPRHIVQTMSEVNIVNDGHRWRKYGQKFVQGNPNPRSYYRCSIAGCPVKKHVERASHDPKMVITTYEGQHDHNMSWFRTLSQITAAPDLSLTGVSGESRLESGENKHV

SEQ ID NO: 27668 - protein, 333 aa, Alcaligenes faecalis
MKPRIVTTHRIHPDTLALLETAAEVISNQSDSTMSREEVLLRTNDADGMMVFMPDSIDADFLSACPNLKVIGAALKGYDNFDVEACTRHGIWFTIVPDLLTSPTAELTIGLLLSITRNMLQGDNYIRSRQFNGWTPRFYGTGLTGKTAGIIGTGAVGRAVAKRLAAFDMQIQYTDPQPLPQESERAWNASRTSLDQLLATSDFIIPMLPMSSDTHHTINARALDRMKPGAYLVNACRGSIVDERAVVHALRTGHLGGYAADVFEMEEWARPDRPHSIPDELLDPALPTFFTPHLGSAVKSVRMEIEREAALSILEALQGRIPRGAVNHVGAGR

SEQ ID NO: 27669 - protein, 265 aa, Vitis vinifera
MKSLGVRKGAWTQEEDVLLRKCIEKYGEGKWHLVPLRAGLNRCLKSCRLRWLNYLKPDIKRGEFALDEVDLMIRLHNLLGNRWSLIAGRLPGRTANDVKNYWHGHHLKKKVQFQEEGRKKPQTHSKTKAIKPHPHKFSKALPRFELKTTAVDTFDTQVSTSSKPSSTSPQPNDDIIWWESLLAEHAQMDQETDFSASGEMLIASLWTEETATQKKGTHSKTKAIKPHPHKFSKALPRFELKTTAVDTFDTQVSTSSKLIHVTTTE

SEQ ID NO: 27670 - protein, 556 aa, Pseudomonas syringae
MDDHFNSPSIDILYDYGPFLKKCEMTGGIGSYSSGTPTPRVAIVGAGISGLVAATELLRAGVKDVVLYESRDRIGAVWSQVFDQTRPRYIAEMGAMRFPPSATGLFHYLKKFGISTSTTFPDPGVVDTELHYRGKRYYWPAGKKPPALFRRVYEGWQSLLRDGYLLEGGSLVAPLDIASMLKSGRFEEAAIAWQGWLNVFRDCSFYNAIVCIFTGPHPPGGDQWARPEDFELFGSLGIGSGGFLPVFQAGFTEILRMVINGYQSDQRLIPDGISSLATRLADQAFDGKTLRERICFSRVGRISRDSEKIIIQTTAGEQGLFDRVIVTSSNRAMQMIHCLTDSERFLSRDVARAVRETHLTGSSKLFILTRTKFWIKNKLPTTIQSDGLVRGVYCLDYQPDEPDGHGVVLLSYTWEDDAQKMLAMSDKKTRCQVLVNDLAAMHPTFASYLLPVEGDYERYVLHHDWLTDPHSAGAFKLNYPGEDVYSHRLFFQPMTANSPDKDTGLYLAGCSCSFAGGWIEGAVQTALNSACAVLRTTGGQVSEGNPLDCINASYRY

SEQ ID NO: 27671 - protein, 534 aa, Nicotiana plumbaginifolia
MGNCCSRGQPDDNEHTSNNDQKSNTKNDQSISNNSQQQQNNGSITPSKSPDPSSKPSKNSPIGPVLGRPMEDVRKTYSIGKELGRGQFGITHLCTHKQSGEQFACKTIAKRKLVNKEDIEDVKREVQIMHHLTGQQNIVELKGAYEDKHSVHLVMELCAGGELFDRIIAKGHYTERAAATLLRTIVQIVHTCHSMGVIHRDLKPENFLLLNKDEDSPLKATDFGLSVFYKQGDVFKDIVGSAYYIAPEVLKRRYGPEVDIWSVGVMLYILLSGVPPFWAETEHGIFNAILRGHVDFSSDPWPAISHGAKDIVKKMLTIDPKQRLTAIQVLNHPWIKEDGEAPDTPLDNAVLSRLKQFRAMNNFKKVALRVIAGCLSEEEIMGLKQMFKSMDTDNSGAITLEELKQGLAKQGTKLSDHEIEQLMEAADADGNGTIDYEEFITATMHMNRMDKEEHLYTAFQYFDKDNSGFITIEELEQALREFGMTDGKDIKEIVAEVDSNNDGRINYEEFVAMMRKGTPETAANLKKRRESFVA

SEQ ID NO: 27672 - protein, 290 aa, Nicotiana tabacum
MEESLPIYVNAKQYSAILKRRQVRAKLEVQNKLVKDRKPYLHESRHRHAMKRARGTGGRFLNTQICSNLSLHLNARYKHLYGDGRWQLNYIHGSALREWYLGHFHPIWFSTQRVVVGALPPNLVLMLRASSVVMTCSSSQNSESLVSLFTCRSCRLHACWNLTTRCVIHWCRCQHRLHYKMHSYWLHSDGYSAVHPWLCYSFLFQNCNRLLHFFLGVGRPYDICVHVCCIKARLVLHVITKGNERSQTIRLFLARNCGDYGSFLHFLVERRVDHSALLSLLATVFHFLLL

SEQ ID NO: 27673 - protein, 185 aa, Sandersonia aurantiaca
MSLLSDLVNLNLTDTTEKIIAEYIWIGGTGMDLRSKARTLPGPVSDPSKLPKWNYDGSSTGQAPGQDSEVILYPQAIFKDPFRRGNNILVMCDCYTPAGSPSHQQRHIAAKLFSHPDVVVEEPWYGIEQEYTLLQKDVKWPIGWPIGGYPGPQGPYYCAAGADKAFGRDVVDAHYKACLYAGINI

SEQ ID NO: 27674 - protein, 587 aa, Methanococcus maripaludis
MKGAEAMMKALEAENVKVLFGYPGGQLLPFYDALYQSDFLHILTRHEQAAAHAADGYARASGDVGVCVATSGPGATNLVTGVATAHADSSPVVALTGQVPTKLIGNDAFQEIDALGIFMPITKHNFQIQKTSEIPKIFRKAFEIAKTGRPGAVHVDLPKDVQDDDLDLEKYPIPAEINLQGYKPTKFGHPLQIKKAAELMKIAQRPVIIAGGGVQIANATPELIKLSEYAQIPVCTTLMGKGVFPEEHPLSLGMVGMHGTQASNYSVYESDVLIAIGCRFSDRITGDLSSFAPNTKVIHIDIDPAEIGKNVGVDIPIVGDAKAILKDILIHLMKKEMVNKTEWMENVKKLQKKSMPVMEFDNTPIKPQKVIKEMMAALREVDPGLTNTVLTTDVGQNQMWMAHYFQTSAPKSFLSSGGQGTMGFGFPAAIGAKFARPDANVIAVTGDGGFLMNSQELATIAEYEIPVIVVIFDNRTLGMVYQWQNLYYGKRQCAVHLGETPDFIKLAESYGIGALRVEKPEDINEAFKTALNSGKPYLLDIIIDPSEALHMVPPGGNMTNILFPDRQEPTPKAQCFSEMKKILSPKV

SEQ ID NO: 27675 - protein, 495 aa, Saccharomyces uvarum
MTTDNAKAQLTSSSGGNIIVVSNRLPVTITKNSSTGQYEYAMSSGGLVTALEGLKKTYTFKWFGWPALQIPDDEKDQVRKDLLEKFNAVPIFLSDEIADLHYNGFSNSILWPLFHYHPGEINFDENAWLAYNEANQTFTNEIAKTMNHNDLIWVHDYHLMLVPEMLRVKIHEKQLQNVKVGWFLHTPFPSSEIYRILPVRQEILKGVLSCDLVGFHTYDYARHFLSSVQRVLNVNTLPNGVEYQGRFVNVGAFPIGIDVDKFTDGLKKESVQKRIQQLKETFKGCKIIVGVDRLDYIKGVPQKLHAMEVFLNEHPEWRGKVVLVQVAVPSRGDVEEYQYLRSVVNELVGRINGQFGTVEFVPIHFMHKSIPFEELISLYAVSDVCLLSSTRDGMNLVSYEYIACQEEKKGSLILSEFTGAAQSLNGAIIVNPWNTDDLSDAINEALTLPDVKKEVNWEKLYKYISKYTSAFWGENFVHELYSTSSSSTSSSATKN

SEQ ID NO: 27676 - protein, 377 aa, Mycoplasma mobile 163K
MKIGFPKEIKNNEFRIGVTPNIVSDLVKNKHEVLIEKNAGLEAGFSDEDFIKSGAKISTQEEVWKSPFIIKIKEPLESEFKFFKKDQVIFTYFHLATDPKLAKALMDSQAIGLAYELVRKDNKNILLAPMSVVAGKLAILNGAFYLQKQNKGFGILPGGIEGTRHGKTLVVGGGIVGQSAAWNSLIIGQNTVVLDKNEALIKQLNESKEFKNASTLSKGKFEAYVSDEKTLTEHIKDADLVVSTIHIPGAKVAKLITKTHVESMKKGSVIVDVAIDQGGSVETIIAPTSHSNPISEYKGILQYAVPNMPGATPRTASLALTNATEFYIHEIANKGFLNSIKSAKELFGGVLAYKGKMTNENIAKALKLEFVPLEKLL

SEQ ID NO: 27677 - protein, 322 aa, Mycoplasma mobile 163K
MLFTEKIKTSVKNLAKKYKVLLVDGDDSRAQEAARMLQDSDLVEVSLLVENPTNAKGLKFINMNDNKNLKTEFITKILEFRKGKETEESAKSAVETRPFYAAMLLKENYFDAVVGGLLYKTSDILRAAFKIIGSKKGQKTISSSMIMHKNDEAFLFSDISVQIKPDATQLAEIGLNASEFAKALGLKDTVAFLSFSTAKSAVSPESETVSQATEIYNSKTSGIKAIGEIQLDAAIDLKVREAKFGKSSFESKPDVFVFPDLGAGNIGYKLVQRFGNYGAIGPIVNGISKPMNDLSRGSTSEDVFYTVLISVLQAAHNEKESK

SEQ ID NO: 27678 - protein, 401 aa, Mycoplasma mobile 163K
MKKRANNMTKILVINAGSSSIKWAIFNKDTLNQEYNGLAERIGANASLGLIKMGKISKEISLPNHEVTIQELIKMWSEHKIINSPEDISLIGFRVVHGADSFNKATIISDEVIKKISDYAIYAPLHNPPAIDTIKATKKFFPKARLSAHFDTAFHTSIPKINYTYPINKDLASELGIKKYGAHGLSHNFIANKTAEILKKSKINIINFHLGNGSSLCAIENSKSIDTSMGLTPLAGVMMGTRSGDIDPSIHEFVCRQKKLSIVDFTNKLNKESGILGVSGVSNDFRDVQKAAENGNQDAKFAIDLFAQRVADISATYANKINGKLDAIVFTAGIGENASLVREKIIEKLHYSKFKLDKELNNTSPSNVGEYLLISKKDSEVPIYIVRTNEELFIAKEVKSL

SEQ ID NO: 27679 - protein, 311 aa, Mycoplasma mobile 163K
MLDYKSNFDNAMDFALKKASADWWKIIVLGILASIYVGIGYIAYIYVAAAFQGNLIGIDSVHFDGSVVVAASATFPVGLMLIVFLGGSLFTSDNLSMLAYITKKTKFSPLLRKWGYVLLGNTIGGFLIAILIRAGSIFNDNQLIVLKYIIDKKIDFQWWTIIFSAILCNIIVAGTVWASLATTQSIGKIFIIFFPIWIFAIIGFQHVVANAILFAMGWLHGDNPIIAGGIVTIGNNSVNYGKKLIDWTSIALHSNLIPALIGNWFAGSILLPYAYLSVVKIRSKSEKQRMKDNAGNLTDSEDPDKKDENKK

SEQ ID NO: 27680 - protein, 557 aa, Mycoplasma mobile 163K
MKFQELDIDDKIINNLKKIGFEAPTQIQELVISTANKNQNILGCAQTGTGKTAAFGVSIINKILKNKKNNAKSSLTTLILVPTRELSVQVNENIKLFSSNLPITSLAIYGGMRNRESHFSIFKRGLDIIVATPGRLLDYIKSGKLSLSQVDTVVLDEADLMVDMGFIDDVKEILKRTKEEKQVMLFSATMPKAIMNLVEDFMGKFELIQTESFAKPLQNIEHLAYFYTSSKPVELLQQMLKEEKIYSAIVFVKTKRDADNVENLLSKMKLKIDSLHGDKTQASRSRILRSFKEGKIQILVATDVASRGIDIDDISHVFNLNIPEDPEIYTHRVGRTGRASKVGKAISFFSKRDFFLLAKVEKEIKMEIPKKQIQIIEDVIEISDFTLNIHNKSERSSDRRSDRSSYRRDSRSSFSSSSDRSRRPENKSGNFRRERSFNSERNFDSSKNEKPIRSERSSSDSPRRERSFSSERNFDSSKNEKSIRSERSSSDSSRRERSFSSERNFDSSKNEKPIRPERPSGEFKRTRAFSTNADGQFKPSFKEKKSSRPTFRKKNLD

SEQ ID NO: 27681 - protein, 361 aa, Mycoplasma mobile 163K
MNILLENFGTRLKELRKSKQISQKELSESTGIVREQISRIENGLVNPTLDTLHKISLALNIFLHELLNFEINSKENSKLAKFTFPLKPFVKWAGGKTQLLNVLEKEIPKNFNTYFEPFVGGGALFLKLQPLHAVISDSNIDLISTYKSFQSKKNYKKMVHELLKHQNNHNENYYYKIRNLDKELNFDKELKYIKAARMIYLNKSCFNGLYRVNSKGFFNVPSGKYKRVNAYDEFLYKNLNEYFLKSKVKILNQDYKKVISLAKAGDFVYLDPPYDTLDEKKNFTTYTKNAFGKNEQKHLAETFKDLDKRGVKVMLSNHNTHFINELYKDYNIKVIHARRSINSSSSGRGKIEEVLITNYKN

SEQ ID NO: 27682 - protein, 297 aa, Mycoplasma mobile 163K
MNKKIRILVSTIIGKPNAGKSSLLNSLLKESVSIISNKPQTTRDQITGIYSDEANTEQFVFTDTPGIHKSKTELGKKMNEYSYSSIKDIDLVLFLSPIDYEVEEIDLEIISNLENVKNKIAIVTKIDLAKDHAIVEQRALFLKEKGFTNVLAYSTKNEATRNLLLSELRSYSYEGFALYENDYYTDKPMRFIAKELIRESLLESLDHEVPHNIAVEIEEYNEARDDQLTEIKAVIYVARDSQKGIVIGEGGKMIKSIGMKSRKKIEDILQEKIVLKTKVKVSKNWINDKISLKKLGY

SEQ ID NO: 27683 - protein, 711 aa, Mycoplasma mobile 163K
MQMNYKKPDDNDPLKQFGRNLTDLAKKNMLEPVIGREDEIRRIIRILSRKTKNNPVLVGEPGVGKTAIVEGLAKKIHDAQVPEDLKNKEVIEISLPSLIAGASYQGQFEERIKSLMDKIEKNQGKYIIFIDEIHLLIGTGKNSSNSTMDAANIFKPALARGQMQLVGATTIEEYRKYIESDSALERRMQKVKVAEPNIEDTITILRGIKGRFETFHNVKISDKALIAAANLSARYISDRFLPDKAIDLVDEAASTIKTEINSQPEELEKIQQKIITFETEKAALKSENTIQSNLRVEELNNELKKLNSEHKILSEKWISEKNVVIELNDKKRKIESLKHEVSKLQNEGLYEKASKIMYSDLPKIEKELKILENLNKEKNSLIKEDVTENEIAEIVSKWTMIPISKLLEKQKDKLLNLQSELKKQVKGQEEAIELVSDTILRSRANINDPNKPIGSFIFMGPTGVGKTELAKSLAYVLFDSKKQLIRLDMSEYSEKHSISKIIGSPPGYIGYENGGQLTELIRQKPYSIVLFDELEKAHPDVLNVLLQILDDGILTDAKGKTINFKNTIIIMTTNLGSDLILEKVYDPKELRKILLKFVKPEFLNRIDEIIPFKELDKDTIKEIIENELNELEKRVYQNQTIFIKFDDSIVEYISKQGYDNLYGARPLKRVIQNKIQSKIALNIISGNLKPNESYIILIENENLVIKNALVN

SEQ ID NO: 27684 - protein, 422 aa, Mycoplasma mobile 163K
MKFIDEVELELRGGKGGDGAISFRREAHVANGGPDGGDGGKGGDIYFRPNYGINTLLDLQFRKIIRAEDGENGKRKNQYGKGAEDTIIEVPFGTLVYENDKLIEDIVEERDYLIVKGGQGGRGNLKFKTPRNGAPFMNENGSFGEKKRLRLQLQILADIGLVGLPSAGKSTLLSVLSNAKPKIGDYDFTTLSPQLGLVKSSDSSYTIADLPGLIKGASEGKGLGIQFLKHIERCRVIAHIIDFGSKDKNPINAYEQILEELRLYDETLLERTQLIIANKEDLEDFETNLNLFRKKFPKLEIFQISALTTKNVNGLKNKLGEILSKAKSYRKKIEKTETTIVFEKDFEVVKKSENSFEVVGKKITDLVQRIPFNTYENLMRLNNKLKNLGVWEELIKYNVKNGDYVKIGEFELEWNNEISTYK

SEQ ID NO: 27685 - protein, 332 aa, Mycoplasma mobile 163K
MSHCNNIEENVIFGTSNSIELATEIAKKTNIPFATFEKVVFADGEIKVKSNVVVRNRIVYIIFSGSSPVNENLMELFLFIDSLKRASAKEINVVLTYFPYARQDRKNKGRESIGAKAIADILERMGSTKIISIDLHNSSIQAFFDIPTDDLKGQFILAKELKKSNEKFTVASPDHGGAVRARQLAELISDSIKIAIVDKRRTGPNKSEIVGVLGEVEGKNIVIIDDIIDTGGTIIKAAEMLKSLGAKKIIVAATHGLFSNGFQIFEESEAIDRVIVTNSVATVNNLAKFKKLTIAGVEDLISSVIEANTKNESISKLYDTWRKTITNFNEDK

SEQ ID NO: 27686 - protein, 471 aa, Bacillus cereus G9241
MSNLLKKKSVTQLLEHNQSKTLTKTLGAFDLIMLGVGSIVGTGVLVLAGLVAARDAGPAVIFLFVLAAIICGFIALCYAEIASTLPASGSVYTYSYATIGEFVAHLVGWSLLLIYIVATAAVAAGWTGYFHNLIKGFGLEIPKALVTIPSHGGIVNLPAVIITLILAWMLSRGTKESKRINNIMVLIKIGMILLFITVGIFYVKPMNWIPIAPYGLSGVFTGGAAILFAFTGFDILATSAEEVKDPKRNLPIGIIASLIICTIIYIMVCLVMTGMVSYKELNVPEAMAYVMEVVGQEKVAGAIAAGAVIGLMAVIFSNMYAATRVFFAMSRDGLLPKSFAKVNKKTGAPTFITGLAGIGSSIIAGFIDLKELVNLVNIGSLVTFALVCLSVIMLRKSHPNLKRGFMVPFVPVLPCVAIVCCVFLMLNLPLRTWVYFSIWITIGGVIYFLYSIKHSNLNEETISKLHDRIAR

SEQ ID NO: 27687 - protein, 486 aa, Bacillus cereus G9241
MGSYYIRSYGNEKTGGESKVKSLLRKKALSTESPKQLDRTLTALDLTFLGIGAVIGTGIFVLTGIVAAKHSGPGIMLSFLIAAFTCACVAFCYAEFASSIPVSGSVYTYAYMTVGEVVAFIVGWCLMLEYLLAVAAVAVGWSGYLQSLLQGFNVHLPAIIASAPGVGKGGLIDLPAVCILLIITGLLSFGIRESARINNIMVLIKLAVIIAFIVAGAKYVKPENWTPFIPFGYDGIITGAATVFFAFLGFDAIATAAEETKKPQRDLPIGIIGSLLICTVLYMIVSFVLTGMVPYTQLDVSDPVAFALHFVGEDTIAGLLAVGAMTGMTTVLLVVMYGQVRVSYAMSRDGLLPKALARVNKRVKIPLLNTWITGVVAALLAGLLDLHVLANLVNIGTLTAFTFVCCAVLILRKTHPDLKRGFRTPFVPVLPVVAILCCLYLMINLSKTTWISFAVWLIVGLCFYFFYSRKHSHLATEKTNDEKKKA

SEQ ID NO: 27688 - protein, 401 aa, Bacillus cereus G9241
MEKKKVVLAYSGGLDTSVAIKWLQEKNYDIIALCLDLGEGKDLAFVKEKALSVGAIKSYMIDVQEEFANEYALMAMQAHTLYEGKYPLVSALSRPLIAKKLVEIAEQEGATAVAHGCTGKGNDQVRFEVSIQALNPYLEVIAPVREWKWSREEEIAYAKENNVPIPIHLDSPFSIDQNLWGRSNECGILEDPWAAPPEDAYEMTLALEDTPNKPEFVEIGFEAGVPTTLNGTAYPLSELIKTLNALAGKHGVGRIDHVENRLVGIKSREVYECPAAMTLITAHKELEDLTLVKEVAHFKPMIEQKITELIYNGLWFSPLKQALHAFLQETQKNVTGMVRVKLFKGHAIVEGRKSEYSLYDEKLATYTAQDEFNHDAAVGFISLFGLPTKVYSQVNQKKVEA

SEQ ID NO: 27689 - protein, 397 aa, Bacillus cereus G9241
MSKIIAINAGSSSLKFQLFEMPSETVLTKGLVERIGLEDSIFTITVDGEKQKEITNIPDHAVAVNMLLKKLTENGIVKSLDEIGGIGHRVVHGGEKFADSVLITDEVLADIEELSDLAPLHNPANVVGIKAFQEVLPNVPAVAVFDTAFHQTMPESAFLYSLPYEYYEKFGIRKYGFHGTSHKYVTERAAELLGRPLESLSLLSCHLGNGASIAAVEGGKSIDTSMGFTPLAGVTMGTRSGNLDPALIPYIMEKTGQTVEEVVNVLNKKSGMLGLTGFSSDLRDIIAKEEEGDHRAKVALDVFVSRIHKYIGSYTARMKGVDAIIFTAGVGENSAIIRERVLEGLEYMGVYFDAKRNNVFGEEAFINFPHSPVKIIVIPTDEEVMIARDVLRLGDIG

SEQ ID NO: 27690 - protein, 607 aa, Bacillus cereus G9241
MCGITGWVDWKEDLSNQHVILEKMANRIQHRGPDAEGFWFSPRAAFAHRRLIVIDPEGGTQPKTFRAGDYTYALTYNGEIYNFRELREQLRKCGHAFETHSDTEVLLHAYLEWKEDCVQHLNGIFAFALWDDQKQQLFLARDHLGVKPLFYTERNDSIIFGSEIKALLAHPSVPAEIDADGINEIFGLGLFRTPGCGVFKHIQEVRAGHSITFTRDKKVVQKYWNLESKVHTDSIEDTSSHILSILQDTVKRQLIADVPLVCMLSGGLDSSGITALAGKEFAAENKTLHTYSVDFVNSAKDFELTFARTGLDAPWVKRVSEHVGTSHHDIIVNAEELANHLFVPLHAKDLPSAGEMETSLYLLFCEMKKDATVALSGESADEVFGGYPWFHQEELLYVDKFPWLTNWKNTSPLLLNEVSNQCNLENYIDTRFQEAILEVPTLEGESKKSAKQRQMFYLFLTRFLPFLLDRKDRMSMAVGFEVRVPFCDYRLVEYLWNVPFNIKSIDNIEKGILRRALKPALPDDIRNRRKSAYPTSQDPHYLQTIRHLSLDMCSNKNNPIFSLINHSTLLAIANQSNKEINNFEARSAMEYMLQVNEWLKTYHIHIA

SEQ ID NO: 27691 - protein, 327 aa, Bacillus cereus G9241
MYQSLMTVRETQIAIKEVKTFFEDQLAKRLELFRVSAPLFVTKKSGLNDHLNGVERPIEFDMLHSGEELEIVHSLAKWKRFALHEYGYEAGEGLYTNMNAIRRDEELDATHSIYVDQWDWEKIVQKEWRTVDYLQKTVLTIYGIFKDLENHLFEKYPFLGKYLPEEIVFVTSQELEDKYPELTPKDREHAIAKEHGAVFIIGIGDALRSGEKHDGRAADYDDWKLNGDILFWHPVLQSSFELSSMGIRVDSKSLDEQLTKTGEDFKREYDFHKGILEDVLPLTIGGGIGQSRMCMYFLRKAHIGEVQSSVWPDDLREACKKENIHLF

SEQ ID NO: 27692 - protein, 409 aa, Bacillus cereus G9241
METIVQKFGGTSVGSVERIQHVANLIIEEYERGHSIVTVVSAMGKSTDELVALANAITENPSKREMDMLLSTGEQVTISLLTMALQAKGYNAISLTGWQAGITTESVHNSARITDIHTDRIQSYLAEGTIVIVAGFQGVSENHEITTLGRGGSDTTAVALAAALNATKCDIYTDVTGVYTTDPRVVKDAYKLDEISYDEMLELANLGAGVLHPRAVEFAKNHNVILEVRSSMEQENGTIVKGECNMEQQSIVKGIAFEDNITRITLKGLEQGSLSTVFSTLAAAHINVDIIIQSITNEGTVHLSFSIHSNDLRETLEVLEQNQEALHYESVEYENHLAKVSIVGSGMVSNPGVAANMFTTLKEEDIHIKMVSTSEIKVSVVIDRLHLVTGVEALHQSFMAKIEPLVQMI

SEQ ID NO: 27693 - protein, 571 aa, Bacillus cereus G9241
MEQQYTTYEKLQCEDVTGAGHVIQCLKNLGVTTVFGYPGGAILPVYDALYGSGLKHILTRHEQAAIHAAEGYARASGKVGVVFATSGPGATNLVTGLADAYMDSIPLVVITGQVATPLIGKDGFQEADVVGITVPVTKHNYQVRDVNHVSRIVQEAFYIAKSGRPGPVLIDIPKDVQNAKVTSFFNEEVDIPGYKPELVPDSMKLREVAKAISKSKRPLLYIGGGVIHSDGSDELIKFARENRIPVVSTLMGLGAYPPGDSLFLGMLGMHGTYAANMAVTECDLLLALGVRFDDRVTGKLELFSPYSKKVHIDIDPSEFHKNVTVEYPVVGDVKKALHMLLHMPICTQTDEWITKTEEWKAEYPLSYIQKESELKPQHVISLVSELTNGEAIVTTEVGQHQMWAAHFYKAKNPRTFLTSGGLGTMGFGFPAAVGAQLAKEEELVICIAGDASFQMNIQELQTIAENNIPVKVFIINNKFLGMVRQWQEMFYENRLSESKIGSPDFVKVAEAYGVKGLRATNSTEAKQVMLEAFAHEGPVVVDFCVEEGENVFPMVPPNKGNNEMIMKRWEE

SEQ ID NO: 27694 - protein, 493 aa, Bacillus cereus G9241
MYRLSQYETPLFTALVEHSKRNPIQFHIPGHKKGQGMDPEFREFIGHNALAIDLINIAPLDDLHHPKGMIKEAQDLAAAAFGADHTFFSIQGTSGAIMTMVMSVCGPGDKILVPRNVHKSVMSAIIFSGAKPIFMHPEIDPKLGISHGITIQSVKKALEEHSDAKGLLVINPTYFGFAADLEQIVQLAHSYDIPVLVDEAHGVHIHFHDELPMSAMQAGADMAATSVHKLGGSLTQSSILNVKEGLVNVKHVQSIISMLTTTSTSYILLASLDVARKRLATEGTVLIEQTIQLAEQVRDAINDIEHLYCPGKEMLGTDATFNYDPTKIIVSVKDLGITGHQAEVWLREQYNIEVELSDLYNILCLVTFGDTESETNTLIGALQDLSATFKNKADKGVRIQVEIPEIPVLALSPRDAFYSETEVIPFENAAGRIIADFVMVYPPGIPIFTPGEIITQDNLEYIRKNLEAGLPVQGPEDMTLQTLRVIKEYKPIS

SEQ ID NO: 27695 - protein, 385 aa, Bacillus cereus G9241
MEQFINPRVKDIQISGIRQFSNMIQNYDNLISLTIGQPDFPTPSLVKEAAKRAITENYTSYTHNAGLLELRKAACNFVKDNYDLHYSPENETIVTIGASEAIDVAFRTILEPGTEVILPAPIYPGYEPIIRLCGATPIFIDVRETGFRLTAEALEKAITEKTRCVVLPYPSNPTGVTLSKEELQDIVDVLKDKNIFVLSDEIYSELVYEQTHTSIAHFPEMREKTIVINGLSKSHSMTGWRIGLLFAPRYLAGHILKVHQYNVTCATSIAQYAAIEALTAAKDAPKMMRHQYKKRRDYVYNRLIQMGLTVEKPTGAFYLFPYVGHLTSSSFDFALDLVKEAGLAVVPGTAFSEYGEGYLRLSYAYSIETLKEGCDRLEAFLQQKS

SEQ ID NO: 27696 - protein, 391 aa, Bacillus cereus G9241
MHNVVITAAVRSPIGTFGGALKNVTPVELAVPVLQEAVKRGGVEPHEVDEVILGHCIQRTDEANTARTAALAAGFPDTVTGYTIQRQCSSGMQAIMSAAMQIQLGVSDVVIAGGVEAMSSSPYALKQHRWGQRLQHGEIRDTVWEVLEDPIHHIMMGETAENLVEQYEITREEQDEVALRSHTLALKAIESGYFDDQIVPITIKERRKEVVFSKDEHPRADITAEKLAGLKPAFRKDGSVTAGNASGLNDGSAVLVLMSEEKAKEKGLQPLARIVGYSVAGVDPKIMGIGPAPAIRKGLEKVDWSLEDADLLEINEAFAAQYLAVEKELGLDREKVNVNGSGVGLGHPIGCTGARITVSLIHELKRRGLEKGIASLCVGGGIGVALFIEAL

SEQ ID NO: 27697 - protein, 127 aa, Bacillus cereus G9241
MFRTMMRAKLHRATVTEANLNYVGSITIDEDLMDAVNIVENEKVQIVNNNNGARLETYVIRGERGSGVVCLNGAAARLVQPGDKVIIICYGLVAEENIHKQEPKIAVLDDNNQIIEMLGAEKAGTIL

SEQ ID NO: 27698 - protein, 395 aa, Bacillus cereus G9241
MKLAKRVAALTPSATLEITAKAQALKAEGHDVIGLGAGEPDFNTPEHIMDAAHKAMLEGHTKYTPTGGLQALKQEIVKKFTRDQGIAYDPSEIIVCNGAKHALYTLFQVLLDEGDEVIIPTPYWVSYPEQVKLAGGKPVYVEGLEDNEYKITAKQLREAITEKTKAVIINSPSNPTGMIYSKEELQQLGEVCLEHDILIVSDEIYEKLIYGGAEYTSIAQLSNALKEQTLIINGVSKSHSMTGWRIGYAAGNKQLIKAMTNLASHSTSNPTSIAQYGAIAAYAGSQEPVETMRQAFEERLNIIYDKLIQIPGFTCIKPQGAFYLFPNVKEAVALSGYETVDDWAKALLEEEKVALVPGTGFGAPNNVRLSYATSLEQVEKALERIHTFMKSKVQA

SEQ ID NO: 27699 - protein, 283 aa, Bacillus cereus G9241
MLEQGLDYVVKLAKSKKQMLDTNPMQYFIRATLAGIYIGFIIVLCFKLGNFFHIADSPATYLAASMFFGIALVLIIYGGAELFTGNTMYFTVATLRKETTIADTLRNWVACYAGNLAGALFFALLFYATGIFEAIDHGHFMNKVVEGKMNTPTMQLFFKAILCNWLVCLACFLPSQVKGDTAKIMMMMLLVFTFFLSGYEHSIANLSLFALSLVSPHPETISFAGAIHNLIPVTIGNIIGGSVFVGMVYHYLTKKEPDVKQEETELVATQQEEIIPLQAHMKH

SEQ ID NO: 27700 - protein, 566 aa, Bacillus cereus G9241
MSSKTEEKLATGAQLLLESLEKEGVEVIFGYPGGAVLPLYDALYDCEIPHILTRHEQGAIHAAEGYARITGNPGVVIATSGPGATNVITGLADAMIDSLPLVVFTGQVATTLIGSDAFQEADIMGLTMPVTKHNYQVRKASDLPRIIKEAFHIARTGRPGPVVIDLPKDMVVEQGERCSDVQMDLPGYNPNYEPNLLQINKLLQAIRFASKPLILAGAGVLHAKASKELTSFARKYEIPVVHTLLGLGGFPPDDELFLGMGGMHGSYTANMALYECDLLINIGARFDDRLTGNLAYFAKEATVAHIDIDPAEIGKNVPTEIPIVASAKQALQVLLQPEGRKENHHEWISLLKNRKEKYPFSYKRNSESIKPQYAIDMLYEITKGEAIVTTDVGQHQMWAAQYYPLKTPDKWVTSGGLGTMGFGFPAAIGAQIAKPDELVIAIVGDAGFQMTLQELSVLKEHSLPVKVFILNNEALGMVRQWQDEFYNQRYSHSLLSCQPDFVALANAYGIKGVRIDDPLLAKKQLQHAIELQEPVVIDCRVLQSEKVMPMVAPGKGVHQMEGVEKR

SEQ ID NO: 27701 - protein, 323 aa, Bacillus cereus G9241
MAKILVAGKIPEIGLELLKDHDVEMYDKEGLISLDELTERVKDKDALLSLLSTKVTKEVIDAASNLKIVANYGAGYDNIDYLYAGEKGIAVTNTPKVSTEATAELTFALLLAAARRIPEGDTLCRTTGFNGWAPLFFLGREVHGKTIGIIGLGEIGKAVAKRAKAFGMNVLYTGPNRKPDAESELEATYVTLEELLQTADFITINCAYNPKLHHMIDEEQFKMMKKTAYIINASRGPIMHEAALAHALKTNEIEGAALDVFEFEPKITEELKGLKNVVLAPHVGNATFETRDAMAETAVRNILAVLNGEEPVTPINQKVFVTK

SEQ ID NO: 27702 - protein, 540 aa, Bacillus cereus G9241
MSYEKVWANNEKLNQTEKNKLKKDGLEIFNDIPYYAENGFESIPKEEWDAFKWAGLYLQRPKEAGYFMMRVNIPSGIITNAQAEVLASIAEDYGRDVIDITTRQAIQFHWLEIHQIPDIFKRLARVGLSSAGACGDITRNITGNPLAGIDANELFDTTGIVKEVYDYFQHNEEFSNLPRKFKMSISSNIYNSANAEINCVAFTPATKEIDGEKKVGFHIKVGGGLSARPYLADELDVFVLPEEVKTVAIAIATIFRDFGYREKRHLARLKFLVADWGAEKFKEKLIEYTGPLQSKGESALKGWNAGYFYGVQDQKQDGLKYVGFNVPVGRLHAEEMFEIARIAKQYGNGQIRTCNSQNFIIPNVPPENVTGLLNEPLFDAISASPKSFIGHAVSCTGIEYCNLALVETKERLRKIAEYLDTQIALDVPVRIHMVGCPNSCGQRQIADIGLQGVKMKTKEKGIVQAFEIYVGGTLLDGGAYNQKLKGKIDGEDLPDVLASFISYFKENKLPAETFYDFVGRIGIDTLQIVLNNVLEEVIAS

SEQ ID NO: 27703 - protein, 381 aa, Bacillus cereus G9241
MERIYLDHAATSPTHPEVVEKMIPYMTETFGNPSSIHFYGRQTRHAVDEARRACARSIHANPNEIIFTSGGTEADNLALIGVARANRHKGNHIITTQIEHHAILHTCELLEREGFEVTYLPVDETGRVQVSDIQKALTEETILVSIMFGNNEVGTMQPIAEIGKLLKEHQAYFHTDAVQAYGLVEINVKEFGIDVLSISAHKINGPKGVGFLYAGANVKFEPLLIGGEQERKRRAGTENVPSIVGLQHAILLAEKTREQKNAQYEEFKDIMVSVFKNEDITFEVNGNLEYRLPHVLNISFTGMNIEPFLVNLDLAGIAVSSGSACTAGSIDPSHVLVAMFGKDSDQIRSSVRFSFGLGNTKEQVEKAAYETVKIVKRLTQN

SEQ ID NO: 27704 - protein, 380 aa, Bacillus cereus G9241
MMIYLDYAATTPMSMEALQTYMKAASQYFGNEQSLHDIGGTASSLLQVCRKTFAEMIGGKEQGVFFTSGGSESNYLAIQSLLNAQNKKHIITTPMEHASIRSYFQSLQSKGYTITEIPVDKSGLIRLVDLEAAITEDTVLASIQHGNSEIGTVQNIAEIGALLKKYNVLFHSDCVQTFGKLPIHVFEMGIDSLSVSAHKIYGPKGVGACYINPQTRWTQIFPGTSHERGFRPGTVNVPGIAAFLTAAENILKNQQEESLHFKELRSYFLEQIRTLPLEIEVEGHSTSCLPHIIGVTIKGIEGQYTMLECNRRGIAISTGSACQVGKQEPSKTMLAIGKTYEEAKQYVRFSFGQQTTKDQIDTTIHALHTIGNQFYRGVKS

SEQ ID NO: 27705 - protein, 428 aa, Bacillus cereus G9241
MFVDQVKIYVKGGDGGNGMVAYRREKYVPKGGPAGGDGGKGADVVFIVEEGLRTLMDFRYQRHFKADRGQHGMSKGQHGRKSEDLLVKVPPGTVVKDEKTGQILADLVTHGQTAVIAKGGRGGRGNSRFATATNPAPEIAENGEPGQERDVILELKVLADVGLVGFPSVGKSTLLSVVSSARPKIAEYHFTTIVPNLGVVETGDNRSFVMADLPGLIEGAHAGVGLGHQFLRHIERTRVIVHVIDMSGLEGRDPYEDYVTINNELKEYNLRLTERPQVVVANKMDMPDAEENLQAFKEKVGDEVKIFPISAVTRQGVRDLLFEVANLIETTPEFPIHEVADESDTSVMYKFDTEGVKFEITRESDGTFVISGYDIEKTFKMTDFSRDESVRRFARQMRGMGIDEALRARGAKDGDIVKILEYEFEFID

SEQ ID NO: 27706 - protein, 226 aa, Bacillus cereus G9241
MKLSQDLKELLASVEYKMQIKKGSFIFQEGMEATELYIIHSGKVQISKLSADGQELTLRICSEYDIIGELTLFTDNAKYLLNSKCLEDVEVGVIKREALEKALLQKPALVFEFMKWISEHLRRMQTKFRDLVLHGKKGALYSTLIRMTNSYGVLKENGILIDLPLTNQELANFCATSRESVNRMLNELKKQGTISVHKGKITIHDLQFLKREIACEDCSASVCSID

SEQ ID NO: 27707 - protein, 396 aa, Bacillus cereus G9241
MKQFELSRAAESLQPSGIRKFFDLAANMKGVISLGVGEPDFVTPWNVRQACIRSLEQGYTSYTANAGLLELRQEIAKYLKKQFAVSYDPNDEIIVTVGASQALDVAMRAIINPDDEVLIIEPSFVSYAPLVTLAGGVPVPVATTLENEFKVQPEQIEAAITAKTKAILLCSPNNPTGAMLNKSELEEIAVIVEKYNLIVLSDEIYAELVYDEVYTSFASIKNMRDHTILISGFSKGFAMTGWRLGMIAAPVHFSELMLKIHQYSMMCAPTMSQFAALEALRAGNDEVIRMRDSYKKRRNFMTTSFNEMGLTCHVPGGAFYVFPSISSTGLSSAEFAEQLLLEEKVAVVPGSVFGESGEGFIRCSYATSLEQLMEAMKRMERFVENKKRTKHNTFCP

SEQ ID NO: 27708 - protein, 330 aa, Bacillus cereus G9241
MHDKAKGDGIVKPKVYIAEPVPTFVENYLSEHCDYEKWEQNEKVPRDVLLEKIQDKDGLLNFGSAINEELLEAAPNLKVVSNISVGYDNFDLQAMAKHNVIGTNTPYVLDDTVADLVFALMLSAGRRVCELDSYVKNGEWNAEIGKEHFGLDVHHRTIGIIGMGRIGEAVAKRAKFGFDMNVLYYNRRRKEEAEQKFDATYCDLQTLLKQSDFIVLLTPLTDETYHLIGEKEFLLMKETAIFINASRGKTVDEEALIHALAEKKIFAAGIDTFTQEPIQKDNPLLSLQNVVTLPHIGSATLKTRQQMAMTAAENLVAGLQGKTPPNIVRG

SEQ ID NO: 27709 - protein, 390 aa, Bacillus cereus G9241
MREAVIVAGARTPIGKAKRGSLKTVRPDDLGALVVKETLKRANYEGPIDDLIFGCAMPEAEQGLNMARNIGGLAGLSYDVPAITINRYCSSGLQSIAYGAERIMLGHSEAVLSGGAESMSLVPMMGHVVRPNSRLVEAAPEYYMGMGHTAEQVAVKYGISREEQDAFAVRSHQRAAKALAAGNFADETVSVDVTLRTVGSNNKLQEETIIFAQDEGVRAETTLDILGKLRPAFNVRGSVTAGNSSQMSDGAASVLLMDREKAVSDGMKPLAKFRSFAVAGVPPEVMGIGPIAAIPKALKLAGLELSDIGLFELNEAFASQSIQVIRELGLDEEKVNVNGGAIALGHPLGCTGAKLTLSLIHEMKRRNEQFGIVTMCIGGGMGAAGVFELL

SEQ ID NO: 27710 - protein, 438 aa, Bacillus cereus G9241
MHHDEKNKIGLTVALSIVVGTIIGSGVFMKPGSVLDYSGSSNMAILAWVIGGLLTLASGLTVAEIGAQIPKNGGLYTYLEEIYGSFWGYLSGWMQTIVYGPAIIGTLGLYFSSLMINFFYLDKVWNLPIAIGTVVFLGVVNSMGTKYGGIVQTITTIGKMIPIVLIVVLGFWKGNSDIFNVVVPISENQSIGMAILATLFAYDGWILLASIGGEMKNPTKLLPKAMTVGILIVTAAYVLINLALLNVLPATQIVDLGENATATAAGMLLGEYGGKIISIGIIVSIFGCLNGKILTFPRIPMSMAERGQLPFAKFIAKESPRFKTPANAITVEIILGIILMIISDPNKLSEISVFIIYIFYVMTFIGVFILRKRNKNKERAYSVPLFPIVPIVAILGSFFVIGSAIINDPISCFLSIGIVFTGLPVYWYLNKKNKNEVS

SEQ ID NO: 27711 - protein, 1143 aa, Bacillus cereus G9241
MLNKKNTWTPSLFRDYKNAEHDACGIVSVMEKRKFPTKENIDLCIQSLVKMNHRAGFINGEGDGIGIHIDVPKALWNEKLKSSGYNPTIVDHPHFIVGHFFLNKNENIINLKNHIRTQLNNENFTILFESDNVINSDALGPLGKQEEPLFWQVALIAENEVANIEQSLFAVTIKIEENEAIHVASLSRDHVVYKVLGAGDTLVAYYNDLQHPLIASTMTLGHNRYSTNTLSNFFRVQPFSVLGHNGEINTIAKLRDQAEMIHVPLTAGGSDSQDLNRTLETLLVQYDYSLFEAMDILFPPIINEIKLYEPHLQDLYTYIREAWGHFAQGPAGIISRYKDEAVFSVDSLGLRPVWKVETESSYIFSSEPGVVSPTEYVAEPKPLAPGEKVGLKWNKQDELVLYEYDDYQTQVYNRFKKRVDVTNYHLHLSIPETKEIPDSCDFMQVETKQYVAFGWDREHIQLLEQMATKGVEPIRSLGHDSPLAALDTDRRNIADFIKESVAVVTNPAIDRDREVEHFSTRTILGERPSLLSGAKQPFVVEMLSPIILEGSTAQSIAEELHTITYEQLIQLFNTHSSISTISATFSQTETLQCALSRISSEAITAVNDGVSLLLIDDANAHLNERLWIDPHLVTAKVHQVLSENKLRRNCSLVIRSGALRSLHDIVTLYGLGADSINPYLLFATVNDGTKTPITNLYHALNKGLEKVISTIGIHELRGYGRLYSSIGLHEEIANILQITNFLGSNDLAFSLESLAEDAQMRADDYNNPKVRMRKSFHIFPRIWKAIGDVAKGNSYDDYRDKLSELEENNPIAIRHLVQTKEAKHVVPAEEVSIRIQNHDLPFIISSMSFGSQNEIAFRAYAEAADQLNMISLNGEGGEIKDMIGKYPHTRGQQVASGRFGVNAELLNSSNLIEIKIGQGAKPGEGGHLPGSKVTAKIAEARNATIGSDLISPSNNHDIYSIEDLAQMITEIKTANQLAKVAVKVPVVPNIGTIAVGIAKAGADFINISGFDGGTGAARIHALQHVGLPVEIGVKAAHNALLEANMRHKVEIWADGGIRSVNDALKIMLLGANRIGFGTLSMIAIGCTTCRGCHLDTCHVGIATQIESEAQAKEHGLRRFVPRELESAVAGLLHLFTTFGEKLK

SEQ ID NO: 27712 - protein, 516 aa, Bacillus cereus G9241
MIKKENSVFYISILLTTLFIIWGITPASWIQGYDLQSVTSSLNSFILNKFGWFYSLLMTAMIILAAYLAFSKYGSIRLGKDGEKPKYSYPSWLSMLFGAGMGIGLLFYGIAEPISHFTDPLTGKAGTEESAKLAMQYSFFHWGLFPWSLYAMVALTIAYFTFRKQKGSTIGATVTPLFNRSKNSPIGKTVDILAVLATVFGIVPSVGIGAQQIAGGLSYLFPSIHNTLFTQLILIAIFAVLYLTSAQTGLDRGIKYLSNLNFSLAGILLISFLLLGPTVFIMKYFTSTLGSYIGDLPSMGLNLGAFNEKSSSWIENWTIFYWGWWISWSPFVGTFIARISKGRTIREFIFGVVLVPTLICTFWFAVFGGTAIHMEMFQSLGIADEIAKNGTEIGLFAVISHLPFSTFLTIIGLILVATFFVTSADSATFVVSMQTSNGSLSPKNSLKLIWGLTIAIIAAILLQAGGLNALQIAAIIAALPFSIVVVLMVISLFKELRKEDVNLQTKEVSQKIKKVM

SEQ ID NO: 27713 - protein, 439 aa, Bacillus cereus G9241
MLGIGAIIGTGVLVLTGLVAARDAGPAVIFSFMIAAIVCGFAALCYAEVASTLPVSGSVYTYSYATIGEFIAHLMGWTLLSVYVVTTAAVAGGWTGYFNNLVSGFGLEIPTELLKIPSQGGIVNLPAVVITLVLTWLLSRGTKESKRVNNIMVLIKIGIVILFIAVGAFYVQPENWTPFAPYGISGIFAGGAAVFFAFLGFDALATSAEEVKNPQRDLPIGIIASLIICTIIYVVVCLVMTGMVSYKELDVPEAMAYVLEVVGQDKVAGVIAVGAVIGIMAVIFAYIYATTRVFFAMSRDGLLPKSFAKINKKTEAPVFSTWLTGIGSALIAGFIDLKELSNLANIGALLTFAMVGVSVIILRKTHPNLKRGFVVPLVPTLPIISIACCLFLMFNLPLTTWIYFGIWLAIGVVVYFVYSKKHSHLKDDGSSQDNLEQAN

SEQ ID NO: 27714 - protein, 578 aa, Bacillus cereus G9241
MQGIKRYLQFVKPYRWLIAITIMIGLVKFGIPLIMPWLLKYIIDDVIQGGGSLQEKTSQLITAIGIAFFIFAVLRPPIEYYRQYFAQRIANTILYDLRKHIFGHLQKLSLRYYSNTKTGEIISRVIHDVEQTKDFVITGLMNVWLDTATIAIAIIVMFSMNIKLTFVALLILPIYVVAVKYFFGRLRKLTKERSQALATMQGYLHERIQGMQVTRSFALEEYEGKQFEKRNNEFLTKALTHTSWTARTFSAVNTLTDLGPLLVIGFAAYEVVQGQLTLGTMVAFVGYMDSLYSPLRRLVNSSTTLTQSFASMDRVFELLDEKYDIVNVPGAVQTKKLNGEVIFDNVSFRYNSDEKEVLHNLSLTMLPGEKVALVGASGGGKSSLASLIPRFYDVSSGAVYVDGIDVRKYDMRNLRSHIGIVLQDNLLFSDTIGANILYGNPKATEEEVIAAAKAAQIHDFIIELPDGYDTVVGERGVKLSGGQRQRVAIARVFLKNPSLLILDEATSALDLENERYIQEALQTLAADRTTIIIAHRLATITHVDTIIYIEDGEIKETGSHEELMKKEDIITIYINFNI

SEQ ID NO: 27715 - protein, 596 aa, Bacillus cereus G9241
IGKYPHTRGQQVASGRFGVNAELLNSSNLIEIKIGQGAKPGEGGHLPGSKVTAKIAEARNATIGSDLISPSNNHDIYSIEDLAQMITEIKTANQLAKVAVKVPVVPNIGTIAVGIAKAGADFINISGFDGGTGAARIHALQHVGLPVEIGVKAAHNALLEANMRHKVEIWADGGIRSVNDALKIMLLGANRIGFGTLSMIAIGCTTCRGCHLDTCHVGIATQIESEAQAKEHGLRRFVPRELESAVAGLLHLFTTFGEELKRLTGNLGYTNLQEIVGRSDLLEQVRGKNLLDLCNLLQTIEHPSVTKTEHVPEKQFETIHSPHSKELVGVGVEQRVMGGLESCYRVRSKLYEDTKLEPLTLKYTNGSIPGNGLGAYNSENLFIHVNGGAQDGIGKTSFGGGIYITKAKGKDGLYYNGSVGKGFGYGAQKGALYVQGNADARAGIRLSGADMIIGGRMTKPLRKKEQGNIGAYSNIKGFAFEYMTNGRALVLGDPGPWICAGMTGGVVYLRHDSSLGLTEQALKRRIAKGANVTLQPISKNGVQDVTELLLDYIRVLNEHEQYEEVALLTTLFDDIQQQFFEIIPKKEQADPSISTE

SEQ ID NO: 27716 - protein, 571 aa, Bacillus cereus G9241
MLRKFFSYYKPYKGLFILDFSCAVVAGLLELGFPLIVNQFIDKLLPGQNWTLILWACFGLLAVYMLNAGLQYVVTYWGHMLGVNIETDMRQKLFDHIQKLSFRFFDNNKTGHLISRLTNDLMEIGEIAHHGPEDLFIAVMTLVGAFSFMMMINWKLALLTFFVIPFLLWLALYFNKKMTGTFRRLFSDVADFNACIENNVGGIRVVQAFGNEKFEKEQFAVNNARFRTTKLMAYKIMALNSSISYMLMRLVTLFVLICGTWFVLQGELTYGGFIGFVLLTNIFFRPIEKINAVIESYPKGIAGFKRYVELLETEPDIVDSKDAMEVKHVHGDIQYNNITFGYENKEPILNDISLKIHAGETVAFVGPSGAGKTTLCSLLPRFYEQSSGSIQIDGIDTKDMTLSSLRKQIGIVQQDVFLFSGTIRENIAYGNLKASEADIWQAVKRAQLEDLIYSQPDGLDTVIGERGVKLSGGQKQRLAIARMFLKNPPILILDEATSALDTETELAIQKSLAELSVGRTTLVIAHRLATIKNADRIVVVNKDGIAEQGSHDELIEQDGGYSRLYEAQFSS

SEQ ID NO: 27717 - protein, 471 aa, Bacillus cereus G9241
MKQIFQKKPIAKLMQESKQKTLARTLGALDLTMLGIGAIVGTGIFVLTGVVAAKHSGPAIILSFAIAALACAFAAFCYAEFASSVPVSGSVYTYTYATMGEVFAFLIGWDLMLEYLLATSAVANGWSAYFQSLLKGFGIHIPTILSSAPGTGKGGIIDLPAVLIILVMTVLLSRGVRESARVNNIMVFIKIAVVLIFIFAGFNYVKPENWTPFMPFGLDGVMAGAATVFFAFIGFDAVSTAAEEVKRPQRDLPIGIIASLLICTVLYIVVSLILTGIVPYGQLNISDPVAFALQFIGQDGLAGVISVGAITGITTVMLVMMYGQVRVSYAMSRDGLLPKRLAKVHPKFKTPFLNTWTTGIIAALISGLIDLNVLAHLVNMGTLSAFALVAVAVIVMRRTHPDLPRAFKAPLVPILPALTVIFCLYLMLQLSGTAWISFGIWMVIGIAVYFLYSRKHSALNNSKDEEDVANL

SEQ ID NO: 27718 - protein, 67 aa, Bacillus cereus G9241
MAVTGQVKWFNNEKGFGFIEVPGENDVFVHFSAIETDGFKSLEEGQKVSFEIEDGNRGPQAKNVIKL

SEQ ID NO: 27719 - protein, 592 aa, Bacillus cereus G9241
MAETLAKRGPDDNKVWIKGNVAFGHKRLIVVDPEGGKQPMTCLKDEANYAICYNGELYNTEDIRKELLRRGYTFKGHSDTEVLLASYMEWKEECVDHLNGIYAFAVWDEQKEQVFIARDRLGVKPLFYKYDSGRLLFGSELKAILAHPDVKVEVTLEGLSEIFGLGPSRTPGHGIYAGIKELRPGHAMTFSKNGLCIWRYWNVESKKHEDSFEETVEKTRFLLQDAITRQLVSDVPLCTFLSGGVDSSAITAIAAKEYERSGKGQLHTYSIDYEDNDKYFKANAFQPNSDAPFIHLMTETFQTIHHRCVISNEQLAQYLTEAVLVRDLPGMADIDSSLLWFCREIKQDFVVGLSGECADEIFGGYPWFYREDDLQSSAFPWMRSTEAREQLLKKEWRNKLNLQQYVQRRYEESIQEVPILEGESPIEAKRRQLFYLNMVWFMTTLLDRKDRMSMGASLEVRVPFADHRLVEYAWNIPWEMKMYKNREKGLLRKALEGLLPNEILYRKKSPYPKTHNPHYTKAVTVWLQDLLTDKGSILHELFDKEQLSGLIESGGSAFQSPWFGQLMTGPQLLAHLAQIHVWFKEYGVNIKE

SEQ ID NO: 27720 - protein, 251 aa, Bacillus cereus G9241
  misc_feature (12)..(12): Xaa can be any naturally occurring amino acid
  unsure (1)..(251): unsure at all Xaa locations
DFAGGNVVHITXGVAGLVLAIFLGKRKNINGSSPHHLPFTMLGAGLLWFGWFGFNVGSALSLNDVALTAFINTNIAAAASALTWMLSEWFFQSKPTAMGAACGVVSGLVAITPACGFVTPFSALLIGAIGGVLCFGAVFFLKTKFGYDDTLDAFGCHGIGGTWGGIATGLFATTTVNGDGANGLFYGNASLLLKQLVAIGATYAFTIIMTYAIIKAINFFLPVRVDEHEEHMGLDISMHGEKAYEYTERVN

SEQ ID NO: 27721 - protein, 301 aa, Bacillus cereus G9241
MNRKGYKSGFVSIIGRPNVGKSTFLNRIIGQKIAIMSDKPQTTRNKIQGVYTENDSQVIFIDTPGIHKPKHKLGDFMVKMAQTTLKEVDIVLFMVNAVEGFGRGEEFIIEKLKETKQPVFLVINKIDQVHPEQLLELIDQYRKLHDFAEIVPISALDGNNVESLIGTIKKYLPEGPQYYPDNQVTDHPERFIIAELIREKVLHLTREEVPHSVAVVIDAIQKREGGAVYINATIVVERPSQKGIIIGKQGKMLKEVGKRARFDIEALLGSKVFLEVWVKVQKDWRNKMSQLRDLGFREDEY

SEQ ID NO: 27722 - protein, 480 aa, Bacillus cereus G9241
MAGMLYIGYWSYKKTSDLSDYMLGGRGLGPAVTALSAGASDMSGWMLMGLPGAMYATGLSSVWIAIGLLIGAYANYLILAPRLRTYTEVANDSITIPDFLENRFKDRTKILRFVSAIVILVFFTFYASAGLVSGGRLFENSFNLDYKIGLFVTVGVVVAYTLFGGFLAVSWTDFVQGCIMFIALVLVPIVAFTDVGGVTETFNTIKQVDASHLDMFKGTTILGIISFLAWGLGYFGQPHIIVRFMAITSIKDLKTSRRIGIGWMTISIIGAMLTGLVGIAYYAKNNATLQDPEMVFVTFSNILFHPYITGFLLSAILASIMSSISSQLLVISSAVTEDFYKTFFRRNASDKELVFIGRLSVLLVAMIAVVLAYHPSDTILTLVGYAWAGFGSAFGPAILLSLYWKRTNKWGVLAGMIVGAIVVITWVQIPGLKATMYEMVPGFFCSLLAVIVVSLLTKEPIKAIHREFNEMEAVLEEETK

SEQ ID NO: 27723 - protein, 524 aa, Bacillus cereus G9241
MSETLLVIISILLLLMLLLIVFFIITFFIKKRTHHSILKLHPYLGRMRYLLEKIGPEFRQYWFDHDTDGKPFSRYDFQSVMFLAKYRSEILGFGSKRDFEASGYYIANTLFPVLTEELSVNVTQEREGKKYVIHKEGLFSRREKLTADTTNLWLYEEDDAIIVGENRKYPWKLYGMFGASATSYGAIGENYILASGFGAKMAGGSWINTGEGGVIPEHLHTGANIVAQIGPGLFGYRDEDGNFSMEKFMDKAKESNIKAFELKFGQGAKIRGGHLEGQKVNEKIASVRNVRVGETINSPNRFSFLNNAADTLYFIQRLQETGGKPIGMKIVIGQQQPLEDLFKTMKELNIYPDFITIDGSEGGSGATYKSMADCMGLPLIPALLTFIDTANHYGVRNKFKVFASGKLITPDKVAIALAIGADAVSSARGFMMASGCIMALQCNSGQCPSGVATTNPHYQKALDPYEKKWRVMNYVVSMRYSLFSLAAAAGVKSPRHLTREHIVFKDEVGRVVPLSELFPIINQT

SEQ ID NO: 27724 - protein, 300 aa, Bacillus cereus G9241
MIKDWEEGVEIFGAALIGAPLSKPSISHSGASFAPKTIRAMLDAYSTYAITEEHDMKESVLYDCGDITMHVTDIQESHNRIAKTVSHVTKVNPNMIPIVLGGDHSISFPSITGFANSKGKIGIIQFDAHHDLRNLDDGGPSNGTPFRSLLENDIITGKQLVQIGIRNFSNARAYHEYAKEHGVTVYTMKDVREREIKDIMTESIEVLRKQGVTSIYISLDMDVLDQAFAPGCPAIGPGGMDSMTLLDAIEFLGKEPLVQGMDIVEIDPTLDFRDMTSRVAAQVIMSFLLARETVRKQVSI

SEQ ID NO: 27725 - protein, 276 aa, Bacillus cereus G9241
MLKMKKLFTLIVFSCLFVLVVAGCGSKKDEAKETNTKQGGAVEQIKKRGKLVVGVKNDTNLFGLKNPSTGQVEGFDVDVAKALAKKILGDEKKLELKEVTSKTRIPLLKNGDIDAIIATMTITEERKKEVDFSDVYFKAGQSLLVKKGSNIKSIDDVKKGVKVLAVKGSTSTNNIRQKSPEATVLEFENYSEAFTALKAGKGDVLTTDNAILYGMAKQDSNYEVVGKIFTDEPYGIAVQKGADDLTKEINSLLKDMKANGEYDKLYEKWIGQKQEK

SEQ ID NO: 27726 - protein, 632 aa, Bacillus cereus G9241
MCGYVGCLYNTAKRYSETEKIQFENMTNLLYHRGPDDQGYFRDEHVQFGFRRLSIIDLDAGHQPLAYENERYILMFNGEIYNYIELREMLIKQGACFSTQSDTEVIVALYAQVKEECVNYLRGMYTFVIWDRQEKKLFGARDHFGIKPLYIAQQNDITFFASEKKSILHVMQDKGVNPTALQHYFTYQYGPEPETLTNDINKIEPGHYFIKEIGKELEVYRYWKPYFNASDKTKEDHIRAIRDVLYDSVKVHMRSDVPVGAFLSGGIDSSIIASIAKEINPNLLTFSVGFEHRGFSEIDVAKETAEKLGVKNYSVLVTPQEFMNEFPKIMWHMDDPLADPAAVPLYFVAKEARKHVTVVLSGEGSDELFGGYNIYREPNSLKMFSYIPTSGKTVLKALSGVLKEGFKGKSFLERGCTPIEERYYGNAKIFREEEKIKLIKSYNESVNYKDVTKPLYNEIKNYDDVSKMQYIDMYTWLRGDILLKADKMSTAHSLELRVPFLDKEVFDVASKIPTELKIANRTTKVILREAVRGIVPDHVLDRKKLGFPVPIRHWLKDEMYDWALNIIKESKTEHLIDKQYVLNLLEAHCADKGDYSRKIWTVIAFMVWHQIYIEHKYDTNLFSEECRVYNLV

SEQ ID NO: 27727 - protein, 257 aa, Bacillus cereus G9241
MTHLLETKNLSVSFGEHHVIKDVNVTVQKGKLISIIGPNGAGKTTLFNLLSGQISPTKGEVYFKGQEITNLSISDRTRLGIGRSFQLTNIFPELTVLENVRLSVQSFVQDYYSFFPSPAKFKQQVGEARRFLKTVLLQEKEHVLAKDLAHGEKRKLELAMLLALKTDVLLLDEPTAGISVEEVPAILQVIENIKKHPESTIVLIEHKMDMVLGLSDHLIVLFHGELLAEGLPEEMMKDERVQSAYLGGLYSGTITSE

SEQ ID NO: 27728 - protein, 333 aa, Bacillus cereus G9241
MVNSTSNRIKVYFGVCMLICLSVFPFVNDSRSLLILFTQIFIFAIFAMSFDVLLGYTGIVSFGHCMFFGIGAYGVALLFDRQGVSITNFLIGLVAAIIISAIVSYIIGLLSLRLKSHFYAMLTLAISQLFFVLAEKWRGLTHGGDGFTFGVPDVFRDRFTFYYVTLICLLIIFVLLRLFTKSSIGKVLKAISQNEQRVEALGYKVLHYKIIASIVAGVVAAISGGLFVITLRFVNTTVFSIEMTLNALLMTMIGGVGTLIGAIAGAGIIESLKYYLSELATAYPIFERWTIILGLLYIIVLLVFPKGLVGTVKSLKNMKRSNKEKSAEVEQNV

SEQ ID NO: 27729 - protein, 522 aa, Bacillus cereus G9241
MRVKSRKTDWPVFLISGGSLLLFVIAVFLNKSYVEGVINSSFAASIKYFGAFWQVLLIGTFIVAMCMAFSKYGRVKLGGLEKPEISTAKWLAIIMSTLLAGGGVFWAAAEPMYHLMTVPPIHEGISAGTKEAVMPALAQSYMHWGFLAWTILGTISAVVMMYGHYHKGMPLKPRTLLYPIFGEKLRKSLLGTMIDAFAIIAVAAGTIGPIGFLGLQASYGLQALFNIPDVFTTQLAIIICVVAVSTISAVTGINKGIQIISDLNVKLAILLMVFVLLCGPGGFIIDSFVSSFGFYINEFIPMSTYRGDTGWLGSWTIFFWGWFIGYGPMMAILVSRISRGRTIREIIVAIGIIAPIITTFWFTILGGSGVFYELMNPGSISSALSESGMPAAMIAITEQLPLSHIIGPAFLLLTILFVVTTGDSMAYSISMAVTGDGDPRISLRIFWSLIMGTVAAILLYMGEGSINALQSFIVVTAVPVSVLLFPMLWLAPKVAGELALKQGIVKEEDKTSFLFQKASRSK

SEQ ID NO: 27730 - protein, 551 aa, Bacillus cereus G9241
MSFAIASGVKPEYGIYTTCIAGILISLFGGSKYQIGGPTGAFVPILLGIVITYGYEDLLLAGLLAGIILCLMGIFKLGSLIKFIPRPVTIGFTSGIAVIIFTGQIASFLGLTGIKKHEEFIANLQEIFTHINTTNFYSVITALICFLVILITPKILPKVPGSLVGIMVSTIIATVFFSDHVPTIGTAYGTIPSTLPQFGIPEITVERIKQLIGPAFVIAVLGGIESLLSAVVADGMTNSKHNSNKELIGQGIANIVTPLFGGIPATGAIARTATNIRSGAVSPMSGVIHGGFVLFTLLLLAPYASHIPLASMSPILMVIAWNMSERKHFIHILKMKTGDSFVLLVTFLLTVFTSLTTAVEIGLILAVILFTKRMSNMLVISKVLPDHTRKNEKLLPHVVNKAHDCPQISIYTIEGPLFFGAAQTFEQNILATIHYKPKVLILRMGKVPFIDTTGESYFRNIVQHFKKQGGVILVSGIQSELKTTLDKNGLYAEIGEENFFDHTGEAINCALRQLNTNKCIGCKHFAFHECTELAQQSQDMNAIKNKANALD

SEQ ID NO: 27731 - protein, 437 aa, Bacillus cereus G9241
MLSIKGQKWRNWTGNVEGTPHYTMYPESIQDVVEVIELARKKGKKIRVVGSGHSFTPLVQTEEILVSLDELKGIVNIDTEEMVAEVWAGTKLHELGKLLEEKGYAQENLGDIDSQSIAGAISTGTHGTGITFGSLSTQVIEITAVLSTGETIVCSETENVEYWRGFQLSLGMLGIIVRIKLKVIRAYSLVYESEKQSLSTVMNKLEEYKKNRHFEFFVFPYSDEVQVKVTNETTGKKSDLKWHKLKVELLENKMFSLLSKGCKWFPSISKGVSRLSAKAVPNTKIIGPSYEVFATSRAVPFYEMEYSVPSKYMQAVVEEISNLIEKKKYKVHFPIECRYVKRDDIWLSPAYGRDSAYIAVHMYKGMKYAAYFGEVEKIFLKYEGRPHWGKMHTLTYEKLQNIYPELHSFLKVRKLLDEAEMFSNPYTEKLFTIMKKS

SEQ ID NO: 27732 - protein, 490 aa, Bacillus cereus G9241
MTALLIIILFLFLALFLGIRAQHGKDMNLEQWSVGGRGFGTIFVFLLMAGEIYTTFTFLGGSGWAYSKGAPTFYILGYGALAYILSYFLLPPVWKYAKEHNLVSQPDFFVKKYKSQALGLIVSIIGVISIIPYLVLQLKGLGIIVSEASYGRVSPVIAVWIGAIVITIYVMVSGIHGSAWTAALKDIMILFIVMFLGIYLPYHYYGGFQPMFEAVEAAKPGFLSLPDEGMSISWFVSTIVLTALGFYMWPHTFASAFSAKNEKVFRKNAAIMPLYSLVLLFVFFAGFAAILQVPGLKGGDVDLSLFRLALQTFDPWFIGIIGSAGVLTALVPGSMLVMAASTLLAKNIYGTMVPSASDRQVAKAAKLFVPVVTLVAVLFTFKGGETIGALLLMGYSIVTQLFPALVCSLFPRQVITKQGAIAGMGIGLLVVAYITLSGSTIATMFPGFPQYIKDLNVGIVVLLINMIVMFIVSGFTKNVSIKADNIIVEK

SEQ ID NO: 27733 - protein, 479 aa, Bacillus cereus G9241
MNWYVIIPMIISFIVVFLIGVYASRRVQATAHNKFLQEYFLGGRELGGLLLAMTMIATYGSASSFIGGPGIAYNMGLGWVLLSAIQVVTGYIVLTVIGKKFAIIARKMEAITLIDYLKGRYNNKAVVILSALCIIIFLFSATVAQWVGGGRLIESLTGLSYTTALFLFTFSVLVYVLIGGFRAVALSDTLLGIIMLVGTTIILIATVIAGGGIEKIMQELVQINPNLITPFGADGSLTKTYVTSFWILIGIGVVGLPQISVRAMSYKNSKAMHQALIIGTIVVGTIMIGMHLTGVFARVVLPGITVPDKVMPLLAMEVLPPWLAGVFLAAPMAAIMSTVNSLLLLVSSSIIKDIYVNYINKDAADSTIRKGSLWITAIVGLLVYAAAIKPPDFLIWLNLFSFGGLEAAFIWPIVLGLYWRKGNATGALASILVGVGSYMCIHLFYPNPFGIHTVVFPICFAFIAYIVGSMSIVKKHSIG

SEQ ID NO: 27734 - protein, 234 aa, Bacillus cereus G9241
MEELVMAFHKPEQIAELVIEAGVQKVSQTLPAMLILGFLGGAVFPVGLMLVVLAGGELITGNMMSLSMALYAKKITLASVLNNWVWITFMNFVGAIFVAYCFGHLGGLTEGDYLNKTVAIAEGKLHESFGRTLILAIGCNWLVCLALWLAYGTSDFIGKIIGIWIPIMAFVVIGFQQVVANMFVISAVIFAGHLTWMDLARNFVPVFIGNVIGGAGFVGFAYFACYQKQHSNMK

SEQ ID NO: 27735 - protein, 458 aa, Bacillus cereus G9241
MSLLIKKTMDEEKKKVLNQTLGAIDLTLLGIGAIIGTGIFVLTGIVAAKHAGPAIVLSFILASIVCACVAFCYAEFASTVPVSGSVYSYTYMTLGEIFAFIVGWCVMLEYLLATSAVAAGWSAYFQSLLLGFNIHIPTIFASAPGMGKGGIIDLPAVLIILVVTFLLSRGAKESARINNIMVIIKLAVIVGFIVVGTQYVKPENWQPFLPFGFHGVVGGAATVFFAFLGFDAVATAAEEVKRPQRNVPIGLLVSLFICTVLYVGVSFVLTGMVPFTELNVADPVAYALRTVGEDRIAGLLSVGAIAGLTTVLLVAMFAFVRVSYSMSRDGLLPKRLSSVHKRLQTPFFNTWVTGILAALLAGLVDLNLLANLVNMGTITAFVFVSIAVIVLRKTHPNMKRPFRAPLVPFLPIVSIVSCIYLALNLSKLTLISFVAWIIIGVFIYFVYAKKHSNVRNRV

SEQ ID NO: 27736 - protein, 410 aa, Bacillus cereus G9241
MKIIVQKFGGTSVRDENGRKHALHHIKKSLDAGYKVVTVVSAMGRKGEPYATDTLLSLVNQEESHISNREQDLLLSCGELISAIVFSNMLNENGIKAAALNGAQAGFITNDDFTNAKIIEMNCDRIHEELEDVDVIVVTGFQGQTKKGDTTTLGRGGSDTSASALGVALHAEYIDIFTDVEGVMTADPRIVKDARHLQTVTYNEICNMAYQGAKVVHPRAVEIAMHAKVPLRVRSTYSDSEGTLIAAYDGATKGQDVEERPVTGIAHVSNVTQIKVLAKETAYDIQQHVFKEMANEGISVDLINISPTGVAYTVNDNVSARAVEVLKQLGYEPIVTEHCAKVSIVGAGMAGIPGVTAKIVTALAEKGIQILQSADSHTTIWVLVKETDLVEAVNALHSAFELSKEKQLEQ

SEQ ID NO: 27737 - protein, 402 aa, Bacillus cereus G9241
MLSAKTIEIVKSTVPLLQEKGVEITTRFYEILFSEHPELLNIFNHTNQKKGRQQQALANAVYAAATYIDNLEAIIPVVKQIGHKHRSLGIKAEHYPIVGTCLLRAIKEVAGAPDEVLNAWGEAYGVIADAFISIEAEMYEEAAHKEGGWKDFRNFVVVKKVKESDVITSFYLKPEDGGKVSSFIPGQYVTVQINIEGETYTHNRQYSLSDAPGKEYYRISVKKEKGVDTPDGKVSNYLHDHVKEGDTLPVSAPAGDFVLNMDSTLPVVLISGGVGITPMMSMLNTLIEQNSKRNVCFVHAAINSNTHAMKEHVEAVDNEYEQVKSYTCYSAPTEKDLEMKNFDKEGFVEREWLQTIIPTTEAEFYFCGPVAFMKQINAAITDLGVKQEHIHYEFFGPAASLQ

SEQ ID NO: 27738 - protein, 492 aa, Bacillus cereus G9241
MSTQMLTLTSISIYMLGMLVIGYFAYKRTSNLTDYMLGGRTLGPAVTALSAGASDMSGWLLMGLPGAMFSVGLSSSWIAIGLTLGAYANWLYVAPRLRTYSEIANNSITIPEFLEHRFHDKSHMLRLVSGLVIMIFFTFYVASGLVSGAVLFENSFGMNYHVGLFIVAGVVVAYTLFGGFLAVSWTDFVQGIIMVVALILVPIVTIMNSNGLGPAFDTIRSVDPTRLDIFKGASTLGIISLFAWGLGYVGQPHIIVRFMAISSVKELKSARRIGMSWMIFSVVGAMFTGLIGIAYYSQQELTLSNPETIFLELGKILFHPLITGFLLAAILAAIMSTISSQLLVTSSAVTEDLYRTFFKRSASDKELVFVGRMAVLVIALVGCALAFKQNDTILALVGYAWAGFGSSFGPAILLSLYWKRMTKWGALAGMISGAATVIIWTQFKFLKEFLYEMIPGFTISLLVIVIVSLLTQPSKETTEQFENFEKQHSDNL

SEQ ID NO: 27739 - protein, 272 aa, Bacillus cereus G9241
MSVFTPEEITELAANSGRKKAHLSLLPMLILGFFGGAFIALGYLLDIHVIGTMPKAWGSFTSFLGAAVFPIGLILVILAGGELVTGNMMTVSMAWIQKKITLFYFIRNLIIVTLSNFIGAVFVAYFFGHIVGLTEGAFLAKTVSIAQAKLQDTPLQAFISAIGCNWLVCLAVWLSMGSKEFIGKIIGIWFPVMTFVAIGFQHVVANMFVVPAAIFAGHLTWIEYFPNFIFVFFGNLVGGMLFVALPYFISYNKKLPSNKEQTELKKKSVSAK

SEQ ID NO: 27740 - protein, 372 aa, Bacillus cereus G9241
MEVATLSVNRILVINPGSTSTKIGVFDNERPVLEETIRHDVEQIGKYKRIIDQYEFRKETILEVLHSHGINISKLNAVCGRGGLLRPIEGGTYTVNDAMLEDLKNGFSGHHASNLGGILAYEIASGLNIPAFIVDPVVVDEMEPVARISGIAGMERKSIFHALNQKAVARKVAKQLNHKYEDLNLLVTHMGGGITVGAHKKGRVIDVNNGLNGEGPFSPERAGTVPVGQLVEMCFSGEYYRDEMIKKLVGQGGLVSLIGTNDAIKVEQMVEKGDPEATLIYKAMAYQVAKEIGGASAVLHGKIDAIVLTGGLAYSKILVDEIKERVDWIADVIVHPGEDELEALAEGALRVLREEEAPKEYVVREKETVARG

SEQ ID NO: 27741 - protein, 505 aa, Bacillus cereus G9241
MRKLTKTFIVSLTLCIAFTLWGIIPESIIGKGSLGNVTTAIQTALVSKFGWFYIISVSIILGVSIFLIVSKYGSIRLGKDDDEPDYSYMTWFAMLFSAGMGIGLVFWGVAEPLNHLYAPPFGEGATEESARLALRFSFFHWGLHPWGLYAFVALCIAYFTFRKGKASTISATVGPLFKGGDHGRIAHSFDVLAVFATVFGVATSLGLGAKQIAGGVSYLTSIPNSLTTQLVIIAIVTVLFMLSAQTGLDKGIKYLSNTNIIFAFALMIIVLFAGPTNFIMNYFTSTIGSYIQELPSMSFRLSPLDEGGNQWIQSWTIFYWAWWIAWSPFVGTFIARVSRGRTIREFVIGVLLVPTVIGALWFSVFGGTGIHMELFGDAHIFDKVKEMGTEVGLFAMFDQMGSFGSALSVLGILLIATFFITSADSATFVLGMLTTHGSLNPPNRIKMIWGIVLAAIASTLLYIGGLEALQTAAIIAAFPFVFVIFFMMAALFKELQKEGRMKRHK

SEQ ID NO: 27742 - protein, 393 aa, Bacillus cereus G9241
MSKTVILSAARTPVGKFGGSLKDVKATELGGIAIKAALERANVSASDVEEVIFGTVIQGGQGQIPSRQAARAAGIPWEVQTETVNKVCASGLRAVTLADQIIRTGDQSLIVAGGMESMSNSPYILRGARWGYRMGNNEVIDLNVADGLTCAFSGTHMGVYGGEVAKEDGISREAQDEWAYRSHQRAVSAHKEGRFEEEIVPVTIPQRKGDPIVVAKDEAPREDTTIEKLAKLKPVFDKTATVTAGNAPGLNDGGAALVLMSEERAKQEGRKPLATILAHTAIAVESKDFPRTPGYAINALLEKTGKTIEDIDLFEINEAFAAVAIASTEIAGIDPEKLNVNGGAVAMGHPIGASGARIIVTLIHALKQRGGGIGIASICSGGGQGDAVMIEVH

SEQ ID NO: 27743 - protein, 586 aa, Bacillus cereus G9241
  misc_feature (37)..(37): Xaa can be any naturally occurring amino acid
  misc_feature (221)..(221): Xaa can be any naturally occurring amino acid
  unsure (1)..(586): unsure at all Xaa locations
MEVRNETKKKGSWRQFLRLIQDTNPPKGILVFALLMXLLSTGASLFIPMLTKGLVDNFSLSSISTGQIVGLVAFFIMQTVAAGLSIYLLNYIGQKIVAGLRERLWKKVLILPVSYYNQNRTGDTISRMTNDTGVVKTLISEHLSNLLTGGISIVGSLIVLFVLDWKMTLLLLTVIPLSVLILVPLGRKMYKILKALQDETASFTSVLTQVLSEIRLVKSSXTEKREYETGNTGIQKLLQFGLKEGKVQALISPVMSFVLMALLVIIVGYGGMRVSSGALTTGELVAFILYLVQIIMPMSQLSMFFTQFQKAIGATERINTILEYEVEDHETGAKVTNAKQPIVLENVHFEYNEEEQVLKNIDFTIESGKVTAIVGPSGSGKTTLFSLLERFYEPTSGAIKLGKDSITNYSLQSWRRQIGYVSQDSPLIDGTIRDNICYGVEGEVTDEEIEKVAAMAYVDAFIHDLPNGYATEVGERGVKLSGGQRQRIAIARALLRNPQILMLDEATSSLDSKSESVVQKALNNLMKGRTTLVIAHRLSTVVDADKIIFIEKGNLTGSGTHDELLRTHDMYREFATQQLKIKEAAL

SEQ ID NO: 27744 - protein, 451 aa, Bacillus cereus G9241
MKNFLELGISETFNHTLRENGITEATPIQEQAIPVILSGKDIIGQAKTGTGKTLAFVLPILEKIDPECSDVQALIVAPTRELALQITTEIKKMLVQREDINVLAIYGGQDVAQQLRKLKGNTHIVVATPGRLLDHIRRETIDLSNLSTIVLDEADQMLYFGFLYDIEDILDETPGSKQTMLFSATMPKDIKKLAKRYMDEPQMIQVQSEEVTVNTIEQRVIETTDRAKPDALRFVMDRDQPFLAVIFCRTKVRASKLYDNLKGLGYNCAELHGDIPQAKRERVMKSFREAKIQYLIATDVAARGLDVDGVTHVFNFDIPEDVESYIHRIGRTGRAGGSGIAITFVAAKDEKHLEEIEKTLGAPIQREIIEQPKIKRVDENGKPVPKPAPKKSGEYRQRDSREGSRSDSRRGSRNGSRSDSRNSSRNENNRSFNKPSNKKGSTKQGQQRRGR

SEQ ID NO: 27745 - protein, 561 aa, Bacillus cereus G9241
MIHLKTQYTVSTYLLDRLSELGIEHIFGVPGDYNLAFLDDVIAHENVEWIGNCNELNAAYAADGYARIKGIAALITTFGVGELSAINGIAGSYAENVPVIKITGTPPTTVMENGALVHHTLGDGKFDHFSNMYREITVAQSKLTPEHAAEEIDHVLRACWSAKRPVHIQLPIDVYNKPINKPTEPILHKPVVSNKDALDKMLLHATSKINSAKKPVILADFEVDRFHAKEYLYQFVEKTGFPIATLSMGKGIFPEKHSQFIGIYTGDVSSPYLRKRIDESDCIISIGVKLTDTITGGFTQDFTKEQVIEIHPYTVKIIDKKYGPVVMKDVLQQLSNVIEHRNEETLDIKPFISESLSITEKFNPKPQMVTQKRFWQQIYHFLQENDVLLAEQGTPFFGSAAIPLPNNTTYVVQPLWGSIGYTLPALLGTQLANVSRRNILITGDGSFQLTVQELSTILRQNLKPIIFLINNNGYTVERAIHGQNEPYNDIQMWDYTKLANVFGSKEKSLTCKVENEIELAEVLTDITLNNKQLTFIEVVMSQGDQPELLAKLGERFGKQNS

SEQ ID NO: 27746 - protein, 598 aa, Bacillus cereus G9241
MRNFQGQFANKGGRNATKMGKAKNTKGTVMRVWNYMGYQKAALTFVIFLVFVTTLLGLLGPYLMGVIIDQYIVPKDLSGTARMCLLLIAIYGVTVFLTWLQTFVMVNVALKTIQKIRQDIFEKIQTLSLRFFDVRSQGDLMSRVTNDIDNLNQALTQSVVQIISSALTFLGVTIAMFALDWILAIVTLITVPIMFFVTKKLVAYSGKNFAKRQKDLGELNGFIEEAITGADVTTLYGKEKETVQNFNKINEQLRVSATKADTFSAFIFPSMNFINNLGMGLVIGTGSVMVLNGMTTVGVIAAFINYSRQFSRPLSQFATLMNTIQAAVAGGERVFEIMDEVPEIKNKKDAFVVQNLQGHVALENVSFGYEENKTILKEVSLKARPGETIALVGPTGSGKTTIINLLTRFYDIQQGQIHIDGKNIKEYDINSLRGKIGVVLQDTYLFAGTIMDNIRYGRLDASDEEVINAAKAASAHSFIKHLPNQYETKIASEGSNLSQGQKQLLAIARAILADADILILDEATSNIDTRTELQIQEGLNNLMRGRTSFVIAHRLKTIEKADQILVIKDGSIIEKGNHESLMEDRGFYFDLYTSQFKI

SEQ ID NO: 27747 - protein, 175 aa, Bacillus cereus G9241
MTNIQAIFIDRDGTIGGDTTIHYPGSFTLFPFTKASLKKLKANHIKIFSFTNQPGIADGIATIADFSQELKGFGFDDIYVCPHKHGDGCECRKPNTGMLLQAAEKHGLDLTQCAVIGDRWTDIVAGAKVNATTILVRTGAGYDALHTYRDKWAHIEPNYIAENFEDATNWVLNQL

SEQ ID NO: 27748 - protein, 633 aa, Bacillus cereus G9241
MNRIFRNTIFYLLIFLVVIGIVSYFNGSTQKTTSVSYDKFITKLEKGEVRNVQLQPKNGVFEVKGQFNNSSQGEQFVTYAPNTEELQKKINDKAQGAEVKYQPAEETSAWVTFFTSIIPFVIIFILFFFLLNQAQGGGSRVMNFGKSKAKLYNDEKKKVRFRDVAGADEEKQELVEVVEFLKDPRKFAEVGARIPKGVLLVGPPGTGKTLLARAVAGEAGVPFFSISGSDFVEMFVGVGASRVRDLFENAKKNAPCIIFIDEIDAVGRQRGAGLGGGHDEREQTLNQLLVEMDGFGANEGIIIIAATNRPDILDPALLRPGRFDRQITVDRPDVNGREAVLKVHARNKPLDENINLRAIATRTPGFSGADLENLLNEAALVAARQDKKKIDMSDIDEATDRVIAGPAKKSRVISEKERNIVAFHEAGHTVIGVVLDEADVVHKVTIVPRGQAGGYAVMLPKEDRYFMTKPELLDKITGLLGGRVAEEIVFGEVSTGAHNDFQRATGIARRMVTEFGMSDKLGPMQFGSSQGGQVFLGRDFHSEQNYSDAIAHEIDMEMQTIMKECYARAKQILTENRDKLDLIAKTLLEVETLDAEQINHLCDYGRLPERPTSSADVKVNINMKKDDEESEDK

SEQ ID NO: 27749 - protein, 473 aa, Bacillus cereus G9241
MNQNRIPLYEALIEFKERRPLSFHVPGHKNGLNFPQEAVGEFKDILSIDVTELSGLDDLHSPFECIDEAQQLLADVYGVNKSYFLINGSTVGNLAMILSCCGEHDIVLVQRNCHKSIINGLKLAGANPIFLDPWIDEAYNVPVGIHDEIIKEAIEKYPNAKALILTHPNYYGMGMDLEASIAYAHAHKIPVLVDEAHGAHFCLGGAFPKSALAYGADIVVHSAHKTLPAMTMGSYLHINSRLVKEEKVSTYLSMLQSSSPSYPIMTSLDIARFTIARIKEKGHDEIVEFLRKFKEELSAIPQIAILQYPLQDELKVTVQTRCQLSGYELQSLFEKVGIYTEMADPYNVLFILPLQVNKTYMKAIEMIRVALQYYEAKDKTESIRYTYKGEISLLPYTYKQLEEYETKVVSVEEAVGMVAAEMVIPYPPGIPLIMYGESITSEHKEQIMHLEKAGARFQGSTKYMKVYDIESRF

SEQ ID NO: 27750 - protein, 467 aa, Bacillus cereus G9241
MYTVLLATSVHTYKKQLDHPIMSDVGKLLPTKIKRVESATDEHSLIKLVQDANVSGEKISIAGMQHSQGGQTYYPHGTMLDMKGYNKILEFDPEKKRITVQSGVTWNDIQKKINPYGLAVQVMQSQNIFTVGGSLSVNVHGRDIRHEALIDTVESFRLLMADGTVRNVSREENADLFPYVIGGYGLFGVILDVTLKLTNDELYETHTKMLDYKEYTSYFKEKVKKDENVRMHLARISVAPNSFLREMYVTDYTLAQNQNMREEYSELKEETIIAAPKFLLGLSRYSDWGKDTFWDIQRSYFERTDGKYETRNNVMRSDSAFMEYENPNRTEVLQEYFVPIDSFAEYIDDLRNVLNEEEFNLLNITIRYVEKNENAVLSYAKDDMFALVLLINQGRSEGEIKKTEDVIQKMVDVTLKHNGSYYLPYYSYPTKEQLKRAYPRIEEFLQKKKEADPKERFVNLFYREYTK

SEQ ID NO: 27751 - protein, 160 aa, Bacillus cereus G9241
MSNPYNIAEAVKESDLVIGAVLIPGAKAPKLVTEEMIQSMEPGSVVVDIAIDQGGIFETTDRITTHDNPTYEKHGVVHYAVANMPGAVPRTSTLALTNVTVPYAVQIANKGYKDACLGNTALLKGINTLDGYVTFEAVAEAHGLQYADAKELLEKAPALS

SEQ ID NO: 27752 - protein, 608 aa, Hordeum vulgare subsp. vulgare
MDRARGSALLLGVLLAGSLFALCAAKEEAKKLGTVIGIDLGTTYSCVGVYKNGHVEIIANDQGNRITPSWVGFTDGERLIGEAAKNQAAVNPERTVFDVKRLIGRKFEDKEVQRDMRLVPYKIVNKEGKPYIQVKIKDGETKVFSPEEVSAMILGKMKETAEAYLGKKINDAVVTVPAYFNDAQRQATKDAGVIAGLNVARIINEPTAAAIAYGLDKRGGEKNILVFDLGGGTFDVSILTIDNGVFEVLATNGDTHLGGEDFDHRIMDYFIKLIKKKHGKDISKDNRALGKLRREAERAKRALSNQHQVRVEIESLFDGTDFSEPLTRARFEELNNDLFRKTMGPVKKAMDDAGLEKTQIHEIVLVGGSTRIPKVQQLLRDYFDGKEPNKGVNPDEAVAFGAAVQGSILSGEGGDETKDILLLDVAPLTLGIETVGGVMTKLIPRNTVIPTKKSQVFTTYQDQQTTVSIQVFEGERSMTKDCRLLGKFDLSGIPAAPRGTPQIEVTFEVDANGILNVKAEDKGTGKSEKITITNEKGRLSQEEIDRMVKEAEEFAEEDKKVKERIDARNQLETYVYNMKNTVGDKDKLADKLESEEKEKMEGSWPNNN

SEQ ID NO: 27753 - protein, 376 aa, Oryza sativa
MAMWRAAAGHLLGRALGSRAAHTSAGSKKIVGVFYKGGEYADKNPNFVGCVEGALGIREWLESKGHHYIVTDDKEGLNSELEKHIEDMHVLITTPFHPAYVSAERIKKAKNLELLLTAGIGSDHIDLPAAAAAGLTVAEVTGSNTVSVAEDELMRILILLRNFLPGYQQVVHGEWNVAGIAYRAYDLEGKTVGTVGAGRIGRLLLQRLKPFNCNLLYHDRLKIDPELEKEIGAKYEEDLDAMLPKCDVIVINTPLTEKTRGMFNKERIAKMKKGVIIVNNARGAIMDTQAVADACSSGQVAGYGGDVWFPQPAPKGPPWRYMPNHAMTPHISGTTIDAQLRYAAGVKDMLDRYFKGEDFPVQNYIVKEGQLASQYQ

SEQ ID NO: 27754 - protein, 535 aa, Saccharomyces cerevisiae
MSITSEELNYLIWRYCQEMGHEVSALALQDETRVLEFDEKYKEHIPLGTLVNLVQRGILYTESELMVDSKGDISALNEHHLSEDFNLVQALQIDKEKFPEISSEGRFTLETNSESNKAGEDGASTVERETQEDDTNSIDSSDDLDGFVKILKEIVKLDNIVSSTWNPLDESILAYGEKNSVARLARIVETDQEGKKYWKLTIIAELRHPFALSASSGKTTNQVTCLAWSHDGNSIVTGVENGELRLWNKTGALLNVLNFHRAPIVSVKWNKDGTHIISMDVENVTILWNVISGTVMQHFELKETGGSSINAENHSGDGSLGVDVEWVDDDKFVIPGPKGAIFVYQITEKTPTGKLIGHHGPISVLEFNDTNKLLLSASDDGTLRIWHGGNGNSQNSFYGHSQSIVSASWVGDDKVISCSMDGSVRLWSLKQNTLLALSIVDGVPIFAGRISQDGQKYAVAFMDGQVNVYDLKKLNSKSRSLYGNRDGILNPLPIPLYASYQSSQDNDYIFDLSWNCAGNKISVAYSLQEGSVVAI

SEQ ID NO: 27755 - protein, 405 aa, Thermus thermophilus
MALVVQKYGGTSVGDLERIHKVAQRIAHYREKGHRLAVVVSAMGHTTDELIALAKRVNPRPPFRELDLLTTTGEQVSVALLSMQLWAMGIPAKGFVQHQIGITTDGRYGDARILEVNPARIREALDQGFVAVIAGFMGTTPEGEITTLGRGGSDTTAVAIAAALGAKECEIYTDTEGVYTTDPHLIPEARKLSVIGYDQMLEMAALGARVLHPRAVYYAKRYGVVLHVRSSFSYNPGTLVKEVAMEMDKAVTGVALDLDHAQIGLIGIPDQPGIAAKVFQALAERGIAVDMIIQGVPGHDPSRQQMAFTVKKDFAQEALEALEPVLAEIGGEAILRPDIAKVSIVGVGLASTPEVPAKMFQAVASTGANIEMIATSEVRISVIIPAEYAEAALRAVHQAFELDKA

SEQ ID NO: 27756 - protein, 353 aa, Nicotiana tabacum
MQSLKNNGQSNQYNNQSSQSIREQKRSEDGYNWRKYGQKQVKGSENPRSYYKCTFPNCPTKKKVERSLDGQITEIVYKGNHNHPKPQSTRRSSSTASSLTRPTLQYTKLMKSQIISSYGSNATPENSSISFGDDDHDHEQSSQKSRSRGDDNEEEEPDSKRWKRESESEGLSAPGSRTVREPRVVVQTTSDIDILDDGYRWRKYGQKVVKGNPNPRGYYKCTSPGCPVRKHVERASQDIRSVITTYEGKHNHDVPAARGSGINRPVAPNITYNNGANAMAIRPSVTSQIPLQSIRPQQSPFTLEMLHKPSNYNGFSGYVNSEDSYENQLQDNNVFSRAKDEPRDDMFMETLLC

SEQ ID NO: 27757 - protein, 325 aa, Scutellaria baicalensis
MACMATSFRPIFSIAALVLLLTLVPSEAQLSATFYDSTCPNAVSTIRTSIRQAVSAERRMAASLIRLHFHDCFVQGCDASILLDETSTIQSEKTAGPNAGSVRGFQVIDAAKTAVERLCPGVVSCADILTLAARDASVAVGGPSWTVRLGRRDSTTANRAQANTDLPGPTSTLTQLITRFDAKGLNAREMVALSGAHTLGQSQCGNFRARIYSNGSDIEANFASTRRRQCPQDGSGDSNLAPLDLVTPNSFDNNYYRNLVARRGLLQSDQVLLSGGETDAIVTSYSSNPATFASDFANAMIKMGEIQPLQLGQNGIIRRTCGAVN

SEQ ID NO: 27758 - protein, 318 aa, Scutellaria baicalensis
MASFVSEFSTRLMLVLLLIGVSNAQLSANFYNTTCPNLLTIIRNAVNSAVSSDTRMGASLLRLHFHDCFVNGCDASVLLDDRTGFTGEKTAGPNANSLRGFDVIDNIKTLVEGSCPNIVSCSDILSVAARDGVVAVGGPSWAVALGRRDSTTASLNAANTQIPGPGLNLNALITSFSNKGFTAREMVALSGSHTIGQARCTTFRGRIYNDTNINGAFATGLRANCPRSGGDNNLAPLDNVSPARFNNDYYRNLIGLRGLLHSDQELFNNGTADAQVRAYSTNSAAFFNDFANAMVKMSNLSPLTGTNGQIRRNCRRTN

SEQ ID NO: 27759 - protein, 155 aa, Solanum peruvianum
MDLRLMGIDNTPLFHTLHHMMEAVGEDSVNAPSKKYVRDAKAMAATPVDVKEYPDSYVFVVDMPGLKSGDIKVQVEEDNVLLISGERKREEEKEGVKFIRMERRVGNFMRKFSLPENANTDAISAVCQDGVLTVTVQKLPPPEPKKPKTIQVKVA

SEQ ID NO: 27760 - protein, 585 aa, Oryza sativa Indica Group
MESNGGGGGSPKEAAVVVPSSGDATLGGHLARRLVQVGVSDVFAVPGDFNLTLLDYLIAEPGLSVVGCCNELNAGYAADGYARARGVGACAVTFTVGGLSVLNAIGGAYSENLPLICIVGGPNSNDYGTNRILHHTIGLPDFSQELRCFQPITCYQAVVNNLDDAHDQIDTAISTAIRESKPVYISVSCNLAAVPHPTFSRDPVPYFLSPRLSNQASLHAALDATLDFLDKAVKPVLVAGPKLAVAKAGEGFVDLADASRYGFAVMPSAKGLVPETLPAFIGTYWGAVSTAFCAEIVESADAYLFAGPIFNDYSSVGYSCLLKKEKAVVVQPDRVTVGNGPAFGCVMMRDFLSELAKRVRKNTTAFDNYKRIFVPDRQLRSARPGEPLRVNVLFKHIQGMIGGDEAVVAETGDSWFNCQKLRLPEGCGYEFQMQYGSIGWSVGALLGYAQAVQKRVVACIGDGSFQVTAQDVSTMLRCGQKSIIFLINNGGYTIEVEIHDGPYNVIKNWDYVGLVNAIHNGEGRCWATRVRCEEELEAAIATATGDKADSLCFIEVVAHKDDTSKELLDWGSRVSAANSRPPNPQ

SEQ ID NO: 27761 - protein, 619 aa, Exophiala dermatitidis
MFNATQHRGNPNMGPAPPGQPNHRLNEIMDSLRAEFENQSRASEQVENQVAQQIQEMELIRNKVYQLEQNQLKMKQEYEAEIRMLRHELELRGGPQVQSHLTGPPQHGGPAQAPPSLGHGQGGLFSGIMANQGQGGPGLAPPPEQPPQQQQHPLQPPPAAGQPQGPPQPPNSFPGYQQGPTLNGYAPQPQPPTNSPGLGKNRTMAARGGPGPATPQQHPNQPQPMPYQNDRGRHPRIPRPVPPGGDMQHGHRHQMPGLPNVGNVLADLNPDDLPEHLKRTGPNGEWHAVFNPNVPRTLDIQLLHNLVHESVVCCVRFSNDGKYVATGCNRSAQIFDARDGRKVCELLDESVQDKDGDLYIRSVCFSPDGKLLATGAEDKRIRVWDIENKRIRTTFDGHEQDIYSLDFSRTGRLIASGSGDKTVRLWDIESNQQVMVLSIEDGVTTVAMSPDGRFVAAGSLDKSVRVWDCSTGYLIERLEGPQGHKDSVYSVAFSPSGRELVSGSLDKTIKMWELTPQRNLIPSTAKDGKCIRTFEGHKDYVLSVCLTPGGEWVMSGSKDRGVQFWDPTTGNAQMMLQGHKNSVISVAPCPTGQLFATGSGDMKARIWQYTTWRGAHQGI

SEQ ID NO: 27762 - protein, 505 aa, Halobacillus trueperi
MKKVSWVFWYGLGICGLFVLWGVIGPEHLKTMTSNATAFISTRFGWYYLLIIMIMLAFCVYLIFSRFNQIKLGKNDEKPEFSLVSWFAMLFSAGMGMGLVFWTTAEPISHAFKSTPNAEEGSAQAIKESLQFSFFHWGIHAWAVYALVALVLAYFKFHRGYAGLISATLIPIFGKERMEGILGKIIDTLAVVATVVGVAATLGFGSAQINEGLAFLFNTPSTYGVQLIILIISTALFIFSAWSGVSKGIKYLSNINMMLGFLLMILLLIVGPTLYILNMFTNSLGGYITNFFNMSFRIAPIDQDSRAWIDSWTIFYWAWWISWSPFVGIFIARISRGRTIKEFMLGVLFVPAIVCFIFFAVFGVSALDLEQHGLATISNYPMETATFAMLEQYPLGMLMSFITLFVIAIFFITSADSATFVLGMLSTKGSLNPSGTVKIIWGLCLSSMAAIIVYFGGTGGLQNVLIIAAFPFSVIVLLMGVSFYKSANEEIWSKRRKKKQQKKVS

SEQ ID NO: 27763 - protein, 611 aa, Zymomonas mobilis subsp. mobilis ZM4
MTIIAIGSWGFEKEIKHVSPTQRAAIVLETLKDMGVDLIFGYPGGAVLPIYDALYQDEGIRHILARQEGGAVHAAEGYARSTGKPGVVIVTSGPGATNAVTGIADAMLDSIPLVVFSGQVATNLIGTDAFQEADTIGITRHCTKHNYLVRDPKEFSSDDCRGLPSGTSGRPGPVVIDLPKNVQTAVIDYIKPDPNKRMHRGYRPRVKADPVEITNALDMIAKAKRPVFYTGGGVINSGPDASKALRELADLTGVPVTSTLMGLGAFPASSQQWLGMLGMHGTYEANFAMHDADLVVALGSRFDDRVTCRVDSFSPHSKKIHVDIDRSSINRIIHVDLPIVGDVGSVMQDMVALWKEKHYQMQDISAWWVQIDEWRAKQCLNFTKQGNEIMPQQAIRSLWEATKGKNPIVSTEVGQHQMWTAQYFGFDSPNHFLTSGGLGTMGYGFPSIIGAQVGNPDSLCMTIAGEASFQMNIQEMATVAQYRLPVKIFILNNRFMGMVRQWQDLLYDHRRSQSYSEALPDFVALAKAYGWNALKIEKPSQLEDGIKTMLETPGPVLVDCQVAQLANCLPMVPPGAGQTEMILESDITDNHVKKPEYTPSAAPSSATTIRG

SEQ ID NO: 27764 - protein, 253 aa, Medicago sativa
TIKIYNVDRSACGRIAGVIAKKYGDTGFAGQLNITFTGSAGQSFGCFLTPGMNIRLVGEANDYVGKGIAGGELVVTPVDKIGFQPEDAAIVGNTCLYGATGGQVFVRGKAGERFAVRNSLAEAVVEGAGDHCCEYMTGGCVVILGNVGRNVAAGMTGGLAYILDEDNTLIPKINREIVKIQRVTAPVGQIQLKKLIEAHVEKTGSNKGEAILKDWDKYLSLFWQLVPPSEEDTPEANAKYDITATEQVTLQSA

SEQ ID NO: 27765 - protein, 401 aa, Oryza sativa Japonica Group
MASDNIGSRDVCVVGVARTPMGGFLGALSSLSATKLGSIAIEAALKRANVDPALVQEVFFGNVLSANLGQAPARQAALGAGIPNTVVCSAVNKVCASGMKATMFAAQSILLGINDIVVAGGMESMSNAPKYIAEARKGSRFGHDTLVDGMLKDGLWDVYGDFAMGNCAELCADNHALTREDQDAYAIQSNERGIAARNSGAFAWEIVPIEVPVGRGKPPVLVDKDEGLDKFDPVKLKKLRPSFKENGGTVTAGNASSISDGAAALVLVSGQKAQELGLQVIARIKGFADAAQAPELFTTSPALAIPKALANAGLESSRVDYYEINEAFSAVALANQKLLGIPSEKINVHGGAVSLGHPLGCSGARILVTLLGVLREKGGKIGVAGVCNGGGGASALVLELA

SEQ ID NO: 27766 - protein, 343 aa, Chlamydomonas reinhardtii
MICSNVPSALHLRCPSRARHAPSRPLARPYLRLSSGNGATGFVVNVPAAEPHVQTSTPAPAPAPPAAPAPAPAPAPSAPLLPPASIYTAAVAAGTLKCKIPLGKAFVLAVLAGAYLGFAGLLSFTLLNTVPGLLSTNPGLAKLLAAAVFPLGLALITICGGELFTGNTALMPAAVYEGKATWGEVLPRWAVVYLGNLLGCLAMVVAVVATGLVGSNHVLPGLAVAKTSVPLGQVLVRSVLCNWLVCLAVWMALAANNLPGKLMGMWMPVTAFVTVGLEHSIANMWVIPIGMALGAPVSAGAFLTANLIPVTLGNVFAGAVLTAGSYSLAFGRLGAAFNGEAAK

SEQ ID NO: 27767 - protein, 355 aa, Elaeagnus umbellata
MSLLSDLLNLNISESTDRIIAEYIWIGGSGLDLRSKATLPKKVKNPSELPKWNYDGSSTNQAPGDDSEVILYPQAIFRDPFRRGNNILVMCDAYTPAGEPIPTNKRHNAAKIFSHPDVDAEEPWYGIEQEYTLLQKEVNWPLGWPLGGFPGPQGPYYCGVGADKAFGRDIVDSHYKACLYAGVNISGINGEVMPGQWEFQVGPTVGIAAGDQVWVARYILERIAEIAGVVVSFDPKPIKGHWNGAGAHTNYSTKSMRIDGGINVIKKAIEKLGLRHKEHIAAYGEGNERRLTGRHETADINTFSWGVANRGASVRVGRDTEKDGKGYFEDRRPASNMDPYVVTSMIAETTILWKP

SEQ ID NO: 27768 - protein, 514 aa, Camptotheca acuminata
MEMDALRQVLHPMPTALFFIAPLFFLFILSRLRRKLPYPPGPNGLPLVGNMMMMDQLTHRGLAKLAKQYGGIFHLRMGFLHMVAVSSPEIARQVLQVQDNIFSNRPATIAISYLTYDRADMAFAHYGPFWRQMRKLCVMKLFSRKRAESWESVRDEVDSMVRVVVSHTGKSVNIGELVFSLTRDIIYRAAFGSSSHEGQDEFIKILQEFSKLFGAFNIADFIPGLGWVDPQGLNARLVQARASLDGFIDSIIDDHIEKHRRRNVVDSDGDMVDDLLAFYSDEAKVTESDDLQNAIRLTRDNIKAIIMDVMFGGTETVASAIEWAMAELMKSPEDLKRVQQELAEVVGLDRRLEESDFDKLTYLKCALKETLRLHPPIPLLLHETAEDTEVAGYYIPARSRVMINAWAIGRDKNSWDEPETFKPSRFLKEGVPDFKGSNFEFIPFGSGRRSCPGMQLGLYALEMAVAHLLHCFTWTLPDGMKPSELDTDDVFGLTAPRATLFVAVPSPRLLCPLY

SEQ ID NO: 27769 - protein, 377 aa, Enterobacter aerogenes
MIIGVPKEIKNNENRVAMTPAGVVHLLNAGHKVIIETNAGLGSGFTNEEYKQAGAEIIESASDVWTKADMIMKVKEPLASEYGYFRKGLILFTYLHLAAEPELTKALVDSEVIAIAYETVTVNRTLPLLSPMSEVAGRMAAQVGAQFLEKTQGGKGILLSGVPGVKRGKVTIIGGGMVGTNAAKIAVGLGADVTIIDLNPDRLRQLEDIFGTSVQTLMSNPYNIAEAVKESDLVIGSVLIPGAKAPKLVTEEMVKSMQPGSVIVDVAIDQGGNFETVDHITTHDDPTYVKHGVVHYAVANMPGAVPRTATIALTNVTIPYAVQIATKGVVKAVNDNPAIKAGVNVANGHVTFEAVANDLGYKYVTVEEAISKEAINA

SEQ ID NO: 27770 - protein, 171 aa, Solanum demissum
MTCTNYEMAFFPTNFMLQTPHHEDEHQPSTSLNPILPSCSPQDFHGIASFLGKRSMSFSGMDGNNACEENHGEDDLSDDGSQAGEKKRRLNMEQVKTLEKNFELGNKLEPERKMQLARALGLQPRQIAIWFQNRRARWKTKQLEKDYEVLKRQFDAIKAENDALQTQNQKL

SEQ ID NO: 27771 - protein, 602 aa, Rhodococcus opacus
MSKKKNGADRTAVSGVQKMTPSEAFVETMVANGVTDMFGIMGSAFMDAMDIFAPAGIRLVPVVHEQGAGHMADGYARVSGRHGMVIGQNGPGISNCVTAIAAAFWAHSPVVIVTPEAGTMGTGLGGFQEANQLPMFQEFTKYQGHVNNPKRMAEFTGRCFDRAMSEMGPTQLNIPRDYFYGEIETEIPQPTRLDRGPGGETSLNEAAELLAQAEFPVIVSGGGVVMADGVEECKALAERLGAPVVNSYLHNDSFPASHPLWTGPLGYQGSKAAMKLISQADVVLALGTRLGPFGTLPQHGMDYWPKNAKIIQIDADHKMLGLVKKISVGICGDAKAAAVALTERLEGKALVCDANRAARGEKIDAEKAAWEKELDEWTHERDPFSLDMIAEQEGEEGNWLHPRQVLRELEKAMPEDVMVSTDIGNINSVANSYLRFEKPRSFLAPMSFGNCGYALPTVIGAKAAAPERPAIAYAGDGAWGMSLGEIMTAVRHDIPVTAVVFHNRQWGAEKKNQVDFYNRRFVAGELESESFAGIAQAMGAEGIVVDKLEEVGPALQRAVAAQMNEGKTTVIEIMCTRELGDPFRRDALSKPVRLLDKYKDYV

SEQ ID NO: 27772 - protein, 373 aa, Rhodococcus opacus
MRIGIPKEVKNHEYRVAATPAGVHEMVAHGHDVFVERGAGEGSSIGDDAYGAAGAKILDSADAVWQSAELLLKVKEPIAEEYHRMRSDLTLFTYLHLAAGEECTRALLAAGTNSVAYETVQLPDGSLPLLFPMSEVAGRLAPLVGAQALMRPEGGRGVLIGGVSGVSPARVVVIGAGVSGMNAVAVAAGTWADVVLFDKNVDKLRAADRMYQGRIRTLAANSYSIEQEVMQADLVIGAVLVPGAKAPKIISNSLVSRMKPGSVLVDIAIDQGGCFEDSRPTTHAEPTFKVHDSVFYCVANMPGAVPHTSTYALTNVTLPYTLQIAEKGLARAARENAALRAGVSTVAGRLTNDAVGEALGIESVSVDDALNLV

SEQ ID NO: 27773 - protein, 670 aa, Cryptococcus neoformans var. grubii
MTTMSNDIPNSPTSTSFTGTFSPAATAANTAANARTSDAPSPTTSSSGPKLETSKEQRLIVVSNRLPVTISKDDNGEYHFKMSSGGLVSALSGCKKTMSFTWIGWPGKDIPMQDRETVNRRLLDEYNCYPVYLSDELADSHYNGSFSNSILWPLFHYHPGEMNFDAAHWLAYREANMRFADVVSSLVQAGDMVWVQDYHLMLLPMLLRSMITGESAQGEMVRQELGRVKEGVDDTVVKEVLKMGPGVAQAEDEGVEMLDDVEEEGGEMDVKSSPKRPHYARGMSTFQKQELVAKEKGKEGIRIGFFLHTPFPSSEIYRILPVRREILLGVLQCDLIGFHTYDYARHFLSSCTRILGLETQPNGIEFDGRYCQVGTFPIGIDPNQFIEGLQKESIVKRLRSLEARFEGVKVIIGVDRLDYIKGIPQKLQALETFLTQHPEWIGKVVLVQLAIPSRQDVEEYQDLRACVNELVGRINGRFGTVESVPIHYMHKSVPFEELTAMYALADACLVTSTRDGMNLVAYEYISSQAERHGSMILSEFAGAAQSFNGSLLINPWDVQSTADAINQALTLSPQQRKTNWQKLFNYVSKYTAEAWGVSFVNELNRLSGQRPSGPTGLAGRRKSGSLSRTSSKASIQRRKSSQSGIVTGLGAAAGAAVNWAQAQVQGGSQT

SEQ ID NO: 27774 - protein, 304 aa, Solanum demissum
MAFFPTNFMLQTPHHEDEHQPSTSLNPILPSCSPQDFHGIASFLGKRSMSFSGMDGNNACEENHGEDDLSDDGSQAGEKKRRLNMEQVKTLEKNFELGNKLEPERKMQLARALGLQPRQIAIWFQNRRARWKTKQLEKDYEVLKRQFDAIKAENDALQTQNQKLHAEIMSLKNREQPTESINLNKETEGSCSNRSENSSEIKLDISRTPAIDSPLSNHHPNISSRPFFPPSMIRSNNNNNGVVVSHQLFHINSSSSRQDLKLMDQNTTTTNNNSSVKEESLSNMFCGIDDQTSFWPWLEQQHFN

SEQ ID NO: 27775 - protein, 352 aa, Solanum demissum
MEVETHMSFRTAEKISILVVNDDATYLPVVAGLLKKCNYQVVTVKYPIDALSKLRIKGDSFDLVVTDVHKSDINGFELQQVITQAFEIPVLLMSADDKEGTILKGLKGVSVDDQRDQGPCTALQVKRGKKPVPGKSAMKLGKQGKDNSVNFVLPTKSQIIWTDSLHNTFLEAISNIGFDKAVPKKIHEHMKVPGLSRENVASHWQKYRIYLRRVTDASSSIQVPDINLASRANQSTIASGTLGKHRQFHQENFGVQSSVPSLLIHTTGYRTGSLQHLKNKGKEVDDVLDPVRNFSVFHNVSATQGSQGIGDLSASSMNQGNDQPHQQNNEDEALVNFDGGFNQDMEKEDYLQ

SEQ ID NO: 27776 - protein, 684 aa, Zea mays
MVFQKRSSSELEASGGGQVAEMPRVPKSARGKRSVRKKEAQNPPQMSAFDLLATVAGKLLDEGVGSLGNMSAGAPALTACAKDVRVKKEQCDEEMKQFKHEVTDQDSCNESAILPHIVFQRAVNNARNEDPKAKSEAQDKESSMISCTKAELGCNFGVIADRWSPESVESGAFTGDAVASLMPPAPAGFHKNAPEMYNLLDSMDVDVKPPPLVSSDSTGEMPLYGDKVHRSTSLPRVSKGVGFFPVDRDDDDDKSSGCTHPSTTTNKDFRSNCTAEYSRVRKLLTSKYRKVAPARVYKSDLSYSDVDRKPSFRNKKMHYTRQRTQRSTFKRRKLFDRHSVLASEFGTAHGKGNTKKVTGRDSHAVSLEANKGTSSTPFQKSRGSNDCHVKLKIKSFKVPELLVEIPESATVGSLKKTVLEAVTAILGGGLRVGVLHHGKKVRDDNKTLIQAGIGQEDMLDNLGFSLEPNCTQNPQVQAPEDISFLETIDTAEPLARIAPADSSSKHGEVDLSQEFALTPLAMNYQGSDHDSVHSPGGVSSPDKVSTNSRALVPVPAADPNAGAIVPANKSKRSPEQGQRRIRRPFSVAEVEALVLAVEKLGTGRWRDVKLRAFDNAKHRTYVDLKDKWKTLVHTASISPQQRRGEPVPQELLDRVLAAQAYWSQQQAKLQPKTPPLLAEARLLT

SEQ ID NO: 27777 - protein, 755 aa, Agrobacterium tumefaciens str. C58
MSASALLDNQCDHFSTKMVDLIMVDKADELDRRVSDAFSEREASRGRMITQISGECSAGLACKRLADGRFPEISAGEKVAALSAYIYVGKEILGRILESEPWARARVSGLVAIDLAPFCMDFSEAQLLQTLFLLSGKRCASSDLSHFVAISISKTARSRTLQMPPYEKGTTKRVTGFTLTLEEAVPFDMVAYGRNLMLKASAGSFPTIDLLYDYRSFFDQCSDSGRIGFFPEDVPKPKVAIIGAGISGLVVASELLHAGVDDVTIYEASDRVGGKLWSHAFKDAPSVVAEMGAMRFPPAASCLFFFLERYGLSSMRPFPNPGTVDTNLVYQGLRYMWKAGQQPPKLFHRVYSGWRAFLKDGFHEGDIVLASPVAITQALKSGDIRRAHDSWQTWLNRFGRESFSSAIERIFLGTHPPGGETWSFPHDWDLFKLMGIGSGGFGPVFESGFIEILRLVINGYEENQRMCSEGISELPRRIATQVVNGVSVSQRIRHVQVRAIEKEKTKIKIRLKSGISELYDKVVVTSGLANIQLRHCLTCDTTIFRAPVNQAVDNSHMTGSSKLFLLTERKFWLDHILPSCVLMDGIAKAVYCLDYEPQDPNGKGLVLISYTWEDDSHKLLAVPDKKERFCLLRDAISRSFPAFAQHLVPACADYDQNVVQHDWLTDENAGGAFKLNRRGEDFYSEELFFQALDMTNDTGVYLAGCSCSFTGGWVEGAIQTACNAVCAIIHNCGGILAKDNPLEHSWKRYNYRNRN

SEQ ID NO: 27778 - protein, 692 aa, Agrobacterium vitis
MEKLSCSQPQGNQFLVNMMDLVDVDELRTSLFNTFLQRQITRKISTKASCQCETGLACKGPAKDGFPESSADQRAKITVAFIYINDATLQLIIDSGSLAQATTASLVAINVAPFRTNVSRALLLQSINLLRSGRCGLDDISHFIAIAISKDAFSKTLTMAPFEGDLARSFMGFPITSKGDAAFEMVAYGRNLMPKACAESFPSVDLLYDYRNFFESCRATGRIGDFPEGVSKPKVAIVGAGLSGLVVASELLHAGIDDVTLYEASDRIGGKLWSYRFDNAPNVVAEMGAMRFPPSESCLFFFLKKYGLDSMGRFPNPGSVDTTLIYDGHQYIWKAGEGPPELFRRVYHGWQAFIREGYLNDDMVLASPCAIGEALKLGHLQQAHDFWQSWLTCFGRESFSSGIEKIFLGSHPPGGEKWAFPHDWDLFKLLGIGSGGFGPVFESGFIEILRLVVNGYEDNAQLIYEGISELPRRIGAQVVHGVSIRERIRHVQVKAIEKENTKIRVRVKGGNSDLYDRVVVTSGLTNIQLRHLLTLDATFLQAEVNGAVENSHMTGSSKLFVLTEGKFWLEHQLPPCVLTTGVARAVYCFDYEPKDPRGKGLVLISYTWEDDSHKLLAVPDKRERLALLRRDIGKTLPDFAKHLVPANGNYDGNVVQHDWLTDPNAGGAFKLNRRGEDVYSQRLFFQPFDVMN

SEQ ID NO: 27779 - protein, 830 aa, Arabidopsis thaliana
MEEFRFLYLIYSAAFALCLVVSVLAQDQSGFISIDCGIPSGSSYKDDTTGINYVSDSSFVETGVSKSIPFTAQRQLQNLRSFPEGSRNCYTLIPIQGKGKKYLIRASFMYGNYDGENGSPEFDLFLGGNIWDTVLLSNGSSIVSKEVVYLSQSENIFVCLGNKGKGTPFISTLELRFLGNDNTTYDSPNGALFFSRRWDLRSLMGSPVRYDDDVYDRIWIPRNFGYCREINTSLPVTSDNNSYSLSSLVMSTAMTPINTTRPITMTLENSDPNVRYFVYMHFAEVEDLSLKPNQTREFDISINGVTVAAGFSPKYLQTNTFFLNPESQSKIAFSLVRTPKSTLPPIVNALEIYVANSFSQSLTNQEDGDAVTSLKTSYKVKKNWHGDPCLPNDYIWEGLNCSYDSLTPPRITSLNLSSSGLTGHISSSFSNLTMIQELDLSNNGLTGDIPEFLSKLKFLRVLNLENNTLTGSVPSELLERSNTGSFSLRLGENPGLCTEISCRKSNSKKLVIPLVASFAALFILLLLSGVFWRIRNRRNNPMAKSENKLLFTFADVIKMTNNFGQVLGKGGFGTVYHGFYDNLQVAVKLLSETSAQGFKEFRSEVEVLVRVHHVNLTALIGYFHEGDQMGLIYEFMANGNMADHLAGKYQHTLSWRQRLQIALDAAQVHRDVKTSNILLNEKNRAKLADFGLSRSFHTESRSHVSTLVAGTPGYLDPLCFETNGLNEKSDIYSFGVVLLEMITGKTVIKESQTKRVHVSDWVISILRSTNDVNNVIDSKMAKDFDVNSVWKVVELALSSVSQNVSDRPNMPHIVRGLNECLQREESNKNY

SEQ ID NO: 27780 - protein, 337 aa, Streptococcus pyogenes
  misc_feature (7)..(7): Xaa can be any naturally occurring amino acid
  misc_feature (25)..(25): Xaa can be any naturally occurring amino acid
  misc_feature (89)..(89): Xaa can be any naturally occurring amino acid
  misc_feature (109)..(109): Xaa can be any naturally occurring amino acid
  misc_feature (119)..(119): Xaa can be any naturally occurring amino acid
  misc_feature (123)..(123): Xaa can be any naturally occurring amino acid
  misc_feature (129)..(129): Xaa can be any naturally occurring amino acid
  misc_feature (163)..(163): Xaa can be any naturally occurring amino acid
  misc_feature (210)..(210): Xaa can be any naturally occurring amino acid
  misc_feature (294)..(294): Xaa can be any naturally occurring amino acid
  unsure (1)..(337): unsure at all Xaa locations
GGGGGGXSIRSLFGGLREKILGKNXKIVFPEGNDERVVRAAARLKFEGLLEPIILGQSEEVRNLLTKLGFADQDYTIINPNEYADFDKXKEAFVEVRKGKATLEDADKXLRDVNYFGVXLVKXGLADGXVSGAIHSTADTVRPALQIIKTKPGISRTSGVFLXNRENTSERYVFADCAINIDPTAQELAEIAVNTAETAKIFDIDPKIAXLSFSTKGSGKAPQVDKVREATEIATGLNPDLALDGELQFDAAFVPETAAIKAPDSAVAGQANTFVFPDLQSGNIGYKIAQRLGXFDAIGPILQGLNKPVNDLSRGSSAEDIYKLAIITAAQAIESQG

SEQ ID NO: 27781 - protein, 549 aa, Ipomoea batatas
MAASSGTIDAPTASSSFSFSTASSFMSSFTDLLASDAYSGGSVSRGLGDRIAERTGSGVPKFKSLPPPSLPLSSPAVSPSSYFAFPPGLSPSELLDSPVLLSSSNILPSPTTGTFPAQTFNWKNDSNASQEDVKQEEKGYPDFSFQTNSASMTLNYEDSKRKDELNSLQSLPPVTTSTQMSSQNNGGSYSEYNNQCCPPSQTLREQRRSDDGYNWRKYGQKQVKGSENPRSYYKCTHPNCPTKKKVERALDGQITEIVYKGAHNHPKPQSTRRSSSSTASSASTLAAQSYNAPASDVPDQSYWSNGNGQMDSVATPENSSISVGDDEFEQSSQKRESGGDEFDEDEPDAKRWKVENESEGVSAQGSRTVREPRVVVQTTSDIDILDDGYRWRKYGQKVVKGNPNPRSYYKCTSQGCPVRKHVERASHDIRSVITTYEGKHNHDVPAARGSGSHGLNRGANPNNNAAMAMAIRPSTMSLQSNYPIPIPSTRPMQQGEGQAPYEMLQGSGGFGYSGFGNPMNAYANQIQDNAFSRAKEEPRDDLFLDTLLA

SEQ ID NO: 27782 - protein, 261 aa, Nicotiana tabacum
LRVLGYAKLANLDPQYGLYSSFGPPLVYAFMGSSRKIAIGPVAGGSLLLGSMLQAELDPVKQKLEYQRLAFTATFFAGITQFILGFFRVGFLIDFLVHAAKVGFMAGAAITISLQQLKGLLGIKKFTKETDIVSVMRSVFAAAHHGWNWQTIVIGVSFLAFLLVAKFIGKKNKKYFWVPAIAPMISIILSTLFVFIFHAEKHGVQIVRHIDRGINPPSLKQIYFSGENLTKGFKIGAISGLIALTEAAAIGRTFAAMKITS

SEQ ID NO: 27783 - protein, 353 aa, Arthrobacter sp. KUJ8602
MEELRIEANGNLGPIDSSRIPRYAGAATYARLPRLDQVSKADVTVVGVPFDSGVSYRPGARFGANHVREASRLLRPYNPAWDVSPFENIQVADAGDMAVNPFNINEAIETIQQNALDLTANGSKLVTLGGDHTIALPLLRAAAERAGEPIAMLHFDAHLDTWDTYFGAEYTHGTPFRRAVEEGILDTEAISHVGTRGPLYGKKDLDDDHRFGFGIVTSADVYYQGVLETVAKIRDRIGNRPLYISVDIDVLDPAHAPGTGTPEAGGITSRELLEIIRGFRGMNLVGADVVEVAPAYDHAEITGVAGSHVAYELVTLMADNAVEGDRHGAPNGYAQQALGARIQEVAQAIGGQR

SEQ ID NO: 27784 - protein, 165 aa, Escherichia coli B
TANEIAALAFVNTVVATAAAILGWIFGEWALRGKPSLLGACSGAIAGLVGVTPACGYIGVGGALIVGVVAGLAGLWGVTMLKRLLRVDDPCDVFGVHGVCGIVGCIMTGIFAASSLGGVGFAEGVTMGHQLLVQLESIAITIVWSGVVAFIGYKLTDLTVGLRVP

SEQ ID NO: 27785 - protein, 196 aa, Escherichia coli B
AIIITCWIILNAICVACGLQKGVRIASDVRSYLSFLMLGWVFIVSGASFIMNYFTDSVGMLLMYLPRMLFYTDPIAKGGFPQGWTVFYWAWWVIYAIQMSIFLARISRGRTVRELCFGMVLGLTASTWILWTVLGSNTLLLMDKNIINIPNLIEQYGVARAIIETWAALPLSTATMWGFFILCFIATVTLVNACSY

SEQ ID NO: 27786 - protein, 298 aa, Picrophilus torridus DSM 9790
MSFNDPRVLKFSEVNKNSENPDIVITGVPYDGGIISHRRGARYGPERIREIMNSYSSYCTDHNVDLNSLKILDAGNIDVNFIDYNIEKIKDDYYNIIKKYNSRFIAMGGDHSITEGLFKSVCKLNKKTGMILFDAHHDIRDPWRVNSGSWGNNILKDNGGCLDGRNFVQIGVHGFKYSKYYYNKINDLKISYFTALNVLDYGIDAIIKKALEIIDADIIYLSLDIDVIDQAYAPGVSAASPGGLTPREIFKAMYLLGLNKKVRFMDLTEYSPPLDHDDITGRVAAEALLHFMCGASKS

SEQ ID NO: 27787 - protein, 458 aa, Picrophilus torridus DSM 9790
MNKSLKKDSLNVYNIIFQGVAGSAPAGAAVATLTGSAAFALGSLPLSAVIAFIIVLINAVIINRISKYVAGAGGYYAYSRDGLGSFAGIFTGWMYIMYQIMSLAFIALSVAIFLPALIETVFGIMLPSYLWFILLIIIISFGYFVSFSGVKNSVRYAMVMATIEVIVIALVSILIITIRPSINTASVFTPVYAKGGFTGVMLGVLFMYTAFSGFGTATPLGEEAQNAKKVIGRGVVISVIVLGLFFILASYAFTVGWGPENMLSYSQELVPGVILSKNYLGIAGAIVVTVLFVNSLFTDSVVFTNSLSRVVFSMSRDNVLPGILSNVHEHRRTPHVAAGIMAIIGFIIAAISVVTLGGFNAFLYMGIGATLSALVVHMIANASLPGIINKMRKKLNIFMDIALPVISIAILGFVFYGSFISINKIVIIASITFGIWLILGIIYSFISMEKFSHPVIDK

SEQ ID NO: 27788 - protein, 339 aa, Picrophilus torridus DSM 9790
MKINIDEKLETTEILIETQDDLWYIKNILNPGDIIEGIAYRRLEKRNDLERSKSTERIPIKVKIKIENLDFQPFTDKIKILGIIIDGDFSGEHQSIMYGPGDTLKIYKNLNEAERDFLNEAVKNEYSSGMIFVSLDEEAADIYLMRSYSLQDMAHIESNKTGKRYDLKYNEKQYFLDIIKALKNIKNVFLLIVLGTGFEPEKLYNEIKKDPFFNNIDVKFYNTYDTGKSGVYNLLNSDATSNIIKESRMAKEKRILETFLRNLNSGLSVYGYDEINNYLDNGAIDTLIISEEKFKMPETRELLNKASGIKIYIISNYTEPGEIIRSFGGYCAILRYKIK

SEQ ID NO: 27789 - protein, 587 aa, Picrophilus torridus DSM 9790
MFHDITMVATNQNIASDVTEDKKLKKALSTWDLLFLSLGGIIGSGWLFAAAASAGTAGPSAIYAWIIGGVLIIFIALVYAELGGMLPRSGAIVRYGHYSHGGLAGLIFGWAYFLSAVSVPAVEAEGVITYAASYTPKYHIILATTSTNPITGVPLLILTPLGILLAAILIVAFFMLNYAGVRLMGKTNTGMTWWKLIIPAATIVILFVVGFHTYEFTDIASGGFLPYGWPAVFAAVSTDGIVFSYLGFRQAVDYGGEAKTPQKSIPIAVIGSVLIGIFVYVLLQVVFIGHLNLGAIGNNWSILTAPPTSNAYATSISSAPFATLATSAGLVALTYILYADAYVSPSGTLNVYAGTSARTLFGLGENGYLPESIKRVNKRTKVPVLSIILSMIIGLVFLAPFPSWYALVSLITSSTAFTYIVGGSALMVFRREAGELKRPFKLAGASILAPIAFIGATLIVYWSGWPTVGILSIAIFLGLLVYFILLLLARYNIVHGIENIFTNKTIKAGIWVPAYILILDLLSYIGEKDYGGIGILKFPIDFLVVIVVGIIFYVISYYSGYRTEEISNIIESGTQYIGEETETAGAK

SEQ ID NO: 27790 - protein, 744 aa, Picrophilus torridus DSM 9790
MQSDGIILRVAEANATDPGMARVRLDEESRLALDVDIGDVVSIEKVRPTVGRVFRARPEDENKGIVRIDSVMRNNCGASIGDKVKVKKVFVEEAKKIVLAPIIRKDQRLRFGEGIDDFVQKALMRRPMIEQDSISVPGLTLAGHTGLLFKVVKTIPSKVPVEVSESTQIEIREDPASEVLEEVTRVSYEDIGGLSDQLGRIREIIELPLKHPELFERLGITPPKGVLLSGPPGTGKTLIAKAVANESGANFYAINGPEIMSKYYGQSEQKLREIFQKAEESEPSIIFIDEIDSIAPKREDVQGEVERRVVAQLLTLMDGLKERGHVIVIGATNRIDAVDPALRRPGRFDREITIGVPDKKGRKEILAIHTRGMPLGMTDDEKENFLEKIADLTYGFVGADLAALTRESAMNALRRYLPEIDLDKPIPTEVLEKMVVTEQDFMEALKTIEPSSLREVTVEVPNVKWDDIGGLENVKSELREAVELPLLNPDVFKRLGIRAPKGFLLYGPPGTGKTLLAKAVANESNANFISIKGPEVLSKWVGESEKAVREIFKKAKQVAPSIVFLDEIDSIAPRRGASMDSGVTERIVNQLLTSLDGIEVLNGVVVIAATNRPDIIDPALLRAGRFDKIMYIPPPDEEGRYKILQVHTKNMPLAPDVDLRELAKKTDGFVGADIENLCREAGMMAYRSNPDATEVTQNDFLNALKTIRPSVDESVIKFYNDLAKSMGRDIIERKKSVEDLGLYQ

SEQ ID NO: 27791 - protein, 395 aa, Picrophilus torridus DSM 9790
MEKALLLYSGGLDTSVMVRWIKEKMNMDVVTLTLDIGNSDLEEIKEKALKLGAIDAITLDVKKEFADNYISREIHANGLYGEYPLSTALARPLMAEKAVSVANENDIKFIAHGSTGKGNDQVRFEVSINALDNNIKVIAPVREWNMTRADELEYAKMNNIYVKSDGKYSVDENIWGRSIEGSSIENINEPVNDDAFEWVTPPQYCGSGEPVSIEFYKGLPSSLNGKSMDLLSIIKNLNIIAGRNGIGIINMIESRLIGLKSHEVYECPAASVILKAHKYLENLILNKNELSVKNYIDNFWSNMVYNGLWFDPSMEHMNQFEKSSNQYITGSVNLRLYRGNMILEGIESPYSLYDYNTINYETGVFDQGSSKGFIDIYKNETVRSNRVKKALTVIH

SEQ ID NO: 27792 - protein, 223 aa, Picrophilus torridus DSM 9790
MKIFLDTANIDEIKDAIEYGLIDGVTTNPTLISREQKEGRGFSDIVKDILKTVDGPVSIEVVATDYQGMIDQATKIHNLGPNAVIKIPMTLAGLRAMKTLSEKHIPVNCTLVFNAIQATLAARNGAEYVSPFVGRLDDIGEDGMEIINQIRTIYNNYSFKTKILVASVRNPVHVLRSMIIGADVITMPYDVIKKLAMHPKTDEGLSKFLSDWKKVSPDGSFPI

SEQ ID NO: 27793 - protein, 284 aa, Picrophilus torridus DSM 9790
MQHFSYLKLPDALSDYKNARYVLFGVPFDNTSSYRRGSRLSPNYIRYAYNNLESFEINYKYNIPDAGICDLGDLPVYEDVEYVLSEVETVTRTIFNDKKVPIMLGGEHSITIGAVRNLRNVKMLIIDAHSDFRDSYMDNIYNHACVTRRCLDILGRDSIVSVGTRSTSLEEYESPEYRNVRFVSSEYVLENGIKSVLDELDEFIGDSRIYFSIDMDGIDPAYAPGVGTPEPYGLRDTDVRSIIRRFSKKSIGFDIVEMTPLYDNGNTSMLAAKMIQDFIASREK

SEQ ID NO: 27794 - protein, 129 aa, Picrophilus torridus DSM 9790
MSWTEAEVRELKVGRYILIDDSPCRIVDITMSKPGKHGEAKGRIVAIGVFDNQKHSVVYPVKHKVKVPVITKKNAQVLSIANNEVQLMDSETFETFVIPVDPADLEKIKPGMEVPYWEAMGQRKIMLQN

SEQ ID NO: 27795 - protein, 303 aa, Picrophilus torridus DSM 9790
MLTVKNLGSGYKTNDGYIKILNDINFYLNKNEIVGIMGEIGSGKTTLLRAIRGDLYIDSGDILYNGESIFSREVYKRYREKVIYARQDSLNILKPGYSVDFQIKKLFGHGKYDLNYVKRIFDYLDLPMETLNNIPSRLSDGTRHRVVIAMSLMIRPEILLLDEPFTGLDIDAITGLLKLLKEIKDYTSIVIVSSDVVPLFRICDRIYAMRNGMILEDGKWSEILYKPHHPYVYDIINAIPSFENRNREFTFTNNMVNNGCVYIKRCRFMNESCKSEILYRYDNDHGYRCIRYPDWYNDRDKER

SEQ ID NO: 27796 - protein, 350 aa, Picrophilus torridus DSM 9790
MNFNKIKSMHFPSDVYIGHDAILNIGSVVSKFLKSGEVLLITGENTYNIAGKKVLSNLNDFDVNVIIASRATRDSIKSIEESLKNRRSGIVLGVGGGSKIDIAKKIAYDLGIPFISVPTTPSHDGIASPRASIYDGKSVYSEEATMPSAIVADTSIMVLAPYRYVAAGAADVISNITAVLDWKLANRLKGEEFSSTAAVMSEYAGRELIERSSMIQPGLEESIWLVTKQILASGAAMAIAGSSRPASGSEHLFSHAIEILGPGSSIHGEQCAMGSLISMYLHGGDWELLKNTYRKIGLNTRAESYGIGREVAIKALSIAHRIRPSRYTILGESDLSYNVAERILSITGII

SEQ ID NO: 27797 - protein, 548 aa, Picrophilus torridus DSM 9790
MSITEEIRKQAIKNAYLHDGRADVKSVVSKLMAEFPEARKNPGDLINDVKKCVDEINSMGKDRIIEIINNEYPEFKIKEKKEEKHELPELPNAKNGVVMRMAPSPSGPLHIGHSRMAILNDEYVKRYGGDLILRIEDTNPGNIDIDAYDMIPEDLKWLDVNVTKTVIQTSRMDLYYREAKKLIENGYMYIAETDQKRFKELKLKSMALPDRSMDPGVHLDRFDKMLNREYREGEAVAVLKTDLNHPNPSIRDWIAFRISYKRHPLTGDEYCVYPMMNFSVAIDDHYLGLTHVIRGMDHLVNTEKQKYIFNYNNWKLPYYYHYGIIKIPGSVLKTSIIKNGIKSGKYTGWDDVRLGTIRALRKRGYRPETFRRYWINSGMKETGATFSWEIFDSINRQLIDRDAMRFFFVNDPVLLDLNNDIDLESHARYHPDIDLGYRKYIIKSHSRIYLSRRDLDDIKPDEIFRLKDLCVVKRTEDGIAYIDDDSNKRLKIIQWCPENSHEFTVQKPDGTVDSGMLEPLAYNYNGVSQFERYGYVNIINRNGYFLHR

SEQ ID NO: 27798 - protein, 288 aa, Picrophilus torridus DSM 9790
MYIIVPSSSSMKLTSSLASKLNAEIANVTRKRFPDGEMYVRIETDLKDRDVIVLGNTSHDSDLIEYLLLLNAAYEEKPATLNAVIPYFGYARQHMRYNPGEPVSSKVFTKAIENFADSIMAVEIHDEETLKFSAKPFTNVKVYDSIADYHKNHDIDYVISPDDGGYERAKSIAKYLKVDAYYIEKKRIDSRTVEMKMPDIDSRNRNILIVDDMISTGGTVIKASRILKDSGAKKIYVSAVHGVFSLNSAANIMENVDDLSVSDTIETGYSRITVSNDIKNALEKKIKV

SEQ ID NO: 27799 - protein, 541 aa, Picrophilus torridus DSM 9790
MEDNLKKSGLKRGFSLHDAAMFGIGGAIGSGILFAVAGGTTYAGPAIIISWIIAAIMIVIVTIPYAEFSAMAPRGGISARISYYSYGSYGGFMSGWSLFLWAVLIPPIEAVAVSEYASYYIKGLYSSVTGFLTPEGIALSIALTILFVFINLFGIRKFGIVNNVLTWFKILVVVAIIVIVPLFVFRPSNFTTPSFIPSNASGILIAIPATGILFSFGGYRQVADMAGEIKNPKRNLPRAIGITLAVQSIFYILMTIIVVGSVNWTGLKTAPGSWSVVGSLGSPIVTIIHSNIAYLHGYAVPVLSGLIILALIFAIFSPMGTFGVYLTGSSRIIFGFSREGAIPSFFGSTTKKGTPLYAIILVAVIGDLFLIPFPSWYTLTDFVVVAAVVNFAIVAASLPVIRKLYPEIERPFKVPFATAWSFVAFIASSILIYFATYPDTLYALGATLAGSVVFIYQAYKKHFQELSIKNSLWIPVYIIVMIIISYLGSSSTGGINLIKYPYDIVSVIIVGIVFWFVSQASAPRSVKGDMESLIKNAPEDV

SEQ ID NO: 27800 - protein, 498 aa, Picrophilus torridus DSM 9790
MFTDLDLALFFIIIFIVLFIGYIAYFWRKPDDIHKHGEWSLGGRRFGTVVVWFLLGGDLYTAYTLIAVPGAAATPGIGGGAFAMFAITYGIMIYPIVYGTMPRLYNVSKKRGYITAADFVKDRFSSRFLAMLIALTGVLAELPYIALQITGIKYVLASLSLPISISLIIAFLLVAGFTFVSGLRGPALTAIIKDAIIWAAVLVIIVYIPLKLHGFGNIFSKAATISPNLLDISPTIDIGYVSLALGSALALFLYPHAVTGTLGSKDVKTIKRNAALLPLYNVLLMFVAIIGIMSVVYFNAYPKVSSEALPLLVLHVFPSTFTAFAFAAIVVGSIVPASIMALASANLLTRNLYLEYINPNATEKAQTNLSRVLVVVVIVAALAFSLVPAASGEIVYLQTIGGAIIMQTLPSVYLALFTRKLNKYPVGLGWLAGLATTMILLVDLHFKTSLYKGFFFMYVGIIALLINLAVVGLGMLIMAAMHRIKNEGIIEDHEFLDE

SEQ ID NO: 27801 - protein, 573 aa, Picrophilus torridus DSM 9790
MGSRLIVESLKKQGVKDIFGIPGLYNMPVYDAFLEDVESGQLRHILMRHEQAAAHAADAYARATGFPGVCTATSGPGVTNLVTGLITAYQDSSPVVAITGQVNSSSIGKMSFQESDTPGIMFPVTKYTVQLRSVDEIPFWIEKAFYIASTGRPGPVVVDIPRDLQNTKIDDLKSLNRKLNYKPFRTIVDKEKISKALSLLLNAERPIMLVGTGVAWSGATDEVIKLSKMLGMPVVSTLPGKSSMPADYPLYLGAMGYYGKAEASMAALESDVMLVVGARLSDRTFTSYNEMAETGKKFIEINIDPGDFMKGIKPDVGIQGDSKLILKEMIKNIPEHALKHKNEWTKRVRELKDYYEKFYYIEDRKLKPFKILKTIRESLPRDAIMTTGVGQHQMWAEVFWENLEPRSFFSSTGMGTMGFGLPAAIGAKVGRPDKIVVDFDGDGSFLMTGNNLAVAVDYNIPVIAIVNDNRTLGLVRQVQDMFQNKRIVGVDYGNSPDLVKYAEAFGALGFDVENYDDIKNAIKTAIKEDVPAVIRVPVDKEELALPTLPPGGKLREMIVSDPRKKNNGDSKLP

SEQ ID NO: 27802 - protein, 379 aa, Picrophilus torridus DSM 9790
MVSSRLSQISESATVSMSNRASELRKAGKKLYNFGIGEPDMTTPDNIIKMAFDDAMSGKTHYTPSAGIPELREKIALKMKSKNNIDVVAKNVLVTPTKFSINLALYTIIDPGDEVLIPSPYYVSYPDIVKINSGKPVFADCDDEYNIDIDNLRRAITPKTRAILINNPVNPTGKVLSEKNIRETVDFALENNLYIISDEIYEDIIYRGKMFSPASIPEAFDKTVTVSGFSKSYAMTGWRVGYMVAPEEIIKSADKIQQQTLTCAPSISQYAALHALDDDDSVKHIRETFEKRRDLVVSLLKETNLHFYEPEGAFYVFPGYESDVKSYDAAMNLLENKNVIVTPGAPFGSEYHFRISFATSEDDIKNGIPLIGEYFKSIS

SEQ ID NO: 27803 - protein, 258 aa, Picrophilus torridus DSM 9790
MFKYDLLIFNTMTELNVVDLKASVQGTEILKGVNLTVKSGEIHALMGPNGAGKSTLGYVLIGHPDYKVTSGRIILDGKDITGATPEERARLGLFLAFQNPVSIPGVKISTFLRTAYNQMHPDEKLSLKDFFNLVKSNMESVGLNESFISRSVNDGFSGGERKRFEILQMLVLRPKIVILDEIDSGLDIDALKQVSSHIQREYNEGIGFIIITHYQRILKDIRPEFVHVLMNGRIVMNGDKNLSDKIETEGYDWLKEVA

SEQ ID NO: 27804 - protein, 280 aa, Picrophilus torridus DSM 9790
MNVGVLGLGRMGSGMAYTLLKKNFNVTGYDVNKMAYGRFNGIKNFKPAESIDDLYNNDAVIFSLPTGLEVKQALSSYNNKSIIIDTTTLDIRELHENLAIINNSKNYLTCRLERGPKEANEGDLAMFVGGDMETYNKINNLFDALGTHVFIGTHEQATMMKLISNMIGTAIVDLLGQVSVVIERAGIDKDTAIKALSLGGANTVELFRLPWQISSKYEPSFSLELAQHVIEMAINSSRELGIEEIPMVQLNNTMMKLGLKMNLGSKDVSEIAELYKKLNK

SEQ ID NO: 27805 - protein, 433 aa, Picrophilus torridus DSM 9790
MKYLVVTSRGPFSHEKKGKNETIENNVGGVATALKMLLSKNGGTWVCWGSGSLDINYKSENFSNYVIKRIILNSTEKKKFYDEYSNGTLWPVFHYFRDRTTFYKDAFRYYLEVNRKFAREVIENIDDDTVIWIHDYQLAMLPGILRESNVKNKIIFTWHIPWVSPEFFSIIPESREIIKSISSSNYITFHIDNYRENFINSQRFLLGSSTPSRVYSIPLGIDTKFFSPKNAKKINNIKAKIIFSIDRLDYTKGLTLRVLAIEDLLTEHPELLKKFVYIMNVTPSRTTVSEYINMKKELEMSVGRVNGRFGTIDWRPIIYMYRKIRDKTLLSYYKSADVALITPLIDGLNLVSKEFVATTENGVLIISRFAGASKELSSAITVNPYNIKETANAIIKALSMDVNERNNMISKLKNTVVKRDIKWWYRRITALPR

SEQ ID NO: 27806 - protein, 301 aa, Picrophilus torridus DSM 9790
MPDKEVKIVEAVPNFSEGRDISKIEKIIDSIKNIEGVKILDLNVDPQHNRSVITFTCGIERIIEAGISMIKTAASLIDMEKHSGLHPRFGATDVFPIIPITASMDDCIIASRNLGRLVGSELNIPVYMYSESAMVPERRNLENIRNKNVQYEELKELIKTDKYRPDFGPDSLGSAGAVIIGARPALIAYNIYISTDDIKIGRRIASALRGRDGGLNTLKTLAFYIEARKMVQISMNITDYKKTSIYKIFELLSIECRRYNVYPVESELIGLMPMDALIDVFNYYMKSNITRDKILEYKIFT

SEQ ID NO: 27807 - protein, 337 aa, Picrophilus torridus DSM 9790
MEEIVKIGGSILTGTESIERIAELFNDSRIIVTSALKGVTDRLIRIYNENDQESLKDLIEEHKTILTAISDNFDEHLKEIANDMNYYLSCRYKSAFITSGERLAALILYAAISKRNDRFLLLNRPVIITDDSMDDAYAIMDETEKNLKNLVGYEHNYVIPGFMGLSRSGRITSLGRGGSDYSATVIARALNINVVRFITDVPGIMTADPKVVKNAYTVKEVSIYEAMEMARFGVKKFNRKTFEPVLGSNIEIRIESLVSGEMTLISNKTENTVKCLMFDESKNSVTIIGHGILNDKLQNIIITLSDNFVSNGLSITSMLKPGRSFEDVYKEVIGCQR

SEQ ID NO: 27808 - protein, 310 aa, Picrophilus torridus DSM 9790
MYRVLVTEKIPFTDYYKDIDFIYKPKNMDSHQWLMESINDADGILITLSDRIDSEIIDAAKKLKVISTYSVGYDHIDVKYALSRNIKIGYTPDVLTESTADFIFGLIICIARRICSGYETIISNKWEYRWKPDFMLGHDVYGKTLGILGLGRIGHAVMRRASGFDMNVIYYNRTERDVNGHVGLNELFSRSDFIVITLPLNDETRNIVNKDLISKMKKTAYIINASRGHIVNEDDLYNALLNRDIAGAALDVFDNEPVRADNRFVKLDNVLLTPHMASASYETRRDMANLALKNLELGLHGLNPEKYVNI

SEQ ID NO: 27809 - protein, 432 aa, Picrophilus torridus DSM 9790
MSFDVSWLNTGNNAWMLTAATLVGLQSIPGLALYYAGMTKRKYMVNAMMMALYAFSAVLVVWVIAGYSFGFGTVPLLKIDGYYIFSMPVPVGSASFIAGQAIVGPERIALSIPNSTVIFFQFVFAAITPVLLMGGILERMNFKAWMVFVPVWSFLVYSPVAYWLFAGGWLNQLGAVDFSGGYVIHLDAGVGALAAALAIGPRIKEDMNLKANNLGLVMLGLGLIWLGWDGFNGGDPYGSGIDAAIAIINTNVATAVSMITWMLMDMKFFKKASLIGASVGAIAGLVGITPAAGYVNIYGAMVIGIATGIIPWIALYKIEPHFKIDDALGVFSSHAVAGIVGGILTGVLADPFITQYIDPGLRGAIYGDFYQLGIQALAAAVVFAYTFAMTIAILKIIGLFIPLREKEENLKLGDLAIHGEIGFEDSYQAVRK

SEQ ID NO: 27810 - protein, 680 aa, Picrophilus torridus DSM 9790
MGNRNFIPVPKQKNPEFWDIKRIDHIRRLSMTGEPYEIFVNNSGNRILDRISFNVNDRTINDDYGNTETELAGLKMSVPLYLGDMSYGALSGNPNIAIANAAEKTETMAGTGEGGLLPELYDKKRIFVQWASARFGVTLDTLNRGSAVVIKIGQGAKPGIGGHLPGIKVTGPISTTRKIPEGLDAISPAPHHDIYSIEDIAQRIESLKIATKKPVFVKVAATNYIPYIAAGIARSGGDGIIIDGHGAGTGATPLVIRNNFGIPVELAVASAHKMLLKDGNRRKFKIIAAGRVSNSTDAAKLMALGADVVSMGTGVLIAMGCIMVKKCNLGFCPVALTSKIDGKRVFDESYGTDNLIRFINGFTKELSLIVKRLGLRSIRDLTGRSDLLYSDGISEKDLDILSINGEPAEVSPEYGRIDPDYSYLNHLSNTGSAYITSMGSDAPPEIKSPRRIIDFLRLDGAQVTRPPIDPYREEIDISFRLHSIDLEMPLIIDIRNAPGRIKMMLRFAAQASGIAVIDNETLEDYNDITIRYIDGIYIHRSSIYTEKTLAKGFSGYIINSEINLIKIDNYLRSINKRNEYDIIFNLNDNFLNSGDIAKLIALGADAVIISHKIFMESTTDPNYNKALNFVNAIKKELLLISGAMGMYDMQNSLTGNHEILRSVSLNYSLPEINVKEAGSQ

SEQ ID NO: 27811 - protein, 443 aa, Picrophilus torridus DSM 9790
MKRGHGSGVISVPVATAVGLGAIIGAGIFVLSGTAIALAGANALFSFILVGILAVIIAVQFGELGSIMPNAKGASFSYTYNAFGSELGFIIGILLYFSFATAISAIALGFGSYLSSVLLLHGNNYPIMFAILLIFILSIVNIIGIKKAARLDSFLVLIKLLILTVFIISAVLLAHFSGTLNLNNFHGSARQSGVLPVLSASIAVFFAYSGFQSISTITSNVRGGASGAARAIVLSVVISMIFYILVIFALMLMVPASKFVISADPLSFALKYVRAPYSIFILVDAGALMATASATLAMILTSSRVIYQISENKLLPGFFRKYDRKRDVPVNGVILSALIGVAMLFSGNIYIIAAISNFGLLISYLVSSLALIHFRRNNKTGSFKTPFYPYITVISIVMLLVFILGMPREVLDIGMILIIILLMLYYFLVEFKRDRVIHEELFK

SEQ ID NO: 27812 - protein, 548 aa, Picrophilus torridus DSM 9790
MATVADVIVKTLVNFGVKRIYAIPGDSLNPIIDAIRRNRDIKYIQVRHEEGGALSASFESKYSGNLSACMGTSGPGSIHLLNGLYDAKMQHVPVIALTGQIETDLLYHDYFQEVDLVKLFDDVSVFNARITNPDNANYIIWRACREALIKKGVAHVDMPVDVLRMNSREIDLSYNIEKPDYKPDLKGAEELINKSKRPLIFIGSGARDAGEKINKLAERIGAPIIYALNGKGIISDGDKKVLGGIGLLGTRPSIKAMSKTDLIIFLGTVFPYSAFINNVKNIQVNNNIEDLNKIMKADVSCLCDVSYFLDNLNVSEKSDKFYDEMDSEISKWKKDIESRAFKRDNIISAEALSYEISKRIEDDAIIVGDTGNVTLWVNRYINAKKNNKFFFSSWLGTMGAGIPGTIGISLASGRKVYGIIGDGSFAMTSMELITIKKYNIPVKLIIYDNHILGMIKLEEEIMGYPEYGVDLYNPDFARLAESVGIKGIRIENYNELNEKLDEFFNYDGPAVLDVITETNETPMPPKLEFRVAERYITSILREKLEPRE

SEQ ID NO: 27813 - protein, 388 aa, Picrophilus torridus DSM 9790
MKDVYIVSAKRTPIGKFGKGFSKIKATELGGKAIRAAIDDAKLDPALVQEVIMGNVIEGGVGQNPAGQAAYHAGLPFGVTKYTVNVVCASGMLAVESAAREIMLGERDLIVAGGMENMSMSPLLLSSEFRWGPKQLLYKNMKIEDSMLVDGLIDAMYYEHMGVSAERSARKYNLTREDADSYSVQSQERAIRATESGEFRNEIVPVNDIDRDEGLRKTTMKDLEKLNPAFDRDGILTAGNSSQLSDGASALVMASEKAINEYDLKPIARITGYESASLDPRDFVEAPIPATKKLLEKQNKSIDYYDLVEHNEAFSVASIIVRDQLKIDNERFNVNGGAIAIGHPLGNSGSRIIVTLINALKTRHMKTGLATICHGGGGGHTITLEMVE

SEQ ID NO: 27814 - protein, 445 aa, Picrophilus torridus DSM 9790
MELKRSITLTGAIMINLGAIIGAGIFVIIGIAAYRAGPGVIISIVLSGIIAILTGLSFSEIARHVAKEGGAYEYAKDTLSPSAGFVAGWMWTSGNIIAIAAVATSFGSYFDVLFNINVNPFFIAVICILAFMTLNILGIKNSTKTITGLVILNVLVLLVFIFSGITRFNSNNYVNFMPHGISGIITGTALIFFAFTGFSRVTTVSDEVINPEKTIPLAIIVSIIISSILYILIAVVLIGLKPYYAYQGSTSPLSLAVSSLHNRYIDIIVSIGGVTSTAGVTLTGILGTSRVLFAMGRDKELPEKLSYIDRFSTPVFAIILSSILGIIFLIFVSFGTIVEASNSSVLISYIIINVAAGFLYLKLRKRETKRLAGRPFFIIIPALGIATILLIISHINIGSLEITGVILLICIIYYIIRRIALNIEGRRVPRHSDVRLFGKSRSRTN

SEQ ID NO: 27815 - protein, 662 aa, Aegilops tauschii
MPRTVSDGGEDFDGDVSSQTGSHRHTDSNSTHHHHGYKVGFPPARGLFAEFADGVKETFFADDPLREYKDQSRSKKLWLSLVHLFPVLDWARSYKFSMFKGDFIAGLTIASLCIPQDIGYAKLAFLPAHVGLYSSFVPPLVYAMMGSSRDIAIGPVAVVSLLLGTLLQEEIDPVKSPYEYSRLAFTATFFAGITQAMLGFFRLGFIIEFLSHAAIIGFMAGAAVTIALQQLKGFLGIKKFTKKSDIISVMESVWGNVHHGWNYQTILIGASFLAFLLTTKYIAKKNKKLFWVSAIAPLISVVISTFCVYITRADKQGVAIVKDIKQGINPPSFHLIYWSGPYLAKGFRIGVVAGMVALTEAIAIGRTFAAMKDYQIDGNKEMVALGTMNIVGSMTSCYVATGSFSRSAVNYMAGCKTAVSNVVMAIVVMLTLLLITPLFKYTPNAILASIIINAVVSLVDYETAYLIWKVDKMDFVALLGAFFGVVFASVEYGLLIAVAISLGKILLQVTRPRTALLGNLPRTTIYRNVEQYPEAAKVPGVMIVRVDSAIYFTNSNYVKERILRWLRDEEDQQQEQKLSKTEFLIVELSPVTDIDTSGIHALEELLKALEKRKIQLILANPGPAVIQKLRSAKFTELIGDDKIFLSVGDAVKKFAPKSALNV

SEQ ID NO: 27816 - protein, 649 aa, Aegilops tauschii
MSRTMSDGSEDFNGNISRTGSHRQTDHHGYKVRFPPAKGLFTELAEGVKETFFANDPLREYKDQPRSKKLWLSLAHLFPVLDCPTSYTFGMFKGDFVAGLTIASLCIPQDIGYAKLAFLPAHVGLYSSFVPPLIYAAMGTSRDIAIGPAAVLSLLLGTLLQEEIDPVKNPYEYSRLAFTATFFAGVTQAMLGFFRLGFIIEFLSHAAIVGFMAGAAITIGLQQLKGFLGIAKFTKKSDIISVMESVWGNVHHGCNWQTILIGASFLAFLLTTKYIAKKNKKLFWVSAIAPLISVIISTFCVFITRADKQGVAIVSINPPSFHLIYWTGPYLVKGFRIGVVAGMVGLTAIAIGRTFAALKDYQIDGNKEMLALGTMNIVGSMTSCYVGTGSMSRSAVNYMAGCKTAISNVVMAIVVMLTLLLVTPLFKYTPNAILASIIINAVVSLVDYETAYLIWKVDKMDFMALLGAFFGVVFASVEYGLLIAVAISLGKILLQVTRPRTALLGNLPRTTIYTNVEQYPEATKVPGVMIVRVDSAIYFTNSNYVKERILRWLRDEEEQQQEQKLSKTEFLIVELSPVTDIDTSGIHALEELLKALEKRKIHLILANPGPAVIQKLRSAKFTELIGDDKIFLSVDDAVKKFAPKSALNV

SEQ ID NO: 27817 - protein, 340 aa, Streptomyces tubercidicus
MGSDIAQDGSLQLLEISESFIYARALHLAAELKLADLLADGPRPTAELAEASATRPAALYRLLRALAGRGVFTEVETGRFGLTPVGECLRSDHPRSVRATVAQAGRLTAKTFNHAEEVLRTGEGAFTTAFGQPVWDYLQEHPDEGADFDTAMHEHSRIERDAIVAAYDFSGTARLVDIGGGDGTLLATVLTAHPETAGVLFDLPHVVERHRIGDAGLTDRCEIVGGDVFGELPAGGDLYMMKSVLHGWTDREVVSILTGCRRAMKPDGTLLLIERVIPVGDTPHSSKAFDLAMLVMAGGQERTQDEYTELLTEAGFRVERVIGTDSSLSIVEAVPTGAAL

SEQ ID NO: 27818 - protein, 352 aa, Streptomyces tubercidicus
MTDTASELDPSTGWAGPTAEAPPEAALMQLLMGGFVTQSIGVAARFGVADALAGGPRHVDDIAAEVGAHAPSLYRLLRALGDFGVFAELADRHFALTPAGELLRTDSTPSLRGLAAHFGSGFHRAAWSGLYDSVRTGAAAFERVHGAPQFDYYRSHPEEAAVFDAAMTSVASAIYATLESYDFGRFSTVVDVGGGNGAYLSGILASNPALRGVLFDLPDVVERSAPVLAKAGVADRCEVAGGSFFDEVPRGADAYVLTAVIHDWDDEASVRILRNCRAAMPAHATLLLGEPVLPDGPEPSVGKLLDLETLIGTTGRQRTEAEFRELLDRAGLRLTRVIHSAGPDSLVEAVPR

SEQ ID NO: 27819 - protein, 112 aa, Oryza sativa
MALAKAKETVASAPVVVYSKSYCPFCVRVKKLFGQLGATFKAIELDGESDGSELQSALAEWTGQRTVPNVFINGKHIGGCDDTLALNNEGKLVPLLTEAGAIASSAKTTITA

SEQ ID NO: 27820 - protein, 557 aa, Pseudomonas syringae pv. syringae
MDDHFNSPSIDILYDYGPFLKKCEMTGGIGSYSAGTPTPRVAIVGAGISGLVAATELLRAGVKDVVLYESRDRIGGRVWSQVFVQTRPRYIAEMGAMRFPPSATGLFHYLKKFGISTSTTFPDPGVVDTELHYRGKRYYWPAGKKPPALFRRVYEGWQSLLRDGYLLEGGSLVAPLDIAAMLKSGRLEEAAIAWQGWLNVFRDCSFYNAIVCIFTGPHPPGGDQWARPEDFELFGSLGIGSGGFLPVFQAGFTEILRMVINGYQSDQRLIPDGISSLATRLADEVFDGKTLRDRVCFSRVGRISRDAEKIIIQTAAGEQRVFDRVIVTSSNRAMQMIHCLTDSESFLTRDVARAVRETHLTGSSKLFILTSTKFWIKNKLPTTIQSDGLVRGVYCLDYQPDEPSGHGVVLLSYTWEDDAQKMLAMSDKKTRCQVLVDDLAAIHPTFASHLLPVEGDYERYVLHHDWLTDPHSAGAFKLNYPGEDIYSHRLFFQPMTANSPDKDTGLYLAGCSCSFAGGWIEGAVQTALNSACAVVRSTGGQLSKGNPLDCITASYRY

SEQ ID NO: 27821 - protein, 150 aa, Apium graveolens var. dulce
REFDFIAEYIWIGGTGVDVRSKSRTISKPVEHPSELPKWNYDGSSTGQAPGDDSEVILYPQAIFKDPFRGGNNILVICDTYTPQGEPIPTNKRHKAAQIFSDAKVLGEVPWFGIEQEYTLMQQNVNWPLGWPVGGYPGPQGPYYCAITSE

SEQ ID NO: 27822 - protein, 670 aa, Oryza sativa Japonica Group
MGGRVCLVNTGQGTPFASSVELRPLGSELYPAVMANQYIRLYRRRNLGPTTASVTRYPNDPFDRYWWHQDTNNPMWENLTTTSINIKLESSFEVPAAILKDAVQVAGNRDSQVREFNVYFNSGPPNKYRPHYLAAGFVYSTRWYRAIDGDFNVTLAATPESVLPPMLNAYEIYTLISMTLPPHFNKTVDAIWAIKVEYGIKKNWMGDPCFPSQFKWDGVECRNTSDNIPRIISIDLSNSNLHGVISSNFTLLTALEYLNLSGNQLNGPIPDSLCKLNEGSLVFSYGSNGDVCNKTNLPGSKKRAAILAISIAAPVLVVVSLLIAYLIWRAKGKSNISIPGSEKYHWDRLQKNENRHFTYDELKKLTDNFQQFIGEGGFGCVYHGYLEDNTEVAVKIRSEKSSHGFNEFLAELESLTKVRHKNLVSLVGYCSEKAHLALIYEYMPRGNLFDLLRDKTGVGESLNWAMRVRVLLDAAQGLDYLHTGCNRPIIHRDVKTSNILLDQNLHAKIADFGLSKIYLSDTQSGLSTTVAGTMGYIDPEYHITGRVTESSDVYSFGVVLLEVATGQGPILQGNGHIIQHVKEKVASGDISSIADERLNGGYNVSSMWKVVEIALLCTKPLPAQRPSMTTVVVQMKESLALEVAREDRGLQANPTGDAVATSSTFDPSAR

SEQ ID NO: 27823 - protein, 194 aa, Akebia trifoliata
LCDAEVALIVFSPRGKLYEFASSSTRKTIERYQRHTKDVQINIGGMEENMQHLKFEAANMAKKIDLLEASKRKLLGEGLGSCSIEELQQMETQLERSLSNIRMRKTQLFIEKIEELKEKERILLEENKMLCEKCGVLPGQELKQQLLEIAPFSQNSQNSDVETEIVPYSQDSQNSEVETELYIGQPTRYPSHQG

SEQ ID NO: 27824 - protein, 208 aa, Azospirillum brasilense
MKLAEALLRALKDRGAQAMFGIPGDSACPSLGGGGNADPAAPHAEHEPPVGFAADAAARYSSTLGVAAVTYGSGAFNMVNAVAGAYAEKSPVVVISGAPGTTEGNPGLLLHHQDRTLDTQFQVFKEITVAQARLDDPAKAPAEIARVLGAARALSRPVYLEIPRNMVNAEVEPVGDDPAWPVDRDALAACADEVLAAMRSATSPVQMV

SEQ ID NO: 27825 - protein, 400 aa, Helicobacter pylori 26695
MEILVLNLGSSSIKFKLFDMKENKPLASGLAEKIGEEIGQLKIKSHLHHNDQELKEKFVIKDHASGLLMIRENLTKMGIIKDFNQIDAIGHRVVQGGDKFHAPVLVNEKVMQEIGNLSILAPLHNPANLAGIEFVQKAHPHIPQIAVFDTAFHATMPSYAYMYALPYELYEKYQIRHYGFHRTSHHYVAKEAAKFLNTAYEEFNAISLHLGNGSSAAAIQKGKSVDTSMGLTPLEGLIMGTRCGDIDPTVVEYTAQCANKSLEEVMKMLNHESGLKGICGDNMRNIEARKEKGDKEAKLAFEMCAYRIKKHIGAYMVVLKKVDAIIFTGGLGENYSALRESVCEGLENLGIALCKPTNDNPGSGLVNLSQPDAKIQILRIPTDEELEIALQTKKVLEKTE

SEQ ID NO: 27826 - protein, 190 aa, Streptomyces lincolnensis
MGREGQSTRQPVPAVFFDRDGVLIEATVRDGRPYPPRSADDVRLDPHAVDAVLSLRAAGFALAVVTNQPDVARGTATAEAVRAVNARTAELLGIAPESFFTCLHDDADGCSCRKPGPGLVLRAARHCGADLSRSFVVGDRWRDVGTAHRAGCAAVWIDRGYRERRPDPPYHRVPSLARAVAVALGGHGGR

SEQ ID NO: 27827 - protein, 336 aa, Pseudomonas putida
MTHKVALNFEDGVTRFIDANAGETIADAAYRQGINLPMDCRDGACGACKCFAESGRYDLGEEYIEDALSEAEAEQGYVLTCQMRAESDCVIRVPAASDVCKTQQASYQAAISNVRQLSESTIALSIKSASLNQLAFLPGQYVNLQVPGSDQTRAYSFSSLQKDGEVGFLIRNVPGGLMSSFLTSLAKVGDSVSLAGPLGAFYLREIKRPLLLLAGGTGLAPFTAMLEKTAEQGSEHPLHLTYGVTHDHDLVEMDKLEAFAARIPNFSYSACVASPDSAYPQKGYVTQYTEPRHLNGGEVDAYLCGPPPMVEAVSQYIRAQGIQPANFYYEKFAASA

SEQ ID NO: 27828 - protein, 433 aa, Mesembryanthemum crystallinum
MAQILAPSLQVKMSITKSSTPASSMLPNTWTSVVLKQSRKGSIKNSTKFKVCASIKPDVSVQNRVEQLLNLDVTPFTDKIIAEYIWIGGAGIDLRSKSRTLSKPVEHPSELPKWNYDGSSTGQAPGEDSEVILYPQAIFKDPFRGGNNILVICDAYTPAGEPIPTNKRHKAAEIFSNPKVVSEVPWYGIEQEYTLMQPNVKWPLGWPVGAYPGPQGPYYCGVGADKSFGRDISDAHYKACLYAGINISGTNGEVMPGQWEFQVGPSVGIEAGDHVWCARYILERITEQVGVVLTLDPKPIEGDWNGAGCHTNYSTKSMREEGGFEVIKKAILNLSLRHKDHISAYGEGNERRLTGKHETASIDSFSWGVANRGCSIRVGRDTEKAGKGYLEDRRPASNMDPYVVTGLLAETTLLWEPTLEAEALAAQKIAMKV

SEQ ID NO: 27829 - protein, 349 aa, Mesembryanthemum crystallinum
QNLNISEVSEKIIAEYIWIGGSGMDMRSKARTLNGPVDDPKKLPKWNYDGSSTGQAPGQDSEVILYPQAIFRDPFRRGNNILVMCDAYTPQGEPIPTNKRYHAEKIFSNPEVAAEEPWYGIEQEYTLLQKEVNWPLGWPIGGFPGPQGPYYCGVGADKAFGRDIVDAHYKACLYAGVTISGTNGEVMPGQWEFQVGPSVGISAGDEIWIARYILERITEIAGVVVSFDPKPIPGDWNGAGAHTNYSTKSMREDGGYEVIKKAIEKLGMRHKEHIAAYGEGNERRLTGKHETANIETFLWGVANRGASVRVGRDTEKEGKGYFEDRRPSSNMDPYVVTAMIADTTLLWKP

SEQ ID NO: 27830 - protein, 462 aa, Mesembryanthemum crystallinum
MGEQELLLQQQIKEDRNVSRETEMKHPALQGKYELGRVLGQGTFARVYHARNLVTGNSLAIKVVAKDKVIKVGMMEQMKREISVMKRVKHPNIVQLHEVMASKSKIYLAMDLVRGGELFSKVSKGGKLDEDVARSYFKQLISAVDFCHSRGVYHRDLKPENLLLDEHGNLKITDFGLSASFENEDHHQTLLRTSCGTPHYVAPEVISRKGQQGYHGAKSDIWSCGIILFVLLAGFLPFHDDNIIRMYRKVFKGDFTCPSWLSSQARDLITRLLDINPATRITVSEIMQSDWYCMDTSSMTAVTTDEFDLDHNNNNNNNSNYNNIHHHKKEPEMLNAFHIISLSQGFDLSPLFEEKHREERQDMRFATTKSASTVVSRLEEVAAKAGKFIVKKFCGDSVVRLQGQERGRKGKLAIAAEIMSVSPSLLVVEVKKDNGDTLEYNQFCTKQLRPALKDIVWTCPSS

SEQ ID NO: 27831 - protein, 233 aa, Edwardsiella ictaluri
MTEVVAREQLEDNVVLGTLMLEQNEVDGLVSGAVHTTANTIRPPLQLIKTAPGSSLVSSVFFMLLPEQVLVYGDCAINPDPTAEQLAEIAIQSADSAAAFGIDPRVAMISYSTGNSGAGSDVEKVREATRLAQEKRPDLVIDGPLQYDAAIMADVAKSKAPNSPVAGKATVFIFPDLNTGNTTYKAVQRSADLVSIGPMLQGMRKPVNDLSRGALVDDIVYTVALTAIQSSQQ

SEQ ID NO: 27832 - protein, 595 aa, Nicotiana tabacum
MAVDSVLSSPLGPPACEKDAKALQFIEEMTRNADAVQERVLNEILTRNSQTEYLKRFKLDGVSDRETFKNKIPVVTYEDLQPEIQRIANGDRSPILSAHPISEFLTSSGTSAGERKLMPTIKEELDRRQLLYSLLMPVMNLYVPGLDKGKGLYFLFIKSETKTPGGLLARPVLTSYYKSEHFKRRPHDPYNVYTSPNEAILCADSFQSMYTQMLCGLYEREQVLRLGAVFASGLVRAIRFLQLHWPQLAHDIRTGTLNPEITDPSICERMGLVMRPNPKLADFVTDECSKENWEGIITRIWPKTKYLDVIVTGAMAQYIPTLDYYSGGLPKACTMYAASECYFGLNLNPMCKPSEVSYTIMPNMGYFEFLPHDPNSSRDSTRNLVDLVDVEVGKEYELVITTYAGLYRYRVGDILRVTGFHNSAPQFHFVRRKNVLLSIDSDKTDEAELQRAVENASKLLKEFNTSVVEYTSYADTKTIPGHYVIYWELLMKDLNNSPSDEVLNKCCLAMEESLNTVYRQGRVACNSIGPLEIRVVKNGTFEELMDYAISRGASINQYKVPRCVSFAPILELLDSRVMSRHFSPSLPQWTPERRH

SEQ ID NO: 27833 - protein, 501 aa, Avena sativa
MAMTPPTSFPPASPSSYFNNMSTGFLDSPILLTPSLFPSPTTGSFPLEPLNWMGTAPESNDGLQLGSVKDGQQRQYSGFTFQTTAAPVPAAMPGTNTTASSFLQSSMPMAQQGHDSYTGEQQQPWSYQDAGSMDAMTTRPASFSTPYEAPDMVGNGGYNNAPVSSSGTTAGYGRVQSRRPSSDDGYNWRKYGQKQMKGSENPRSYYKCSFAGCSTKKKVEQAPDGQVTEIVYKGTHNHPKPQNPRRSSAPASSSYASPDASSDALSGTPENSSASYGDDETNGVSSALAGQFGGGGEEFADNEPDSKRWRTDSDAEGVPVGANRTVREPRVVVQTMSDIDILDDGYRWRKYGQKVVKGNPNPRSYYKCTTAGCPVRKHVERASQDLRAVVTTYEGKHNHDVPALRGSAAAAARYRAAPMQAASYLQGGGGGYSSLRPDGFGGGAPAQPADQSGFALSGFDYNNSSYSYSGMQQQNDAMYYDAARTKDEPRDDMFFEQSLMF

SEQ ID NO: 27834 - protein, 177 aa, Citrus unshiu
MSSRERDPLIVGRVVGDVLDNFTRTIPMRITYSNKDVNNGRELKPSEVLNQPRAEIGGDDLRTFYTLVMVDPDAPSPSDPSLREYLHWLVTDIPATTGASFGQEIVNYESPRPTMGIHRFVFVLFRQLGRQTVYAPGWRQNFSTRDFAELYNLGPPVAAVYFNCQRESGSGGRPVRR

SEQ ID NO: 27835 - protein, 478 aa, Bacillus anthracis str. Sterne
MKKGKIAVVTVAYTVLLATSVHTYKKQLDHPIMSDVGKLLPTKIKRVESATDEHSLIKLVQDANVSGEKISIAGMQHSQGGQTYYPHGTMLDMKGYNKILEFDPEKKRITVQSGVTWNDIQKKVNPYGLAVQVMQSQNIFTVGGSLSVNVHGRDIRHEALIDTVESFRLLMADGIVRNVSREENADLFPYVIGGYGLFGVILDVTLKLTNDELYETHTKMLDYKEYTSYFKEKVKKDANVRMHLARISVAPNSFLREMYVTDYTLAQNQNMREEYSELKEETIIAAPKFLLGLSRYSDWGKNTFWDIQRSYFERTDGKYETRNNVMRSDSTFMEYENPNRTEVLQEYFVPIDSFTEYIDDLRNVLNEEEFNLLNITIRYVEKNENAVLSYAKDDMFALVLLINQGRSENEIKKTEGVIQKMIDVTLKHNGSYYLPYYSYPTKEQLKRAYPRIEEFLGKKKEADPKERFVNLFYREYTK

SEQ ID NO: 27836 - protein, 1478 aa, Bacillus anthracis str. Sterne
MLNKTNTWTPSLFRDYKNAEHDACGIVSVMEKRKIPTKENIDLCIQSLVKMNHRAGFINGEGDGIGIHIDVPKALWNEKLKSSGYNPTIVDHPHFIVGHFFLNKNENIVDLKNHIRTQLNNENFAILFESDNVINSDALGPLGKQEEPLFWQVALIAENEVVNIEQTLFSVTIKIEENEAIHVASLSRDHVVYKVLGAGDTLVAYYNDLQHPLIASTMTLGHNRYSTNTLSNFFRVQPFSILGHNGEINTIAKLRDQAEMIHVPLTAGGSDSQDLNRTLETLLVQYGYSLFEAMDILFPPIINEIKLYETHLQDLYTYIREAWGHFAQGPAGIISRYKDEAVFSVDSLGLRPVWKVEIESSYIFSSEPGVVSPTEYVAEPKPLAPGEKVGLKWNEQDELVLYEHDDYQTQVYNRFKKKVDVTNYHLHLSIPKTKEIPDACDSMQVETKQYVAFGWDREHIQLLEQMATKGVEPIRSLGHDSPLAALDTDRRNIADFIKESVAVVTNPAIDRDREVEHFSTRTILGERPSLLSDAKKPFVVEMLSPIILEGSVAQSIAQELHTITYEQLIELFNTHSSIATISATFSQAETLQCALSRISSEAITAVNDGASLLLIDDADAHLNERLWIDPHLVTAKVHQVLSENKLRRNCSLVIRSGALRSLHDIVTLHGLGADSINPYLLFATVNDGTKTPITNLYNALNKGLEKVISTIGIHELRGYGRLYSSIGLHEEIANILQITNFLGSNDLAFSLESLAEDAQMRADDYNDPKVRIRKSFHIFPRIWKAIGDVAKGNSYDDYRDKLSELEENNPIAIRHLIQTKETKHVIPTEEVSISIQNHDLPFIISSMSFGSQNEIAFRAYAEAADQLNMISLNGEGGEIKDMIGKYPHTRGQQVASGRFGVNAELLNSSNLIEIKIGQGAKPGEGGHLPGSKVTAKIAEARNATIGSDLISPSNNHDIYSIEDLAQMITEIKTANQLAKVAVKVPVVPNIGTIAVGIAKAGADFINISGFDGGTGAARIHALQHVGLPVEIGVKAAHNALLEANMRHNVEIWADGGIRSVNDALKIMLLGANRIGFGTLSMIAIGCTTCRGCHLDTCHVGIATQIESEAQAKEHGLRRFVPRELESAVAGLLHLFTTFGEELKRLTGNLGYTNLQEIVGRSDLLEQVRGKNLLNLCNLLQTIEHPSVIKTEHVLEKQFEPIHSPHPKELVGVGVEQRVMGGLESCYRVRSKLYEDTKLEPLTLKYTNGSIPGNGLGAYNSENLFIHVNGGAQDGIGKTSFGGGIYITKAKGKDGLYYNGSVGKGFGYGAQKGALYVQGNADARAGIRLSGADMIIGGRMTKPLREKEQGNIGAYSNIKGFAFEYMTNGRALVLGDPGPWICAGMTGGVVYLRHDSSLGLTEQALKRRIAKGANVTLQPISKNGVRDVNELLLDYIRVLNEHEQYEEVALLTPLLDDMQQQFFEIIPKKEQADPSISTE

SEQ ID NO: 27837 - protein, 578 aa, Bacillus anthracis str. Sterne
MIKVFKRGLMRTMSSKTEEKLATGAQLLLEALEKEGVEVIFGYPGGAVLPLYDALYDCEIPHILTRHEQGAIHAAEGYARITGNPGVVIATSGPGATNVITGLADAMIDSLPLVVFTGQVATTLIGSDAFQEADIMGLTMPVTKHNYQVRKASDLPRIIKEAFHIARTGRPGPVVIDLPKDMVVEQGERCSDVQMDLPGYNPNYEPNLLQINKLLQAIQVANKPLILAGAGVLHAKASKELTSFARKYEIPVVHTLLGLGGFPPDDELFLGMGGMHGSYTANMALYECNLLINIGARFDDRLTGNLAYFAKEATVAHIDIDPAEIGKNVPTEIPIVASAKQALQVLLQPEGRKENHHEWISLLKNRKEKYPFSYKRNSESIKPQYAIDMLYEITKGEAIVTTDVGQHQMWAAQYYPLKTPDKWVTSGGLGTMGFGFPAAIGAQIAKPDELVIAIVGDAGFQMTLQELSVLKEHSLPVKVFILNNEALGMVRQWQDEFYNQRYSHSLLSCQPDFVALANAYGIKGVRIDDPLLAKKQLQHAIELQEPVVIDCRVLQSEKVMPMVAPGKGVHQMEGVEKR

SEQ ID NO: 27838 - protein, 294 aa, Bacillus anthracis str. Sterne
MENPHRSPVTVIGLGPMGQALAGAFLMNGHPTTLWNRTAEKADYLISQGATLSNSVTGAVSASPLVIICVLDYNVVHEVLGPVGDALKGRTLVNLTADSPKRAREMATWAAQHGVDYLDGAIMTPTPTIGTPAASVLYSGPESIFKVHQPTLASLGGTTSYLGADPGRAAAYDVALLDLFWTSMSGYAHALALATAENIPAKEFAIYAQGIIDILPDIMAYLASEVDSGHYPGDKSNIISASAGMEHIIHAAQHHGLDVSVLSAAMAVTQQAINEGYGTDGFSRLTELLKKPSA

SEQ ID NO: 27839 - protein, 230 aa, Bacillus anthracis str. Sterne
MANSMTLSQDLKELLASVEYKMQIKKGNFIFQEGMEATELYIIHSGKVQISKLSADGQELTLRICSAYDIIGELTLFTDNAKYLLNSKCLEDVEVGVIKREALEKELLQKPALVFEFMKWISEHLRRMQTKFRDLVLHGKKGALYSTLIRMTNSYGVLKENGILIDLPLTNQELANFCATSRESVNRMLNELKKQGTISIHKGKITIHDLQFLKCEIACEDCSASVCSID

SEQ ID NO: 27840 - protein, 403 aa, Bacillus anthracis str. Sterne
MKLLKNQYIEILVRIMLKHIPNAANKSVLFAFYNGVVTTYSYFHYESMKVFEHGSEGLPSNEIMDNIQRVRHTGESNWTAFVLTVKRNGLYEVDYYDDLNPTLESGSALLLLAYTHYHIEPTSDFSKLQLKSAIKAESFKKTLNYACMRNDIETVKEKLINIKLSTLNKKGPDRKTPLHIACLNENIEIVTLLVEAGADLKIKYHGETPFALACRKGNVEIIKYLISQGENANEIMVGKVTPLHLISSSGNQEIVHYILERITNINAVTNRKRSALHYAVEDNNLEAAKVLIDNGIDMELLEEYKRSALSLACDRNKPEMAGLLLENGANIHSTGQGKVTPLHSACERGFIEVVRVLLQHQPNLHAKATLYSMPRNENLKETPIETAKRLGYDEIVDLLSSKL

SEQ ID NO: 27841 - protein, 493 aa, Bacillus anthracis str. Sterne
MVKIEIMVSLAIYMAGMLYIGYWSYKKTSDLSDYMLGGRGLGPAVTALSAGASDMSGWMLMGLPGAMYATGLSSVWIAIGLLIGAYANYLILAPRLRTYTEVANDSITIPDFLENRFKDRTKILRFVSAIVILVFFTFYASAGLVSGGRLFENSFNLDYKIGLFVTVGVVVAYTLFGGFLAVSWTDFVQGCIMFIALVLVPIVAFTDVGGVTETFNTIKQVDASHLDMFKGTTILGIISFLAWGLGYFGQPHIIVRFMAITSIKDLKTSRRIGIGWMTISIIGAMLTGLVGIAYYAKNNATLQDPEMVFVTFSNILFHPYITGFLLSAILASIMSSISSQLLVISSAVTEDFYKTFFRRKASDKELVFIGRLSVLVVAMIAVVLAYHPSDTILTLVGYAWAGFGSAFGPAILLSLYWKRTNKWGVLAGMIVGALVVITWVQIPSLKASMYEMVPGFFCSLLAVIIVSLVTKEPVKAIHREFNEMEAVLEEETK

SEQ ID NO: 27842 - protein, 379 aa, Bacillus anthracis str. Sterne
MMIYLDYAATTPMSVEALQTYTKAASQYFGNEQSLHDIGGTASSLLQVCRKTFADMIGGKEQGVFFTSGGSESNYLAIQSLLNAQNKKHIITTPMEHASIRSYFQSLKSQGYTITEIPVDKSGLIRLVDLETAITEDTVLASIQHGNSEIGTVQNIAEIGALLKKYNVLFHSDCVQTFGKLPIHVFEMGIDSLSVSAHKIYGPKGVGACYINPQVRWTQVFPETSHEKGFRPGTVNVPGIASFLTAAENILKNQQEESLRFKELRSYFLEQIQTLPLEIEVEGHSTSCLPHIIGVTIKGIEGQYTMLECNRRGIAISTGSACQVGKQEPSKTMLAIGKTYEEAKQYVRFSFGQQTTKDQIDTTIHALHTIGNQFYRGVK

SEQ ID NO: 27843 - protein, 593 aa, Pinus sylvestris
MCGILAVFGCLDASQAKRVRVLELSRRLRHRGPDWSGLYQSGHSFLAHQRLAIVDPASGDQPLYNEDRQIVVTVNGEIYNHEKLREQLKSHKFRTGSDCEIVAHLYEDYGEEFVNMLDGMFSFVLLDTRDQSFIAARDAFGITPLYIGWGFDGSVWFASEMKALHDDCESFESFPPGHIYSSKQGGLRRWYNPPWYSENVIPSSPYDPLVLRRAFEKAVIKRLMTDVPFGVLLSGGLDSSLVAAVASRYLAATKAGKQWGDKLHSFCVGLKGSPDLKAAKEVAEYLGTVHHEFHFTVQDGIDAIEDVIYHVETYDVTTIRASTPMFLMSRKIKSLGVKMVLSGEGSDEIFGGYLYFHKAPNKEEFHQETCRKIKALHMYDCLRANKSTSAWGVEARVPFLDKEFVNVAMDIDPERKMVKPDIGRIEKWVLRRAFDDEQNPYLPKHILYRQKGQFSDGVGYSWIDGLKSHAAEHVTDTMLRNAKYIFPHNTPTTKEAYYYRMIFERFYPQNAARLTVPGGPSVACSTAKAVEWDAAWAHNLDPSGRAALGVHASAYQECNAGANDGTGNGNVNTFSKMPGREASVDAREVLIKG

SEQ ID NO: 27844 - protein, 308 aa, Pisum sativum
QVTTEAPAKVVKHSKKQDENIVVNKFKPKEPYVGRCLLNTKITGDDAPGETWHMVFSTEGEVPYREGQSIGIVPDGIDKNGKPHKLRLYSIASSAIGDFGDSKTVSLCVKRLVYTNDAGEVVKGVCSNFLCDLKPGSEVKITGPVGKEMLMPKDPNATVIMLGTGTGIAPFRSFLWKMFFEKHEDYQFNGLAWLFLGVPTSSSLLYKEEFEKMKEKAPENFRLDFAVSREQVNDKGEKMYIQTRMAQYAEELWELLKKDNTFVYMCGLKGMEKGIDDIMVSLAAKDGIDWIEYKRTLKKAEQWNVEVS

SEQ ID NO: 27845 - protein, 308 aa, Pisum sativum
QVTTEAPAKVVKHSKKQDENIVVNKFKPKEPYVGRCLLNTKITGDDAPGETWHMVFSTEGEVPYREGQSIGIVPDGIDKNGKPHKLRLYSIASSAIGDFGDSKTVSLCVKRLVYTNDAGEVVKGVCSNFLCDLKPGSEVKITGPVGKEMLMPKDPNATVIMLGTGTGIAPFRSFLWKMFFEKHEDYQFNGLAWLFLGVPTSSSLLYKEEFEKMKEKAPENFRLDFAVSREQVNDKGEKMYIQTRMAQYAEELWELLKKDNTFVYMCGLKGMEKGIDDIMVSLAAKDGIDWIEYKRTLKKAEQWNVEVY

SEQ ID NO: 27846 - protein, 308 aa, Pisum sativum
QVTTEAPAKVVKHSKKQDENIVVNKFKPKEPYVGRCLLNTKITGDDAPGETWHMVFSTEGEVPYREGQSIGIVPDGIDKNGKPHKLRLYSIASSAIGDFGDSKTVSLCVKRLVYTNDAGEVVKGVCSNFLCDLKPGSEVKITGPVGKEMLMPKDPNATVIMLGTGTGIAPFRSFLWKMFFEKHEDYQFNGLAWLFLGVPTSSSLLYKEEFEKMKEKAPENFRLDFAVSREQVNDKGEKMYIQTRMAQYAEELWELLKKDNTFVYMCGLKGMEKGIDDIMVSLAAKDGIDWIEYKRTLKKAEQWNVEVW

SEQ ID NO: 27847 - protein, 320 aa, Hyphomicrobium methylovorum
KKKILITWPLPEAAMARARESYDVIAHGDDPKITIDEMIETAKSVDALLITLNEKCRKEVIDRIPENIKCISTYSIGFDHIDLDACKARGIKVGNAPHGVTVATAEIAMLLLLGSARRAGEGEKMIRTRSWPGWEPLELVGEKLDNKTLGIYGFGSIGQALAKRAQGFDMDIDYFDTHRASSSDEASYQATFHDSLDSLLSVSQFFSLNAPSTPETRYFFNKATIKSLPQGAIVVNTARGDLVDNELVVAALEAGRLAYAGFDVFAGEPNINEGYYDLPNTFLFPHIGSAATQAREDMAHQANDLIDALFGGADMSYALA

SEQ ID NO: 27848 - protein, 630 aa, Bartonella quintana str. Toulouse
MAKVIGIDLGTTNSCVAVMDGKNAKVIENSEGARTTPSVVAFTDGGERLVGQPAKRQAVTNPEGTIFAVKRLIGRRFDDPMVEKDKALVPYKIVKGDNGDAWVEEAGKKYSPSQISAMILQKMKETAESYLGEKVEQAVITVPAYFNDAQRQATKDAGKIAGLEVLRIINEPTAAALAYGLDKKDGKTIAVYDLGGGTFDISVLEIGDGVFEVKSTNGDTFLGGEDFDMRLVGYFADEFKKEQGIDLKNDKLALQRLKEAAEKAKIELSSSQQTEINLPFITADQSGPKHLTMKLTRAKFESLVDDLVQRTIEPCKAALKDAGLKAGEIDEVVLVGGMTRMPKIQEVVQSFFGKDPHKGVNPDEVVAMGAAIQGGVLQGDVKDVLLLDVTPLSLGIETLGGVFTRLIERNTTIPTKKSQVFSTADDNQNAVTIRVFQGEREMANDNKLLAQFDLVGIPPAPRGVPQIEVTFDIDANGIVNVSAKDKGTGKEHQIRIQASGGLSDADIEKMVKDAEEHAAEDKKRREGVEARNQAEALIHSTEKSLTEYGDKISTEEKEQIETAISDLKSALDGTDPEEVTAKMQKLAEVSMKLGQAMYEASQAATANTETDTKSDDVVDADFEEISDKKK

SEQ ID NO: 27849 - protein, 765 aa, Bartonella quintana str. Toulouse
MKKSEQDQKMPQMVYNVNEREALDFHSRGRPGKLEIVATKSMATQYDLALAYSPGVAVPVKAIAQNPALAYDYTAKGNLVAVISNGTAILGLGNLGALASKPVMEGKAVLFKRFADIDSIDLEIDTNDTESFINLVRHLEPSFGGINLEDIKAPECFMIESRLREVMNIPVFHDDQHGTAIIVAAGVLNALYLTGRNMENTRLVCNGAGSAGIACIELIKAMGFRPENIILCDTKGVVYEGRKEGMNQWKSAHAVPTDKRTLAEAMEGADMFFGVSAKGAITPEMVKSMAPKPIIFAMANPDPEITPEEVMQVRNDAIVATGRSDYPNQINNVLCFPYIFRGALDVRATVINEDMKIAAARALANLAHEEVPDSVAEAYRGKRLKFGPNYIIPVPFDPRLFTVVSIAVAKAAMESGVAQKHIDDLEAYERDLNARRDPISSMMRGVYNHVRQAPKQIVFAEGEEEQVMRAAVSYVHQKLGQAILVGREEQVKETAAISGIDLEREGISIMNAKLSCRLDAYAHYLYKKMQRQGWLLRDCYRRINNDRNYFAACMVALGDADAMVTGVTRNYETALIDIRRVIDEKPKERLIGISMAICRGRTVFIADTAVYENPNAEELADIAEQTASFVRKLGSQPRVAFVAFSTFGYMKGQITRHIQDAVNILHERKVGFEFDGEISADVALNVKLMQQYPFMGLTEPANILVMPGYHASSIASKMLQELGEATIIGPILIGLEKSVQIVPFSGSDTDVVNIATLAAYHAKKL

SEQ ID NO: 27850 - protein, 163 aa, Bartonella quintana str. Toulouse
MFAVIKTGGKQYHVVANQVVKVEKVIGNAGDVVEFNDILMVGQEDNTIIGAPVVADALVTAEIIKQARARKVISFKKRRRQNSKCTRGHRQEVTILRILEILTGGLKPKRAVAKPIKEEAAVLKETTKKTKATVSIKKTAKKPSEKKSAPQKKAAVVSNNKED

SEQ ID NO: 27851 - protein, 341 aa, Bartonella quintana str. Toulouse
MKFLDQAKVYIRSGNGGAGAVSFRREKFIEFGGPDGGDGGRGGDVWALVVDGLNTLIDYRYQQHFRAKTGGHGKGRNMTGEKGNDIILKVPVGTQIFEEDNTTLICDLTEVGQRYRLAKGGNGGFGNLHFMNSTNQAPRRANPGLVGEERTLWLRLKLIADAGLIGLPNAGKSTFLASVTAAKPKVADYPFTTLYPHLGVARIDAREFVLADIPGLIEGAHEGVGLGDRFLGHIERCCVLFHLISAQEEDVAKAYQIVRNELKAYGNNLSDKTEIVAISQIDTLTLEERKVKQEVLQRVTGKSVMMFSAVSGESLEAMLRAGAHMIEMVRKEGVDRDVRTD

SEQ ID NO: 27852 - protein, 331 aa, Bartonella quintana str. Toulouse
MTIQSSGMLGFQSAVTSALKTLASEKQGLEALEAALLGNLSSSFEVAVQTIKNANGHVVITGLGKSGHIGTKIAATLASTGTPAFFVHAAEANHGDLGMIGSDDVILALSWSGETLELSGIINHAARFRTPLIAMTSGEHSVLARQADIVLLLPKIEEACPHGLAPTTSTVVQLAMGDALAVALLEMRGFTATDFKIYHPGGSLGAHLKYVRDIMHVGDSIPLVVQGTTMTEAMNVLVAKHFGCVGVVNQRGELIGIVTDGDLARNIHFNLSKFNVDEVMTKDPKIVEPNTLVGAATAFINDHHIGAFFVVEDKKPLGIVHFHDLLRIGAA

SEQ ID NO: 27853 - protein, 476 aa, Bartonella quintana str. Toulouse
MLFDEKHNKLKRSLQNRHVQMIALGGVIGTGLFYGSTESIRLAGPSTILAYLFGGLIMYFIMRMLGEMSVEEPTSGAFSFFAYKYWGSLAGFITGWNYWFLYILVSMTELTVIGFYLDHWLLIDHWKSSFIVLLLVTLINLLNVRFYGEFEFGLALIKVAAVVGMIVFGIFLIVTEIGENQASISHLWDHGGFFPYGAMGVVLATCVVMFSFGGTELIGIAAGEVSNPQKTIPIAIRKVMWRIVIFYIGSISVIMMISPWNMIGKDVSPFVKIFEIIGIPAAGHILNFVVIMAAISVYNSGIYSNGRMLYSLAIQKNAPHIFSKLSAARVPYVAILFSSICTAIIIVMNAFVPNNSFMRIMALATAAAIITWSIIVIVHLKFRKVHKDRKGAFIYAFALYPYANYLCLCFLAALFCIMFVSGFGKNGLMAQLFNVVGISASSVESYIPAQMPDMSLAVIIIPLWCLLLLLGYKLKR

SEQ ID NO: 27854 - protein, 418 aa, Bartonella quintana str. Toulouse
MARIVMKFGGTSVANIERIHNVARHIKREVDAGNEVAVVVSAMAGKTNELVQWTRDASPMHKDADEYDVVVASGEQITAGLLALKLQAMGVNARSWLGWQIPIHTDNVHGSARITDINGSFLIQRFQEGQVAVIAGFQGLAPDNRISTLGRGGSDTSAVAIAAAVQADRCDIYTDVDGVYTTDPRIEPKARLLPKVAFEEMLEMASLGAKVLQVRSVELAMVHKVRTFVRSSFEDPDALGMDDPINSSGTLICDEDEILEQQNVTGIAFAKDEAQISLRRLADRPGISAAIFGPLAEERINVDMIVQNISEDGSKTDMTFTVPSVDVEKAVTLLEKNRKEIGFDVLQFERNLAKVSVIGIGMRSHAGVAATAFKALSEKGINIQAITTSEIKISILIDHAYTELAVRTLHALYGLDKG

SEQ ID NO: 27855 - protein, 310 aa, Bartonella quintana str. Toulouse
MKLFCGNSNPRLAEDVATYLNTPLGKATVKRFADQEIFVELHENVRGQDVFVLQSTSYPANDHLMELLIMIDALHRSSARRITAVIPYFGYARQDRKPGPRTPISAKLVANLITEAGAHRVLTLDLHAGQIQGFFDIPTDNLYAVPVISRDVKVHYSLENVIVISPDVGGVVRARSLAKRLNSLLAIVDKRRERPGESEVMNIIGDVSGKDCLLLDDIVDSGGTLCNAASALLKHGANSVTAYITHGVLSGNAIERITNSEMKELVVTDSIMPTAAVENAHNIRVLPIADLIGEAIARTAAEQSVSSLFG

SEQ ID NO: 27856 - protein, 234 aa, Bartonella quintana str. Toulouse
MTDHIQVLSDNAPHLLVIDDDTRIRNLLFQFLLKNGFRVSVSANADEARRQLANLDFDLLIIDVMMPGENGIDLTHSLRQTKDVPILMLTALSEIDSRINGLEAGADDYLAKPFDPRELLLRINAILRRGFPLNQPKIEQIVFGPYIFSISRRELKKGGEVIKLTDKEQKMMVIFAENTGDIIPRHKFATDDSDIGERAIDVQINRLRRKIEKNPATPIWLQTVRGIGYKLSVE

SEQ ID NO: 27857 - protein, 301 aa, Bartonella quintana str. Toulouse
MNDVIKTRSGFVVLIGMPNAGKSTLVNQLVGTKVSIVTHKVQTTRTLVRGIVIHDNTQIVLIDTPGVFRPHKRLERAMVSAAWGGAKSADVLLVLIDAHSGLSDEVCTMLDIVENIKQDKILVLNKIDTVAKLSLLALTAQINERVKFLQTFMISALSGSGCKDLLHALSTMMQRGPWYYPEDQVSDMPMRQLAAEITREKLFLRLHDELPYSSTVETESWEERSDGSVRINQVIYVERESQKKIVLGAKGETIKAIGQAARKELMEIMDQKVHLFLFVKIRDNWDNDPERYLEMGLDFLK

SEQ ID NO: 27858 - protein, 769 aa, Bartonella quintana str. Toulouse
MSTERNNDFSPQKAELDNAALFYHQYPKPGKLEIQATTPLDNQRDLALAYSPGVAAPCLAIYKDPNLAAQYTARSNLVAVISNGTAVLGLGNIGPLASKPVMEGKAVLFKKFANIDVFDIEIDASDIEQMVQTVAALEPTFGGINLEDIKAPECFEIEEKLRAKMNIPVFHDDQHGTAIIVSAAVLNALSLAGKKIENAKIVASGAGAAALACINLLVRLGAKVENIWLSDLEGVVYEGRKTLMDRWKINYAQKTDARTLSEIIDNADIFLGVSAGGVLKPEYLKKMAPNPLILALANPTPEIMPEEARSVRPDAMICTGRSDYPNQVNNVLCFPYIFRGALDVGAIAINEAMKIAAVYAISSLAREESSDVAARAYSKEPPSFGPDYLIPSPFDPRLILRIAPAVAKAAMETGVAIRPIRDMEAYYDVLNRFVFRSGLTMKPVFAAVKTVKRKRVIYANGEDERVLRAAQIVLEEQTAIPLLIGRPYVVEARLKRFGLRIRPSIDFELINPEDDPRFRDYVNLLLRYTGRRGVSPEVAKTIVRTSTTAIAALAVMREEADAMICGLEGRFERHLELIEQIIGLNSNTSCFSSVSLLISPHRTLFLTDTYVNENPSAEEIAEMTVLAAQEIEAFGITPKAALLSYSNFGSKNTDSARKMRRATEILAELYPNLEADGEMQGDAALSKIFRDRVFPDSRLKSEANLLVFPTLDAANITLNIVKNLTNALHVGPILIGAARPIHILTPSVTSRGVVNMTALAVLAANRKIP

SEQ ID NO: 27859 - protein, 381 aa, Bartonella quintana str. Toulouse
MVVKRRYFDHNATTPLTKMARMALLESLKIFGNPSSVHTEGRAAKALLQKARRQIAERLNTKPDHVVFTSGASEAAMTLLTPFYNMGSSQVRFSHLYIGATEHPSIAEGGRFSKELTSVVSVDRDGLIQQDRLTALLTAHDNTKGLPLVAIQAANSETGVIQKIKEIAAIVRNAGGILIVDLTQYVDKNFVDINQMGGDFFILSAHKIGGPKGIGAFVSCGNLLMPDPLIVGGGQEKGLRGGTEALPLIAAFGAAMADCFTQEEIKQLMHLRNKLEDGLQKISHDIEIFGKRVQRLPNTTYFAVRNIKAETMQIGFDLAGFSVSAGSACSSGKVKQSHVLEAMGYHVPNGAIRISTGRCTTSKSIDDFLLFFSQIVNKRER

SEQ ID NO: 27860 - protein, 251 aa, Bartonella quintana str. Toulouse
MLEIKNLRARIVGTDTEVIRGLNLTVQDGEVAAIMGQNGAGKSTLSYLLAGRDDYEVIEGDILYNGKSLLEIDPAERAVYGVFLAFQYPMEIPGVSMMEFLKVAMNSQRKARGDEELKIPEFIKCVKETSSKLKIDMNMLKRPLNVGFSGGEKKRAEILQMALLEPKLCILDETDSGLDVDALKIVADGVNKLRDSKRSFLVITHYQRLLNYIIPDTVHVLYKGRVIKSGDKSLALYLEQNGYSDIINEAA

SEQ ID NO: 27861 - protein, 464 aa, Bartonella quintana str. Toulouse
MVSSELKRGMSKRQVIFLALGSAIGTGLFYGSAQAIKLAGPSVLIAYCVAGLAIFMVMRALGEMIIHNPLPGSFARYAANYISPLAGFLTGWTYVFEMVLVGLADITAFATYMGFWYPDVAPWIWALSITLIITGINLAAVEVYGELEFWLSSIKIIAIIAIIVLGIAIIFCGWSISTVSSTVSIHNLWKNGGIFPHGWFGFLACFSVVIFAFGGIEIIGMAVMEVQDPTQTVSKAINSTPIRILLFYIMTLTILMSLYPWNEIGFMESPFVSIFERLGISSAAHILNIVVVTAAISAMNSGMYGAGRMIYGLSQEGYASKKFQYLSKNGIPIFVILLIFAIFLFGVVLNYFYHDRLFFLIAAMATFATVFVWMMILLSQVFMRLKMPKEVQCSLKFPIPFWPIGSIFSVLFIVFIFVLLWFFDDTRPVLIVGVSWISWLVICFYALQFYNSKKNKMHPYTNKD

SEQ ID NO: 27862 - protein, 110 aa, Bartonella quintana str. Toulouse
MTTVHDFIDNEIKTNDVILFMKGIPEAPQCGFSGQVVQILDYLGLKYKGINILTSDELRQGIKEYSNWPTIPQLYIKGEFIGGCDIVKEMFQSNELQELLKEKKISFNLL

SEQ ID NO: 27863 - protein, 303 aa, Bartonella quintana str. Toulouse
MKKSLSIFTAVTVTVMGLIGIAKAENDTLEKIKKTGEITLGVRESSGLAYALGNGKYVGFHTEMAERIIDDISKKIGKPVKIHYLPITSQNRIPLLKNSTYDFECGSTTNDVSSSKEAAFAYTTYVEDVRIAVKKNSNIKSFDDLNGKTVATTTGTTSVQIIRKNQRSKNINFNVVKGKDHGDSFLLLESGRADAFIMDASILAGHIAKSKNPSDYIILDTVLSVEPIACMLRLNDKNLKQAINDSIVRQIKDESLKKLHDKWFMKPTPPANIIINLPLSEATKYAWEHPNDKPRENYTENNL

SEQ ID NO: 27864 - protein, 467 aa, Bartonella quintana str. Toulouse
MNCKQNLEENLQNKLQRGLDNRHVQLIAIGGTIGTGLFMGSGKTISVAGPSIILVYAIIGCALYFVMRAMGELLLSNSQYRSLIDFSTDILGPGIAFFAGWSYWLSWVVTGAADIIAIITYMHFWWPTLNPWIIVFACVTFFLTLNLLAVKMFGELEFWFGLIKVVAILALIIVGFYMIATGFTSPNGTVASLSHIWNDGNIFPRGITGFFAGFQIAIFSFVGIEIAGTAAAEVKEPKKVLPKAINAIPIRIVLFYIFSLVVIMSVTPWDQVIPDKSSFVTMFWLAGIPTAAGLVNFIVLTSAASSANSGIFSTSRMIYGLATQKGAPRLLGKLSNHHVPANALFFSCLCILLGYTIASLSPSIINAFTIVTSISAISFIFVWSVILVSYIVYRRNRPQLHIESIYKMPGGVIMCWIILAFFAFILYLLTLESDTLIAFKYSLLWFIFLGVTYFIMFVRKKTAQHTK

SEQ ID NO: 27865 - protein, 69 aa, Bartonella quintana str. Toulouse
MSTGTVKWFNATKGFGFIQPSDGSVDVFVHISAVERSGLSTLNEGQKISYDVLHDRRSGKPAAGNLIAL

SEQ ID NO: 27866 - protein, 400 aa, Bartonella quintana str. Toulouse
MAFIADKLSRIKPSATIAVSQKARNLKALGRNVITLGAGEPDFDTPNNIKNAAIEAIRRGETKYTPVSGIPELRQAISAKFKRENNLTYQPEQIIVGTGGKQILFNALMATLNKDDEVIIPSPYWVSYPEMVTLNGGIPIFVETKAEFSYKLQPQELEAAITHKTKWFIFNSPSNPSGAAYTHNELKKLTDVLVKYPHVYILTDDIYEHLIYGGFTFVTPAQVEPNLYNRTLTMNGVSKAYAMTGWRIGYAGGPPELIKAIDTIQGQQTSGTSSISQWAAVEALNGPQDFIAQNKSIFQARRDLVVSILNQAPGINCPTPEGAFYVYPSCAELIGKKTPEGNVINDDEDFVTALLEAESVAVVHGSAFGLGPAFRISYATSEKLLEEACLRIQRFCNNLL

SEQ ID NO: 27867 - protein, 613 aa, Bartonella quintana str. Toulouse
MEYNRNFFIAIGLSFGVLIAWHFFYVAPKQAQLQQKRLIAQQLSKQQSTLSTSTPYFSDNASITHESASIITHPITPEIRNEALAKTNRIAIKTDELEGSINLVGAQFDDLLLKKYRLTVDKKSPEIALLNPKGFTTTYLAEFGFTSSSLSAKALPQSDTQWQIEGNNTTLTPSTPVTLIYNNGQGQIFRRTLSVDNHYMFTIEDSIKNESDKPIYLSSYARVARAAPPEHTNATYLLHEGMIGIASDSLKTEKYKTLAELNPNPDNSQKSITFSKNIGGWIGITDKYWAVAVIPPQDKEYTSRFIYFDRLNTHYQSDLLGSLLTVAPNETKIVTNRLFAGAKQVEIINHYQNDLKIKKFALLIDWGWFDFITKPMFSLIDTLYKQTGNFGIAILLVTVLLKTLLFPLANKSYKSMARMKLIQPMLLEIKEKYPDDRTKQQQAIIELYKTQKINPLAGCWPMLIQFPIFFALYKVLYITIEMRHAPFFGWIQDLAAPDPTSLFNLFGLLPYTVPTFLMLGAWPLIMGITMFLQMRMNPAPQDQTQAMIFAWMPVIFTFMLASFPVGLVIYWAWNNILSILQQSILMKRQGVKIELFDNLKAMWWKSPKKEAHK

SEQ ID NO: 27868 - protein, 879 aa, Bartonella quintana str. Toulouse
MNLEKYSERLQGFLQTAQNKALSSDHQQFMPEHLLKVLLEDSQGLAASLIQRAGGDLSLIQKALKEALDVLPKVQGGNGQLYLSQPLAKVFDMAEDLAQKAGDQFVTVERLLQALIMEKTAKTADILTTAGLTPQALNQAINALRKGKKATTPHAESQYDALQKYACNLTKNAREGKLDPVIGREEEIRRTIQVLSRRTKNNPVLIGEPGVGKTAIVEGLVLRIINGDVPETLRDKQLYALDMGALIAGAKYRGEFEERLKAVLAEVQAENGQIILFIDELHNLVGAGKSDGPMDASNLLKPALARGELHCVGATTLDEYRKYVEKDAALARRFQPVFVPEPTLDDTISILRGIKEKYEQHHKVRLADSALIAAARLSNRYITDRFLPDKAIDLIDEAAARLRMQVDSKPEELDAIDRRILQLKIEREALKTDVEPTAKERLKIVQDELNTLEQKSTEMTTAWQAEKQKLGHAADLKKQLDEARNALAIAQRNGQFQKAGELAYSVIPELEKQLSVAENDDQQNHLVEETVTAEHVARIVSRWTGIPIDRMLEAEREALLRMEDEISTRVVGQGEAVQAISRAVRRARAGLQDPNRPIGSFMFLGPTGVGKTELTKALAIFLFQDQNAMLRIDMSEYMEKHAGARLIGAPPGYVGYEEGGVLTEAVRRRPYQVILFDEIEKAHPDIFNLLLQVLDEGRLTDSQGRTVDFRNTLLIMTSNLGAEFLTALPEGQTTDQAKNDVMNVVKAAFRPEFLNRIDEIILFQRLQRQDMEAIVDIQIQHLQNLLNERKITLHIEPEVRQFLAHKGYDPLYGARPLKRIIQKEIQDPLAENILFGKIYDETTVTIAKEGDRLVFLPATQETPNGAEKNDSENRKKLTR

SEQ ID NO: 27869 - protein, 717 aa, Bartonella quintana str. Toulouse
MNSNYRSLFVWGVIALILIVSFSLFNGDSQRSGGGEISYSEFLRKVENNELKTVTIQGQKLTGKTVENRIISTYAPRDPGLIQKLESKNVNVKAVPESSGNSIFLNLLFSLLPVIIIVGAWIFFMRQMQSGSRGAMGFGKSKAKLLTEAQGRVTFQDVAGVEEAKQDLQEIVEFLREPQKFQRLGGRIPRGVLLVGPPGTGKTLLARSVAGEANVPFFTISGSDFVEMFVGVGASRVRDMFEQAKKNAPCIIFIDEIDAVGRHRGAGLGGGNDEREQTLNQLLVEMDGFEPNESIILIAATNRPDVLDPALLRPGRFDRQVVVPNPDISGREQILKVHVRNVPLAPNVDLKILARGTPGFSGADLMNLVNEAALMAASRNKRVVTMQEFEDAKDKVMMGAERRSTAMTQEEKELTAYHEAGHAIVALNVPVADPVHKATIVPRGRALGMVMQLPEGDRYSMSYRWMISRLAIMMGGRVAEELKFGKENITSGASSDIEQATKLARAMITRWGFSDLLGNVAYGDNQDEVFLGHSVARTQNVSEETARMIDAEVRKLIDAAYTSATKILKTKKKEWFALAQGLLEYETLTGAEINEVIAGKPPSRTQKDENASLRTSSVPKTGASKIEADKVTVNETDVHKANGGKKKLKAENEKTKSSNAKPNDAKLKGAKTHGAEKKTRSIKDPAGAANFSESKTNAEKALNTAEPKGKQGSSSDV

SEQ ID NO: 27870 - protein, 596 aa, Bartonella quintana str. Toulouse
MNLFNHSEKSTKSSHTKPSFSSFSTFGPYIIRYSWLILFGFLALSVAALVTLALPVAIRQMLDHGFSSSSHGNINFYFAILFVLALLLALASACRYYCVITLGERIVADLRRDVFTHIIQLSPAFFDQSHSGELVSRLLTDTTQIKLAVGSTASIALRHLIVVIGAIFMMVITNAKLSSLVLLAIPFVAIPLVIFGRKVRTRTRIAQDRIADANALATEQVSAVRTVQAFNVEKQVSARFSQLVERAFQTARASVILRSFFTGFTIFLVFSSVVAVLWIGSRDVLNGTMSGGTLGQFVLYAVLGASTFTQLSELGAELIQALGAAERLAELLQKQPTILAPKVPLPLAQPVQGAIIFDQVDFTYPSRPKEKILRSLSFSVKAGETVAFVGASGAGKSTIFSLILRFYDPNSGQIRFDGTEINSLSLQDLRSSISYVPQDVAIFDGTLRDNITFGSENINEEQIIAAAKTANALEFIQALPKGFDTEVGERGTMLSGGQKQRIGIARAIFKNAPLLLLDEATSALDASSEKLVQEALEGLMQHRTTLVIAHRLATILKADRILVMEKGTLVEEGTHAELIAQNGVYAHLAKLQFSPE

SEQ ID NO: 27871 - protein, 217 aa, Bartonella quintana str. Toulouse
MKFFVDSANIEEIRELQNLSLVDGVTTNPSLILKSGRNILDVIKEICTLIEGPVSAEVAATEFEIIMKEAAILAKIADNICIKLPLTLEGLKACKALAAQGLKTNLTLCFSANQALLAAKAGATFVSPFIGRLDDCGINGSELLHEIRTIYDNYGFETQILAASIRTVNHVKEAALSGADVASVPPTILKALVKHPLTDKGLQTFLDDWKKTGQNIA

SEQ ID NO: 27872 - protein, 630 aa, Bartonella henselae str. Houston-1
MAKVIGIDLGTTNSCVAVMDGKNAKVIENSEGARTTPSVVAFTDGGERLVGQPAKRQAVTNPEGTIFAVKRLIGRRFDDPMVEKDKALVPYKIVKGDNGDAWVEEAGKKYSPSQISAMILQKMKETAESYLGEKVEQAVITVPAYFNDAQRQATKDAGKIAGLEVLRIINEPTAAALAYGLDKKDGKTIAVYDLGGGTFDISVLEIGDGVFEVKSTNGDTFLGGEDFDMRLVGYFADEFKKEQGIDLKNDKLALQRLKEAAEKAKIELSSSQQTEINLPFITADQSGPKHLTMKLTRAKFESLVDDLVKRTVEPCKAALKDAGLKAGEIDEVVLVGGMTRMPKIQEVVQSFFGKDPHKGVNPDEVVAMGAAIQGGVLQGDVKDVLLLDVTPLSLGIETLGGVFTRLIERNTTIPTKKSQVFSTADDNQNAVTIRVFQGEREMANDNKLLGQFDLVGIPPAPRGVPQIEVTFDIDANGIVNVSAKDKGTGKEHQIRIQASGGLSDADIEKMVKDAEEHAAEDKKRREGVEARNQAEALIHSTEKSLTEYGDKVSTEEKEQIETAISDLKSVLDSTDTEEVKAKMQKLAEVSMKLGQAMYEASQAATPNTETDTKSDDVVDADFEEINDKKK

SEQ ID NO: 27873 - protein, 765 aa, Bartonella henselae str. Houston-1
MKKNEQDQKTHQTVYNISEREALDFHSRGRPGKLEIVATKSMATQYDLALAYSPGVAVPVKAIAQNPELAYDYTTKGNLVAVISNGTAILGLGNLGALASKPVMEGKAVLFKRFADIDSIDLEIDTNDPENFINLVRHLEPSFGGINLEDIKAPECFMIESRLREVMNIPVFHDDQHGTAIIVAAGVLNALYLTGRDMENTRLVCNGAGSAGIACIELIKAMGFRSENIILCDTKGVVYEGRKEGMNQWKSVHAVRTDKRTLAEAMEGADVFFGVSAKGAITPEMVKSMAPRPIIFAMANPDPEITPEEVMQVRKDAIIATGRSDYPNQINNVLCFPYIFRGALDVRATVINEDMKIAAARAIADLAHEEVPDSVAEAYRGKRLKFGPNYIIPVPFDPRLFTVVSIAVAKAAMKSGVAQRHIDDLEAYERDLNARRDPISSMMRGVYNHVRQSPKQIVFAEGEEEQVMRAAVSYVHQKLGQAILIGREEQVRENAAIAGIDLEREGISVMNAKLSCRLDAYANYLYKKMQRQGWLLRDCHRRINNDRNYFAACMVALGDADAMVTGVTRNYETALIDIRRVIDEKPRERLIGISMAICRGRTVFIADTAVYENPNAEEFAHIAEQTASFVRGLGYQPRVAFVAFSTFGYMKGQVTRHIQDAVNILRERRADFEFDGEISADVALNVKLMQQYPFMGLTEPANILVMPGYHASSIASKMLQELGEATIIGPILIGLERSVQIVPFSGSDTDVVNIATLAAYHAEKL

SEQ ID NO: 27874 - protein, 158 aa, Bartonella henselae str. Houston-1
MFAVIKTGGKQYRVVANQVVRVEKIIGNAGDVVEFNDILMAGQEDNAIIGAPVVRDALVTAEIIEQARARKVIAFKKRRRQNSKRTRGHRQEVTTLRILEILTGGLKPKKAVAKSIKEEAAVLKATTQETKSAASVKKAAKKSAPQKQAAVASNSKED

SEQ ID NO: 27875 - protein, 340 aa, Bartonella henselae str. Houston-1
MKFLDQAKVYIRSGNGGAGAISFRREKFIEFGGPDGGDGGRGGDVWALVVDGLNTLIDYRYQQHFRAKTGGHGKGRNMTGQKGDDIILKVPVGTQIFEEDNTTLICDLTEVGQRYRLAKGGNGGFGNLHFTTSTNRAPRRANPGLSGEERTLWLRLKLIADAGIIGLPNAGKSTFLASVTAAKPKVADYPFTTLYPHLGVARIDAREFVLADIPGLIEGAHEGVGIGDRFLGHVERCRVLFHLISAQEEDVVKAYQIVRNELKAYGNNLNDKTEIIALSQIDTLTIEERKAKQEFLQKVTGKSVMMFSAVSREGLENLLRAGAHIIEMARKKDVVREEQD

SEQ ID NO: 27876 - protein, 331 aa, Bartonella henselae str. Houston-1
MTAQSSHMLVLQSTVTSAFKTIASEKQGLEALEEALLGYLSSAFQAAVQTIRNANGHVVITGLGKSGHIGAKIAATLASTGTPAFFVHAAEANHGDLGMIGSDDVILALSWSGETSELSGIINHAARFRTPLIAMTSGEHSVLGRQADIVLLLPKIEEACPHGLAPTTSTIMQLAMGDALAVALLEMRGFTATDFKIYHPGGSLGASLKYVRDIMHQGESIPLVAQGTAMAKAMSVLVEKHFGCVGVVNQEGELIGIVTDGDLARNIHVNLSKFNVDELMTKDPKIVEPNTLVGAATAFINEHHIGAFFVVENKKPIGIVHFHDLLRIGAA

SEQ ID NO: 27877 - protein, 418 aa, Bartonella henselae str. Houston-1
MARIVMKFGGTSVANIERIYNVAQHVKREVDAGNEVAVVVSAMAGKTNELVQWTCDASPIHKDAYEYDVVVASGEQVTAGLLALTLQEMGVNARSWLGWQIPIHTDSAHGSARITDIDGSFLIQRFQEGQVAVIAGFQGLAPDNRISTLGRGGSDTSAVAMAAAIQADRCDIYTDVDGVYTTDPRVEPKARRLPKVAFEEMLEMASLGAKVLQVRSVELAMVHNVRTFVRSSFEDPNALGMGDPMNSSGTLICDEDEIVEQQNVTGIAFAKDEAQISLRRLADRPGISAAIFGPLAEARINVDMIVQNISEDGSKTDMTFTVPSADVDKAVALLEKNRKEIGFDVIQSESGLAKISVIGVGMRSHAGVAATAFRALAEKGINIQAITTSEIKISILIDSVYTELAVRTLHAVYGLDKG

SEQ ID NO: 27878 - protein, 300 aa, Bartonella henselae str. Houston-1
MNDVMKTRSGFVVLIGMPNAGKSTLVNQLVGTKVSIVTHKVQTTRTLIRGIVIHDNAQIVLIDTPGVFSPHKRLERAMVSAAWGGAKNADVLLVLIDAQNGLSDEVCKMLDIVANIKQDKILVLNKIDTVAKSSLLALTAGINEHVKFLQTFMISALKGSGCKDLLHALSTMMQEGPWYYPEDQISDMPMRQLAAEITREKLFLRLHDELPYSSTVETENWEERRDGSVRINQVIYVERDSQKKIVLGAKGDTIKAIGQAARKELMDIMGQKVHLFLFVKVRDNWDTDPERYREMGLDFF

SEQ ID NO: 27879 - protein, 464 aa, Bartonella henselae str. Houston-1
MVTNELKRGMSKRQVIFLALGSAIGTGLFYGSAQAIKLAGPSVLIAYCIAGLAVFMVMRALGEMIIHNPLPGSFARYAANYISPLAGFLTGWTYVFEMILVGLADITAFATYMAFWYPDVAPWIWALSITLIITGINLAAVEVYGELEFWLSSIKIIAIIAIIILGIAIIFCGLGTSTISSAVSVDNLWKNGGIFPNGWFGFFACFSVVIFAFGGIEIIGMAVMEVQNPHQTISKAINSTPIRILLFYIMTLTILMALYPWNAIGLMESPFVSIFESLGISSAANILNVVVVTAAISAMNSGMYGAGRMIYGLSQESYALKKFQYLSKNGIPIFVILLIFIIFLLGVILNYFYHDRLFFLIAAMATFATVFVWVMILLSQIFMRLKMSKEMQCSLKFPIPFWPIGSIFSILFMVFIFILLWFFDDTRPILIVGASWISWLIICFYALKLFNFWKKKQYQSMNKD

SEQ ID NO: 27880 - protein, 774 aa, Bartonella henselae str. Houston-1
MSTERNNDFSSQKTELDSAALFYHQHPKPGKLEIQATTPLDNQRDLALAYSPGVAAPCLAIHKDPNLAAQYTSRSNLVAVISNGTAVLGLGNIGPLASKPVMEGKAVLFKKFANIDVFDIEIDASDIEQMVKTVSALEPTFGGINLEDIKAPECFEIEEKLRTKMNIPVFHDDQHGTAIIVSAAVLNALSLAGKKIENVKIVSSGAGAAALACINLLVRLGAKVENIWLSDLEGVVYEGRKTLMDRWKISYAQKTDARTLSEIIDDADIFLGVSAGGVLKPEYLKKMAQNPLILALANPTPEIMPEEARSVRPDAMICTGRSDYPNQVNNVLCFPYIFRGALDVGATAINEEMKIAAVHAIAALAREETSDIAARAYSKKPPSFGPDYLIPSPFDPRLILRIAPAVAKAAMETEVAIRPIEDMEAYHDILNRFVFRSGLTMKPVFAAAKTAKRKRVIYANGEDERVLRAAQIVLEEQTAIPLLIGRPHVVETRLKRFGLKIRPGIDFELTNPEDDPRFRDYVSLFLRYTGRRGVSPEVAKTIVRTSTTAIAALAVMREEADAMICGLEGRFERHLELIEQVIGLDSNTRHFSAVSLLISPRRTLFLTDTYVNEDPSAEEIAEMTVLAAKEIEAFGITPKAALLSHSNFGSKNTESARKMRRATEILAQLYPNLEADGEMHGDAALSKVFRDRVFPDSRLKGEANLLVFPTLDAANITLNLVKNLTNALHVGPILIGASRPAHILTPSVTSRGVVNMTALAVLAANRKKLHNENK

SEQ ID NO: 27881 - protein, 352 aa, Bartonella henselae str. Houston-1
MAKSASTFLSCISILFFIGFLFYADNHFNEYTLRVINLIAINAILAISLNLIYGFTGMFSLGHAGFMAIGAYVCAILLLSPEQKEMMWILEPIAEPLHDLQLPFFVTVVVSGLCAAVVGLLIALPILRLGGDYLGIATLGFAEIIRIVITNATSVTNGSLGIKGIPQNATLWWNYSWLVFTVTFIILLLRSNTGNVLRAIRDDEIAAKTMGINAFFYRSFSFTAGAFFAGVGGALMAALISTIDPKMFNFLLTFNILMIVVAGGLGSITGSIIGSIIITVMLEWLRIIESPFDLGFIHIPETPGLRMVIFSLLLLVIILFWRRGLLGQREFSWSGIYSFFTRKKFSNTEEKL

SEQ ID NO: 27882 - protein, 251 aa, Bartonella henselae str. Houston-1
MLEIKGLRARIVGTNTEVIRGLNLTVADGEVAAIMGQNGAGKSTLSYLLAGRDDYEVIDGDILYNGQSLLEMDPAERAAYGVFLAFQYPMEIPGVATMEFLKVAMNSQRKARGDQELKIPEFIKCVKEISSKLEINMDMLKRPLNVGFSGGEKKRAEILQMALLEPKLCILDETDSGLDIDALKIVADGVNKLRDPKRSFLVITHYQRLLNYIIPDTVHVLYKGRIIKSGDKSLALYLEQNGYADLIREAA

SEQ ID NO: 27883 - protein, 384 aa, Bartonella henselae str. Houston-1
MVVKRRYFDHNATTPLKKAAEVALLESLEIFGNPSSVHTEGRAAKALLQKARRQIAKSLNANPDHVVFTSGASEAAMTLLTPFYNMGSSKVQFSHLYIGATEHPSVAEGGRFPKEFISTIAVDQDGLIQQDKLLSLLSFHDKTKGLPLVAIQAANGETGVMQQIKEIAAIVRNCGGTLIVDLTQYIDKNFVDVHQMEGDFFILSAHKIGGPKGIGAFVSCGNLLMPYPLIVGGGQEKGLRGGTEALPLIAAFGAAMADCYNQEEIKQLLYLRHKLEDGIQKICHDVEIFGKKVQRLPNTTYFTVRNIKAETLQISFDLAGFSVSAGSACSSGKVKQSRVLEAMGYDVPNGAIRISTGRCTTSKDIDDFLLFFSQIINKKKAGTL

SEQ ID NO: 27884 - protein, 110 aa, Bartonella henselae str. Houston-1
MTTIRDFIDSEIKENDVILFMKGTPDAPQCGFSGQVAHILNYLGVPYKGINILTSDELRQGIKDYSNWPTIPQLYVKGEFIGGCDIIKEMFQNNELQELLKEKDIPCNKA

SEQ ID NO: 27885 - protein, 303 aa, Bartonella henselae str. Houston-1
MRKSLLIFIAATTTIIGLIGIAKAENDTLEKIKKTGEVTLGVRESSGLGYALGNGKYVGFHTEMAEHIIDDISKKIGKPIKIHYLPITSQNRIPLLQNNTYDFECGSTTNDIFRSKEAAFAYTTYVEEVRIAVKKNSNIKSLEDLNGKTIATTTGTTAVQLIRKNKRAKNINFKVVKGKDHGDSFLLLESGRADAFIMDASILAGHIAKSKNPSDYVILDTVLSVEPIACMLRLNDQNLEHAINESIVHQIKDHSLEKLYDKWFMKPIPPANTIVNLALSELTKYAWEHPNNKPREDYSENNL

SEQ ID NO: 27886 - protein, 460 aa, Bartonella henselae str. Houston-1
MNVNRENIFTKLGLSALLVKNLTIAGMSKPKPIQEQAIPMMLKGHDILGIAQTGSGKTLAFSLPILSQILALGDKRFPKTARALILAPTRELAVQIDETIRAVAKGTHLSTCLIFGGVSRLKQIKRMEAGVDILIATPGRLRDLIREKYVDLSQSRFLILDEADRMLDMGFIHDIRHIVKLLHQVRQTALFSATMPKEITTLAKCLLNDPVKIEVSPQGTTAAEIAQKLYCVPTCEKKNVLGKLLTNPDFVSVIVFTRTKYCADAVTRNLASRGYSVATIHGNKSQSARQSALKAFRERSVRILVATDIAARGIDIPGISHVINYDLPDEAESYVHRIGRTGRNGASGEALTLFDEGVEQMRLRAVERLICMRLVRETIPEQFAAFPEKPLVIEGIEKENIKGPHFRKSKRQKWFKSHKDNAAQSEGRKSSSQSERHRKAKAIAKRAKSFHSRKSVNKVA

SEQ ID NO: 27887 - protein, 599 aa, Bartonella henselae str. Houston-1
MTNHPRMQESANGKKMLGAEMVVQALIDQGVKHLFGYPGGAVLPIFDVLYQQDSLQHILVRHEQAAGHAAEGYARSTGKVGVMLVTSGPGATNAVTPLQDALMDSIPLVCFSGQVSTTVIGTNGFQEADTVGITKSCTKQNWLVKDVNDLAAIIHEAFAVAQSGRPGPVLVDIPKDIQLASGVYRAPQVLVSRHFSPQLERNIEAIECAVSLLEEAKRPVIYSGGGVISSGLQAVQLLRDLVQLGDFPITSTLMGLGAYPASGKNWLGMLGMHGTYEANMAMHDCDVMLAVGARFDDRITGRLDAFAPHARIIHIDVDPSSINKIVKVEVPIIGDVADVLGDMMQCLHRQQPIFKSEGRDAWWKQIDCWRARNSLAYPKKKDIIMPQYALERLYALTKDVNAYITTDVGQHQMWAAQYYHFDEPNHWMTSGGLGTMGYGLPAAIGVQIAHPDAFVVCISGDASIQMNIQELATAMQYNTPVKIFILNNQYMGMVRQWQQLLHGNRLSHSYTESMPDFVKLAQAYGGIGIHCSKPDELDDKIQQMIDCDKPVLFDCRVDNLENCFPMIPSGCAHNDMLLPDEAHDEAVANAISAEGQCLV

SEQ ID NO: 27888 - protein, 69 aa, Bartonella henselae str. Houston-1
MSTGTVKWFNTTKGFGFIQPSDGSADVFVHISAVERSGLSNLNEGQKVSYDVLQDRRSGKFAAGNLATL

SEQ ID NO: 27889 - protein, 400 aa, Bartonella henselae str. Houston-1
MAFIADKLSHIKPSATIAVSQKARNLKVLGRDVITLGAGEPDFDTPENIKNAAIEAIRRGETKYTPISGIPELRQAISAKFKRENNLTYQPEQIIVGTGGKQILFNALMATLNKGDEVIIPSPYWVSYPEMVTLNGGIPVFLETKAEFSYKLQPQELEAAITHKTKWFIFNSPSNPSGAAYTHEELKKLTDVLIKYPHVYILTDDIYEHLTYEGFTFVTPAQVEPNLYDRTLTMNGVSKAYAMTGWRIGYAGGPQELIKAMDTIQGQQTSGTSSISQWAAVEALNGPQDFIAKNKTVFQTRRDLVVSMLNQAPGIECPTPEGAFYVYPSCAKLIGKKTPEGKVIAHDEDFVTALLEAESIAVVHGSAFGLGPAFRISYATSEKFLEEACSRIKHFCESLL

SEQ ID NO: 27890 - protein, 310 aa, Bartonella henselae str. Houston-1
MKLFCGNSNPRLAKEVTNYLSIPLGKATVKRFADQEIFVELHENVRGQDVFVLQSTSYPANDHLMELLIMIDALRRSSARRITAVIPYFGYARQDRKPGPRTPISAKLVANLITEAGAHRVLTLDLHAGQIQGFFDIPTDNLYAVPVIARDVKMHYSLENVIVVSPDVGGVVRARSLAKRLNSLLAIVDKRRERPGESEVMNIIGDVSGKNCLLLDDIVDSGGTLCNAASTLLKHGANSVTAYITHGVLSGNAIERITNSEMKELVITNSIMPTEEIEKAHNIRVLPITDLIGEAIARTAAEQSVSSLFG

SEQ ID NO: 27891 - protein, 612 aa, Bartonella henselae str. Houston-1
MEYNRNFFIAIGLSFGVLIAWHFFYVAPKQTELQQKQLIAQQLLKQQSAVSSPTANFSDSASTHESALIINHPMSPEIRDAELAKTNRVAIKTNELEGSINLVGAQFDDLLLKKYRLTVDKKSSEIALLNPKGFKETYLAEFGFTSSSLSKDALPQSDTRWHIEGNNTTLTPSTPVTLIYNNGQGQTFRRILSIDDHYMFTIEDSITNESDKPIYLSSYARVARAAPPEHTNATYLLHEGMIGIAGDSLKTEKYKTLAELNPNPDNGQKSMTFSKVIGGWVGITDKYWAVAVIPPQDKEYTSRFIYFDRLQTHYQSDLLGSLLTVAPNETKTITNRLFAGAKQVEIINHYQNDLKIKKFALLIDWGWFDFITKPMFSLIDILYKQTGNFGIAILLVTVLLKTLLFPLANKSYKSMARMKLIQPMLLEIKEKYPEDRTKQQQAIIELYKTQKINPLAGCWPMLVQFPIFFALYKVLYITIEMRHAPFFGWIQDLAAPDPTSLFNLFGLLPYTVPAFLMLGAWPLIMGITMFLQMRMNPAPQDQTQAMIFAWMPIVFTFMLASFPVGLVIYWAWNNILSMIQQGIMMKRQGVKIELFDNLKAMWRKSPKKEAHE

SEQ ID NO: 27892 - protein, 859 aa, Bartonella henselae str. Houston-1
MNLEKYSERLQGFLQTAQNKALSSDHQQFMPEHFLKVLLEDSQGLAASLIQKAGGDLSLIQKALEEALDALPKVQGGNGQLYLSQPLAKVFTLAEDLAHKAGDQFVTVERVLQALIMEKTAKTADILTKAGLTPQALNQAINALRKGKTATSPHAESQYDALQKYARDLTKDAREGKLDPVIGREEEIRRTIQVLSRRTKNNPVLIGEPGVGKTAIVEGLALRIVNGDVPETLRDKRLYALDMGALIAGAKYRGEFEERLKAVLAEVQAENGQIILFIDELHNLVGAGKSDGPMDASNLLKPALARGELHCVGATTLDEYRKYVEKDAALARRFQPVFVPEPTLEDTISILRGIKEKYEQHHKVRLADSALIAAARLSNRYITDRFLPDKAIDLIDEAAARLRMQVDSKPEELDALDRRILQLKIEREALKTDVEPTAKERLKTVQAELETLEQQSREMTTAWQAEKQKLGHAADLKKQLEEARNALAIAQRDGQFQKAGELAYSVIPQLEKQLSIAENDDQQNHLVEETVTAEHVARIVSRWTGVPVDRMLEAEREALLRMEDEISKRVVGQGEAVQAVSRAVRRARAGLQDPNRPIGSFMFLGPTGVGKTELTKALAAFLFQDQNAMLRIDMSEYMEKHAGARLIGAPPGYVGYEEGGVLTEAVRRRPYQVILFDEIEKAHPDIFNLLLQVLDEGRLTDSQGRTVDFRNTLLIMTSNLGAEFLTALPEGQTTDQAKNDVMNVVKAAFRPEFLNRIDEVILFQRLQRSDMEAIVDIQIQHLQNLLNERKITLHIEPEVRQFLGDKGYDPLYGARPLKRIIQREIQDPLAENILFGKIHDEMAVTIAKEGEHLTFLPEN

SEQ ID NO: 27893 - protein, 715 aa, Bartonella henselae str. Houston-1
MNSNYRSLLIWGVIALILIVSFSLFNGDSQRSGGGELSYSEFLQKVENNELQAVTIQGQKLTGKTVENRVISTYAPRDPGLIQKLESKNVNVKAVPESSGNSIFLNLLFSLLPVIIIVGAWIFFMRQMQSGSRGAMGFGKSKAKLLNEAQGRVTFQDVAGVEEAKQDLQEIVEFLREPQKFQRLGGRIPRGVLLVGPPGTGKTLLARSVAGEANVPFFTISGSDFVEMFVGVGASRVRDMFEQAKKNAPCIIFIDEIDAVGRHRGAGLGGGNDEREQTLNQLLVEMDGFEPNESIILIAATNRPDVLDPALLRPGRFDRQVVVPNPDVSGREQILKVHVRNVPLAPNVDLKVLARGTPGFSGADLMNLVNEAALMAASRNKRVVTMQEFEDAKDKVMMGAERRSTAMTQEEKELTAYHEAGHAIVALNVPVADPVHKATIVPRGRALGMVMQLPEGDRYSMSYRWMISRLAIMMGGRVAEELKFGKENITSGASSDIEQATKLARAMITRWGFSDLLGNVAYGDNQDEVFLGHSVARTQNVSEETARMIDAEVRKLIDDAYTNATKILKAKKKEWFALAQGLLEYETLTGAEIQEVIAGKPPSRTQKNENASPRTSSVPKAGASKAEFDQETLDKKDAHKADKEKEKLKAGMEKVKSNHAKSNDSVSKRKKSPGAEKKTQSTKKTPQAANFSGSKENTEKDLNAAERKGKQEPKA

SEQ ID NO: 27894 - protein, 596 aa, Bartonella henselae str. Houston-1
MNFFNHSEKAKKFFHTKPSFSSLTTFSPYLVRYRWLFVFAFIALSVAALVTLTLPVAIRQMLDHGFSTSSHGHINFYFALLFVLALLLALASACRYYCVITLGERIVADLRRDVFVHIMKLSPAFFDRSHSGELVSRLLTDTTQIKLAVGSTASTALRHLIVVIGAIVMMVITNAKLSSLVLLAIPFVAIPLVVFGRKVRTRTRAAQDRIADANALATEQVSAIRTVQAFTAEKLVSKRFSQLVERAFQTARSSVILRSFFTGFAIFLVFGSVVAVLWIGSRDVLNGTMTGGALGQFVLYAVFGASTFAQLSELGAELIQAAGAAERLAELLQEQPTILAPKAPAPLAKPVQGALVFDQVDFTYSSRPQEKILRSLSFSVKPGETVAFVGASGAGKSTLFSLILRFYDPISGQIRFDGVEIKRLSLQDLRSSISYVPQDVAIFDGTLRDNIVFGTENMTEEQIIAAAKAANALEFIEALPNGLDTEVGERGIMLSGGQKQRIGIARAILRNAPLLLLDEATSALDANSEKLVQEALEELMQNRTTLVIAHRLATILKADRILVMEKGALVEEGTHAELVAQNGVYAYLAKLQFSPE

SEQ ID NO: 27895 - protein, 218 aa, Bartonella henselae str. Houston-1
MKFFVDSANIEEIQELQNLNLVDGVTTNPSLILKSGRNILEVTKEICTLVVHGPVSAEVAATEFEDIMKEAAVLANIADNICIKLPLTFDGLKACKALTAQGLKTNLTLCFSANQALLAAKAGATFISPFVGRLDDYGINGSDLLHEIRTIYNNYSFETQILAASIRTINHVKEAALSGADVATIPPTILKALIKHPLTEKGLQSFLEDWKKTGQNIA

SEQ ID NO: 27896 - protein, 229 aa, Bacillus thuringiensis serovar konkukian str. 97-27
MNRRNVVKDLKQFELFTHLTEKKLKGLTEFVYWRTYKKGQFLFLEGDSRERIYFMLDGFVKLERVNQSGNLLYDDYVKRYSIFPYGGMFTDRGYNYTAEAMTDVEVYYIPTVIFEDMVKSSRTQLMYVVRQLSSILKLNENRVQNITISNAQDRVIQTLNYLMQDLGEQSGETIVISCPLTTIEISKISGTSRETVSSVLKQLKNDSIVTILDKKITIHNPTYFEEISM

SEQ ID NO: 27897 - protein, 247 aa, Bacillus thuringiensis serovar konkukian str. 97-27
MSELLRVENVTGGYTKRPVLKDVSFSVNKGELVGLIGLNGAGKSTTIKHIIGLMEPKKGTVTINGKTIRDDMTAYRSSFSFIPETPVLYDELTLEEHLKLTAMAYGVEEKQYEERVGQLLQEFRMKNRLKWFPSHFSKGMKQKVMIMSAFLVEPSLYIVDEPFVGLDPLAIQSLLQMMDQMKKSGAGILMSTHILATAERYCDSFIILHQGEVRAKGTLSELQSQFNMPGATLDDIYIALTKEEDYE

SEQ ID NO: 27898 - protein, 492 aa, Bacillus thuringiensis serovar konkukian str. 97-27
MSTQMLTLTSISIYMLGMLVIGYFAYKRTSNLTDYMLGGRTLGPAVTALSAGASDMSGWLLMGLPGAMFSVGLSSSWIAIGLTLGAYANWLYVAPRLRTYSEIANNSITIPEFLEHRFQDKSHMLRLVSGLVIMIFFTFYVASGLVSGAVLFENSFGMNYHVGLFIVAGVVVAYTLFGGFLAVSWTDFVQGIIMVIALILVPTVTIMNVNGLGPAFSTIKSIDPTLLDIFKGTSVLGIISLFAWGLGYVGQPHIIVRFMAISSVKEIKSARRIGMSWMIFSVVGAMFTGLIGIAYYSDKGLKLSNPETIFLELGKILFHPLITGFLLAAILAAIMSTISSQLLVTSSAITEDLYRTFFKRSASDKELVFVGRMAVLVIALVGCALAFKQNDTILALVGYAWAGFGSSFGPAILLSLYWKRMTKWGALAGMISGAATVIIWTQFKFLKEFLYEMIPGFTISLLVIIIVSLLTQPSKEIEEQFEDFEKQHSDNL

SEQ ID NO: 27899 - protein, 569 aa, Bacillus thuringiensis serovar konkukian str. 97-27
MRTMSSKTEEKLATGAQLLLEALEKEGVEVIFGYPGGAVLPLYDALYDCEIPHILTRHEQGAIHAAEGYARITGNPGVVIATSGPGATNVITGLADAMIDSLPLVVFTGQVATTLIGSDAFQEADIMGLTMPVTKHNYQVRKASDLPRIIKEAFHIARTGRPGPVVIDLPKDMVVEQGERCSDVQMDLPGYNPNYEPNLLQINKLLQAIQVANKPLILAGAGVLHAKASKELTSFARKYEIPVVHTLLGLGGFPPDDELFLGMGGMHGSYTANMALYECDLLINIGARFDDRLTGNLAYFAKEATVAHIDIDPAEIGKNVPTEIPIVASAKQALQVLLQPEGKKENHHEWISLLKNRKEKYPFSYKRNSESIKPQYAIDMLYEITKGEAIVTTDVGQHQMWAAQYYPLKTPDKWVTSGGLGTMGFGFPAAIGAQIAKPDELVIAIVGDAGFQMTLQELSVLKEHSLPVKVFILNNEALGMVRQWQDEFYNQRYSHSLLSCQPDFVALANAYGIKGVRIDDPLLAKKQLQHAIQLQEPVVIDCRVLQSEKVMPMVAPGKGVHQMEGVEKR

SEQ ID NO: 27900 - protein, 586 aa, Bacillus thuringiensis serovar konkukian str. 97-27
MEVRDEIKKKGNWRQFLRLIQDTKPPKGILVFALLMSLLSTGASLFIPMLTKGLVDNFSLSSISTGQIVGLVAFFIMQTIAAGLSIYLLNYIGQKIVAGLRERLWKKVLILPVSYYDQNRTGDTISRMTNDTGVVKTLISEHLSNLLTGGISIVGSLIVLFVLDWKMTLLLLTVIPLSVLILVPLGRKMYKISKALQDETASFTSVLTQVLSEIRLVKSSNTEKREYETGNKGIEKLLQFGLKEGKVQALISPVMSFVLMALLVIIVGYGGMRVSSGALTTGELVAFILYLVQIIMPMSQLSMFFTQFQKAIGATERIYTILEYEVEDHETGVNVTNAKQPIVLENVYFEYNEEEQVLKNIDFTIESGKVTAIVGPSGSGKTTLFSLLERFYEPTTGAIKLGEEPITAYSLPSWRRQIGYVSQDSPLIDGTIRDNICYGVEGEVTDEEIEKVAAMAYVDAFIHDLPNGYATEVGERGVKLSGGQRQRIAIARALLRNPQILMLDEATSSLDSKSESVVQKALNNLMKGRTTLVIAHRLSTVVDADKIIFIEKGNLTGSGTHDELLRTHDMYREFATQQLKIKEAAL

SEQ ID NO: 27901 - protein, 485 aa, Bacillus thuringiensis serovar konkukian str. 97-27
MYNTEMDETLKIINKGLKKTTSPKQIIVVGAGMAGLVSASLLKAAGHEVKIFEANNRVGGRIETVRMEDTGLYLDVGAMRIPYSHTLTMAYIRKFGLQVSPFINRNETDIIYVNGRKTTLKQYEKEPSILKYPVEMNEVGKTSEELLLLAVQPIINFIKKNPEKNWDVVVNDFGRYSTGQFLKYHPYQYNTYFSPVTIEMIGVLLDLEGFLERSFVETLRFLYIMQEESGFCEIVGGNDRLPKSFLPQLEENIIYNQKLMKLHQRDNGVTAFYRNEETFEYSSITGDLVIVTIPFSTMRFVEVDPFDSISHEKWKAIRELHYMPATKIGIQFKSRFWEEQGQLGGRIITDLPIRYAYYPSYGIGEKGPAMMLGSYTWSYDALLWDGLSKGDRIYYTLQNLATILGGQVYDEFLSGISKSWTLDPYALGGFALFQAGQESELQPAIVKPEGRIFFAGDHTTLYHGWIQGAIESGVRVAVDVNELNV

SEQ ID NO: 27902 - protein, 230 aa, Bacillus thuringiensis serovar konkukian str. 97-27
MANSMTLSQDLKELLASVEYKMQIKKGSFIFQEGMEATELYIIHSGKVQISKLSADGQELTLRICSAYDIIGELTLFTDNAKYLLNSKCLEDVEVGVIKREALEKELLQKPALVFEFMKWISEHLRRMQTKFRDLVLHGKKGALYSTLIRMTNSYGVLKENGILIDLPLTNQELANFCATSRESVNRMLNELKKQGTISIHKGKITIHDLQFLKCEIACEDCSASVCSID

SEQ ID NO: 27903 - protein, 377 aa, Bacillus thuringiensis serovar konkukian str. 97-27
MNNVIIIGGGIAGLCAAISLQKIGLDVKVYDKNTEPTVAGAGIIIAPNAMQALELYGISKKIKKFGNESDGFNLVSKKGTTFNKLIIPTCYPKMYSIHRKDLHQLLLSELKEDTVKWGKECVKIEQNEENALKIVFQDGSEALGNILIAADGIHSIVRKQVTQGDNYRYAGYTCWRGVTPTKNLSLTNDFIETWGTNGRFGIVPLPNNEVYWYALINAKARDPKYKAYTTTDLYNHFKTYHNPIPSILQNASDIDMIHRDIIDITPMKQFFDKRIVFIGDAAHALTPNLGQGACQAIEDAIILAECIKNNAYYRQAFTEFEQKRRDRIEKISNTAWKVGKIAQIESKPLTIVRNKVMKRIPKWISERQAHELYRFHL

SEQ ID NO: 27904 - protein, 175 aa, Bacillus thuringiensis serovar konkukian str. 97-27
MANIQAIFIDRDGTIGGDTTIHYPGSFTLFPFTKASLQKLKANHIKIFSFTNQPGIADGIATIADFSQELKSFGFDDIYVCPHKHSDGCECRKPSTGMLLQATEKHGLDLTQCAVIGDRWTDIVAGAKVNATTILVRTGAGYDALHTYRDKWAHIEPSYIAENFEDATNWVLNQL

SEQ ID NO: 27905 - protein, 450 aa, Bacillus thuringiensis serovar konkukian str. 97-27
MVYLKNFLELGISETFNHTLRENGITEATPIQEKAIPVILSGKDIIGQAKTGTGKTLAFVLPILEKIDPESSDVQALIVAPTRELALQITTEIKKMLVQREDINVLAIYGGQDVAQQLRKLKGNTHIVVATPGRLLDHIRRETIDLSNLSTIVLDEADQMLYFGFLYDIEDILDETPGSKQTMLFSATMPKDIKKLAKRYMDEPQMIQVQSEEVTVDTIEQRVIETTDRAKPDALRFVMDRDQPFLAVIFCRTKVRASKLYDNLKGLGYNCAELHGDIPQAKRERVMKSFREAKIQYLIATDVAARGLDVDGVTHVFNYDIPEDVESYIHRIGRTGRAGGSGLAITFVAAKDEKHLEEIEKTLGAPIQREIIEQPKIKRVDENGKPLPKPAPKKSGEYRQRDSREGSRSGSKGRTRNDSRNSSRNENNRSFNKPSNKKGSTKQGQQRRGR

SEQ ID NO: 27906 - protein, 561 aa, Bacillus thuringiensis serovar konkukian str. 97-27
MIHLKTHYTVSTYLLDRLSELGIEHIFGIPGDYNLAFLDDVIAHEKLEWIGNCNELNAAYAADGYARIKGIAALITTFGVGELSAINGIAGSYAENVPVIKITGTPTTTVMENGELVHHTLGDGKFNHFSNMYREITVAQTNLTPEHAVEEIDRVLRACWNEKRPVHINLPIDVYNKPINKPAGPILHKPILSNKETLDKMLLHAISKINSAKKPIILADFEVDRFHAKEYLYQFVEKTGFPIATLSMGKGIFPEKHPQFIGIYTGDVSSPYLRKRIDESDCIISIGVKLTDTITGGFTQGFTKEQVIEIHPYTVKITDKKYGPVVMKDVLQQLSDVIEHRNEETLDIKPFISESLSMTEEFNPKAQMVTQKRFWQQIYHFLQENDVLLAEQGTPFFGSAAIPLPNDTTYVAQPLWGSIGYTLPALLGTQLANLSRRNILIIGDGSFQLTVQELSTMLRQNLKPIIFLINNNGYTVERAIHGQIEPYNDIQMWEYTKLANVFGTEEKSQTFKVENETELQEVLTKISIDKDQLTFVEVVMSQGDQPELLAKLGKRFGQQNS

SEQ ID NO: 27907 - protein, 471 aa, Bacillus thuringiensis serovar konkukian str. 97-27
MSKLLKKKSVTQLLEHNQSKTLTKTLGAFDLIMLGIGSIIGTGVLVLTGLVAARDAGPAVIFSFVLAAIICGFIALCYAEIASTLPASGSVYTYSYATIGEFVAHLVGWSLLLIYIVATAAVAAGWTGYFHNLIKGFGLEIPKALVTIPSHGGIVNLPAVIITLILAWMLSRGTRESKRINNIMVLIKIGMILLFITVGIFYVKPMNWIPIAPYGLSGIFTGGAAILFAFTGFDILATSAEEVKDPKRNLPIGIIASLIICTIIYVMVCLVMTGMVSYKELNVPEAMAYVMEVVGQGKVAGAIAAGAVIGLMAVIFSNMYAATRVFFAMSRDGLLPKSFAKVNKKTGAPTFITGLAGIGSSIIAGFIDLKELVNLVNIGSLVTFALVCLSVIILRKSHPNLKRGFMVPFVPVLPCVAIVCCVFLMLNLPLRTWVYFSIWITIGVVVYFLYSIKHSNLNEETISKLHDKIAR

SEQ ID NO: 27908 - protein, 479 aa, Bacillus thuringiensis serovar konkukian str. 97-27
MNWYVIIPMIISFIVVFLIGVYASRRVQATAHNKFLQEYFLGGRELGGLLLAMTMIATYGSASSFIGGPGIAYNMGLGWVLLSAIQVVTGYIVLTVIGKKFAIIARKMEAITLIDYLKGRYNNKAVVILSAVCIIIFLFSATVAQWVGGGRLIESLTGLSYTTALFLFTFSVLVYVLIGGFRAVALSDTLLGIIMLVGTTIILIATVIAGGGIEKIMQELVQINPNLITPFGADGSLTKSYVTSFWILIGIGVVGLPQISVRAMSYKNSKAMHQALIIGTIVVGTIMIGMHLTGVFARVVLPGIAVPDKVMPLLAMEVLPPWLAGVFLAAPMAAIMSTVNSLLLLVSSSIIKDIYVNYINKDAADSTIRKGSLWITAIVGLLVYAAAIKPPDFLIWLNLFSFGGLEAAFIWPIVLGLYWRKGNATGALASILVGVSSYMCIHLFYPNPFGIHTVVFPICFAFIAYILGSMVAVKKNSIG

SEQ ID NO: 27909 - protein, 493 aa, Bacillus thuringiensis serovar konkukian str. 97-27
MVKIEIMVSLAIYMAGMLYIGYWSYKKTSDLSDYMLGGRGLGPAVTALSAGASDMSGWMLMGLPGAMYATGLSSVWIAIGLLIGAYANYLILAPRLRTYTEVANDSITIPDFLENRFKDRTKILRFVSAIVILVFFTFYASAGLVSGGRLFENSFNLDYKIGLFVTVGVVVAYTLFGGFLAVSWTDFVQGCIMFIALVLVPIVAFTDVGGVTETFNTIKQVDASHLDMFKGTTILGIISFLAWGLGYFGQPHIIVRFMAITSIKDLKTSRRIGIGWMTISIIGAMLTGLVGIAYYAKNNATLQDPEMVFVTFSNILFHPYITGFLLSAILASIMSSISSQLLVISSAVTEDFYKTFFRRKASDKELVFIGRLSVLVVAMIAVVLAYHPSDTILTLVGYAWAGFGSAFGPAILLSLYWKRTNKWGVLAGMIVGALVVITWVQIPSLKATMYEMVPGFFCSLLAVIIVSLVTKEPVKAIHREFNEMEAVLEEETK

SEQ ID NO: 27910 - protein, 323 aa, Bacillus thuringiensis serovar konkukian str. 97-27
MEHGHYLKKNAKFIDREVTKWSEMIKDWEEGVEIFGAALIGAPLSKPSISHSGASFAPKTIRAMLDAYSTYAITEEHDMKESVLYDCGDITMHVTNIKESHNRIAKTVGHVTKVNPNMIPIVLGGDHSISFPSITGFANSKGKVGIIQFDAHHDLRNLEDGGPSNGTPFRSLLENDVITGKQLVQIGIRNFSNARAYHEYAKEQDVTVYTMKDVREREIKDIIIESIEVLRKQGVTSIYISLDMDVLDQAFAPGCPAIGPGGMDSTTLLDAIELLGNEPLVQGMDIVEIDPTLDFRDMTSRVAAQVIMSFLLARETIRKQVSI

SEQ ID NO: 27911 - protein, 271 aa, Bacillus thuringiensis serovar konkukian str. 97-27
MSVFTPEEITELAANSGRKKAHLSLLPMLILGFFGGAFIALGYLLDIHVIGTMPKAWGSFTSFLGAAVFPIGLILVILAGGELVTGNMMTVSMAWLHKKIDLFHFIRNLFIVTFSNFIGAVFVAYFFGHIVGLAEGAFLAKTVSVAQAKLQDTPLQAFISAIGCNWLVCLAVWLSMGSKEFIGKIIGIWFPVMTFVAIGFQHVVANMFVIPAAIFAGHLTWIEYFPNFIFVFFGNLVGGMLFVALPYFISYKKKLPSKEEQTALKKKSVSA

SEQ ID NO: 27912 - protein, 387 aa, Bacillus thuringiensis serovar konkukian str. 97-27
MEQFINPRVKDIQISGIRQFSNMIQNYDNLISLTIGQPDFPTPSLVKEAAKRAITENYTSYTHNAGLLELRKAACNFVKDNYDLHYSPENETIVTIGASEAIDVAFRTILEPGTEVILPAPIYPGYEPIIRLCGATPIFIDVRETGFRLTAEALENAITEKTRCVVLPYPSNPTGVTLSKKELQDIADVLKDKNIFVLSDEIYSELVYEQTHTSIAHFPEMREKTIVINGLSKSHSMTGWRIGLLFAPSYLAGHILKVHQYNVTCATSIAQYAAIEALTAAKDAPKMMRHQYKKRRDYVYNRLIQMGLTVEKPTGAFYLFPYVGHLTSSSFDFALDLVKEAGLAVVPGTAFSEYGEGYLRLSYAYSIETLKEGCDRLEAFLQKKAKS

SEQ ID NO: 27913 - protein, 571 aa, Bacillus thuringiensis serovar konkukian str. 97-27
MLRKFFSYYKPYKGLFILDFSCAVVAGLLELGFPLIVNQFIDKLLPGQNWTLILWACFGLLAVYMLNAGLQYVVTYWGHMLGVNIETDMRQKLFDHIQKLSFRFFDNNKTGHLISRLTNDLMEIGEIAHHGPEDLFIAVMTLVGAFSFMMMINWKLALLTFFVIPFLLWLALYFNKKMTGTFRRLFSDVADFNACIENNVGGIRVVQAFGNEKFEKEQFAVNNARFRTTKLMAYKIMALNSSISYMLMRLVTLFVLICGTWFVLQGELTYGGFIGFVLLTNIFFRPIEKINAVIESYPKGIAGFKRYVELLETEPDIVDSKDAMEVKHVHGDIQYNNITFGYENKEPILNDISLKIHAGETVAFVGPSGAGKTTLCSLLPRFYEQSSGSIQIDGIDTKDMTLSSLRKQIGIVQQDVFLFSGTIRENIAYGNLKASEAEIWQAVKRAQLEDLIYSQPDGLDTVIGERGVKLSGGQKQRLAIARMFLKNPPILILDEATSALDTETELAIQKSLAELSVGRTTLVIAHRLATIKNADRIVVVNKDGIAEQGSHDELIEQGGGYSRLYEAQFSS

SEQ ID NO: 27914 - protein, 259 aa, Bacillus thuringiensis serovar konkukian str. 97-27
MSFHKPEQIAELVIEAGVQKVSQTLPAMLILGFLGGAFISLGFLLNIRVLGNLPERWGSLVNVLGGAVFPVGLMLVVLAGGELITGNMMSMSMALYAKKITFVSVLNNWIWITFMNFVGAMFVAYCFGHLGGLTEGDYLNKTVAIAEGKLHESFGRTLILAIGCNWLVCLALWLAYGTSDFVGKIIGIWIPIMAFVVIGFQQVVANMFVISAVIFAGHLTWMDLARNFVPVFIGNVIGGAGFVGFAYYACYQKQHSNMK

SEQ ID NO: 27915 - protein, 222 aa, Bacillus thuringiensis serovar konkukian str. 97-27
MKFFIDTANLEDIKKAYKLGVLAGVTTNPSLVAKEGIKFEDRIAEICQAVPKVESVSAEVTPDAVTAEEMIAQAEELIKINGGDEKVTIKLPMTLAGLEACRYLTEKGVKTNVTLIFTVNQALLAARAGATYVSPFLGRLDDISEDGVLLVAKIAELFDVHQLDTQIIAASVRHPDHVTRVAMAGAHIATIPYKVIEQLAMHPLTDQGIEKFAADWVKAPKL

SEQ ID NO: 27916 - protein, 471 aa, Bacillus thuringiensis serovar konkukian str. 97-27
MVVVAYTVLLATSVHTYKKQLDHPIMSDVGKLLPTKIKRVESATDEHSLIQLVQDANVSGEKISIAGMQHSQGGQTYYPHGTMLDMKGYNKILEFDPEKKCITVQSGVTWNDIQKKVNPYGLAVQVMQSQNIFTVGGSLSVNVHGRDIRHEALIDTVESFRLLMADGTVRNVSREENADLFPYVIGGYGLFGVILDVTLKLTNDELYETHTKMLDYKEYTSYFKEKVKKDANVRMHLARISVAPNSFLREMYVTDYTLAQNQNMREEYSELKQETIIAAPKFLLGLSRYSDWGKNTFWDIQRSYFERTDGKYETRNNVMRSDSAFMEYENPNRTEVLQEYFVPIDSFTEYIDDLRNVLNEEEFNLLNITIRYVEKNENAVLSYAKDDMFALVLLINQGRSENEIKKTEDVIQKMIDVTLKHNGSYYLPYYSYPTKEQLKRAYPRIEEFLGKKKEADPKERFVNLFYREYTK

SEQ ID NO: 27917 - protein, 598 aa, Bacillus thuringiensis serovar konkukian str. 97-27
MRNFQGQFANKGGRNAPKIDKAKNTKGTVMRVWNYMGYQKAALTFVIFLVLVTTLLGLLGPYLMGVIIDQYIVPKDVSGTARMCLLLIAIYGVTVLLTWLQTFVMVNVALKTIQKIRQDIFKKIQTLSLRFFDVRSQGDLMSRVTNDIDNLNQALTQSVVQIISSALTFIGVTIAMFALDWILAIVTLITVPIMFFVTKKLVAYSGKNFAKRQKDLGELNGFIEEAITGADVTTLYGKEKETVQKFNKINEQLRVSATKADTFSAFIFPSMNFINNLGMGLVIGTGSVMVLNGMTTVGVIAAFINYSRQFSRPLSQFATLMNTIQAAVAGGERVFEIMDEVPEIKNKKDAFVIQNLHGHVALENVSFGYEENKTILKEVSLKARPGETIALVGPTGSGKTTIINLLTRFYDVQQGQIYIDEKNIKEYDLNSLRSKIGVVLQDTYLFAGSIMDNIRYGRLDASDEEVINAAKAASAHSFIKHLPNQYETKIATEGSNLSQGQKQLLAIARAILADTDILILDEATSNIDTRTELQIQEGLDNLMRGRTSFVIAHRLKTIEKADQILVIKDGSILEKGNHESLMEDRGFYFDLYTSQFKI

SEQ ID NO: 27918 - protein, 493 aa, Bacillus thuringiensis serovar konkukian str. 97-27
MYRLSQYETPLFTALVEHSKRNPIQFHIPGHKKGQGMDPEFREFIGHNALAIDLINIAPLDDLHHPKGMIKEAQDLAAAAFGADHTFFSIQGTSGAIMTMVMSVCGPGDKILVPRNVHKSVMSAIIFSGAKPIFMHPEIDPKLGISHGITIQSVKKALEEHSDAKGLLVINPTYFGFAADLEQIVQLAHSYDIPVLVDEAHGVHIHFHDELPMSAMQAGADMAATSVHKLGGSLTQSSILNVKEGLVNVKHVQSIISMLTTTSTSYILLASLDVARKRLATEGKALIEQTIQLAEQVRNAINDIEHLYCPGKEMLGTDATFNYDPTKIIVSVKDLGITGHQAEVWLREQYNIEVELSDLYNILCLVTFGDTESETNTLIAALQDLSATFKNKADKGVRIQVEIPEIPVLALSPRDAFYSETEVIPFENAAGRIIADFVMVYPPGIPIFTPGEIITQDNLEYIRKNLEAGLPVQGPEDMTLQTLRVIKEYKPIS

SEQ ID NO: 27919 - protein, 473 aa, Bacillus thuringiensis serovar konkukian str. 97-27
MNQNRIPLYEALIEFKERRPLSFHVPGHKNGLNFPQEVVEEFKDILSIDVTELSGLDDLHSPFECIDEAQQLLADVYGVNKSYFLINGSTVGNLAMILSCCGEHDIVLVQRNCHKSIINGLKLAGANPIFLDPWIDEAYNVPVGIHDEIIKEAIEKYPNAKALILTHPNYYGMGMDLEASIAYAHTHKIPVLVDEAHGAHFCLGGAFPQSALAYGADIVVHSAHKTLPAMTMGSYLHINSRLVKEEKVSTYLSMLQSSSPSYPIMASLDIARFTIARIKEKGHDEIVEFLQEFKEELSTIPQIAILQYPLQDGLKIPVQTRCQLSGYELQSVFEKVGIYTEMADPYNVLFILPLQVNKKYMKAIEMIRVALQYYEVKDKTESIRYTYKGEISPLPYTYKQLEEYETKVVPIEEAVGMVAAEMVIPYPPGIPLIMYGERITSEHKEQIMYLEKAGARFQGSTKYMKVYDIESRF

SEQ ID NO: 27920 - protein, 592 aa, Bacillus thuringiensis serovar konkukian str. 97-27
MAETLAKRGPDDNKVWIKGNVAFGHKRLIVVDPEGGKQPMTCLKDEANYAICYNGELYNTEDIRKELLRRGYTFKGHSDTEVLLASYIEWKEECVDHLNGIYAFAVWDEQKEQVFIARDRLGVKPLFYKYDSGRLLFGSELKAILAHPDVKAEVTLEGLSEIFGLGPSRTPGHGIYAGIKELRPGHAMTFSKNGLCIWRYWNVESKKHEDSFEETVEKTRFLLQDAITRQLVSDVPLCTFLSGGVDSSAITAIAAKEYERSGKGQLHTYSVDYEDNDKYFKANAFQPNSDAPFIHLMTETFQTIHHRCVISNEQLAQYLTEAVLVRDLPGMADIDSSLLWFCREIKQDFVVGLSGECADEIFGGYPWFYREDDLQSSAFPWMRSTEAREQLLKKEWRNKLNLQQYVQQRYEESIQEVPILDGESPLEAKRRQLFYLNMVWFMTTLLDRKDRMSMGASLEVRVPFADHRLVEYAWNIPWEMKMYKNREKGLLRKALEGLLPNEILYRKKSPYPKTHNPHYTKAVTVWIQDLLTDKGSILHELFDKEQLSGLIESGGSAFQTPWYGQLMTGPQLLAHLAQIHVWFKEYGVNIKE

SEQ ID NO: 27921 - protein, 283 aa, Bacillus thuringiensis serovar konkukian str. 97-27
MLEQGLDYVVKLAKSKKQILDANPMQYFIRAALAGIYIGFIIVLCFKLGNFFHIADSPATYLAASMFFGIALVLIIYGGAELFTGNTMYFTVATLRKETTISDTLRNWVACYAGNLAGALFFALLFYATGIFEAIDHGHLMNKVVEGKMNTPTMQLFFKAILCNWLVCLACFLPSQVKGDTAKIMIMMLLVFTFFLSGYEHSIANLSLFALSLVSPHPETISFAGAIHNLIPVTIGNIIGGSVFVGMVYHYLTKKVPDVKQEETELVAAQQEEIIPLQAHMKH

SEQ ID NO: 27922 - protein, 379 aa, Bacillus thuringiensis serovar konkukian str. 97-27
MMIYLDYAATTPMSVEALQTYTKAASQYFGNEQSLHDIGGTASSLLQVCRKTFADMIGGKEQGVFFTSGGSESNYLAIQSLLNAQNKKHIITTPMEHASIRSYFQSLKSQGYTITEIPVDKSGLIRLVDLETAITEDTVLASIQHGNSEIGSVQNIAEIGALLKKYNVLFHSDCVQTFGKLPIHVFEMGIDSLSVSAHKIYGPKGVGACYINPQVRWTQVFPETSHEKGFRPGTVNVPGIASFLTAAENILKNQQEESLRFKELRSYFLEQIQTLPLEIEVEGHSTSCLPHIIGVTIKGIEGQYTMLECNRRGIAISTGSACQVGKQGPSKTMLAIGKTYEEAKQYVRFSFGQQTTKDQIDTTIHALHTIGNQFYRGVK

SEQ ID NO: 27923 - protein, 1478 aa, Bacillus thuringiensis serovar konkukian str. 97-27
MLNKTNTWTPSLFRDYKNAEHDACGIVSVMEKRKIPTKENIDLCIQSLVKMNHRAGFINGEGDGIGIHIDVPKALWNEKLKSSGYNPTIVDHPHFIVGHFFLNKNENIVDLKNHIRTQLNNENFAILFESDNVINSDALGPLGKQEEPLFWQVALIAENEVVNIEQTLFSVTIKIEENEAIHVASLSRDHVVYKVLGAGDTLVAYYNDLQHPLIASTMTLGHNRYSTNTLPNFFRVQPFSILGHNGEINTIAKLRDQAEMIHVPLTAGGSDSQDLNRTLETLLVQYGYSLFEAMDILFPPIINEIKLYETHLQDLYTYIREAWGHFAQGPAGIISRYKDEAVFSVDSLGLRPVWKVETESSYIFSSEPGVVSPTEYVAEPKPLAPGEKVGLKWNEQDELVLYEHDDYQTQVYNRFKKKVDVTNYHLHLSIPKTKEIPDACDSMQVETKQYVAFGWDREHIQLLEQMATKGVEPIRSLGHDSPLAALDTDRRNIADFIKESVAVVTNPAIDRDREVEHFSTRTILGERPSLLSDAKKPFVVEMLSPIILEGSVAQSIAQELHTITYEQLIELFNTHSSIATISATFSQAETLQCALSRISSEAITAVNDGASLLLIDDADAHLNERLWIDPHLVTAKVHQVLSENKLRRNCSLVIRSGALRSLHDIVTLYGLGADSINPYLLFATVNDGTKTPITNLYSALNKGLEKVISTIGIHELRGYGRLYSAIGLHEEIANILQITNFLGSNDLSFSLESLAEDAQMRADDYNDPKVRIRKSFHIFPRIWKAIGDVAKGNSYDDYRDKLSELEENNPIAIRHLIQTKETKHVVPAEEVSISIQNHDLPFIISSMSFGSQNEIAFRAYAEAADQLNMISLNGEGGEIKDMIGKYPHTRGQQVASGRFGVNAELLNSSNLIEIKIGQGAKPGEGGHLPGSKVTAKIAEARNATIGSDLISPSNNHDIYSIEDLAQMITEIKTANQLAKVAVKVPVVPNIGTIAVGIAKAGADFINISGFDGGTGAARIHALQHVGLPVEIGVKAAHNALLEANMRHNIEIWADGGIRSVNDALKIMLLGANRIGFGTLSMIAIGCTTCRGCHLDTCHVGIATQIESEAQAKEHGLRRFVPRELESAVAGLLHLFTTFGEELKRLTGNLGYTNLQEIVGRSDLLEQVRGKNLLNLCNLLQTIEHPSVIKTEHVLEKQFETVHSPHSKELVGVGVEQRVMGGLESCYRVRSKLYEDTKLEPLTLKYTNGSIPGNGLGAYNSENLFIHVNGGAQDGIGKTSFGGGIYITKAKGKDGLYYNGSVGKGFGYGAQKGALYVQGNADARAGIRLSGADMIIGGRMTKPLREKEQGNIGAYSNIKGFAFEYMTNGRALVLGDPGPWICAGMTGGVVYLRHDSSLGLTEQALKRRIAKGANVTLQPISKNGVRDVNELLLDYIRVLNEHEQYEEVALLTPLLDDMQQQFFEIIPKKEQADPSISTE

SEQ ID NO: 27924 - protein, 516 aa, Bacillus thuringiensis serovar konkukian str. 97-27
MIKKENSVFYISILLTTLFIIWGITPASWIQGYDLQSVTSSLNSFILNKFGWFYSLLMTAMIILATYLAFSKYGSIRLGKDGEKPKYSYPSWLSMLFGAGMGIGLLFYGIAEPISHFTDPLTGKAGTEESAKLAMQYSFFHWGLFPWALYAMVALTIAYFTFRKQKGSTIGATVTPLFNRSKNSPIGKTVDILAVLATVFGIVPSVGIGAQQIAGGLSYLFPSIHNTLLTQLVLIAIFAVLYLTSAQTGLDRGIKYLSNLNFSLAGILLVSFLLLGPTVFIMKYFTSTLGSYIGALPSMGLNLGAFNEKSSSWIENWTIFYWGWWISWSPFVGTFIARISKGRTIKEFIFGVVLVPTLICTFWFAVFGGTAIHMEMFQSLGVADEIAKNGTEIGLFAVISHLPFSTFLTIIGLILVATFFVTSADSATFVVSMQTSNGSLSPKNSLKLIWGLTIAIIAAILLQAGGLNALQIAAIIAALPFSIVVVLMVTSLFKELRKEDINSQTKEVPKKIKKVI

SEQ ID NO: 27925 - protein, 473 aa, Bacillus thuringiensis serovar konkukian str. 97-27
MQQPTNEKLHRTMKSRHLFMIALGGVIGTGFFLGSGYTINQAGPGGAILSYLVGGFIMYLTMLCLGELTVAMPVSGSFQKYATKFIGPGTGFMIGWLYWLGWAVTVGLELTSIGLMMKRWFPNVDVWVWCLVFGVILYASNAISAKSYAELEFWFSSIKVITILAFVVLGGSALLGFISYDGKEAAPLFSNFVSEGGLFPNGLAAVLLTMITVNFSFQGTELIGIAAGESENPEKTIPRAIRNTVWRIMLFFILTMTILVGLISWKEAGVIESPFVVVFDKIGIPYAADIMNFVIITALLSVANSGLYAATRILWSLANEGMAPTSFQKVNKRGIPITALVVTIAVAGLSLFTSFLAEDTVYMYLLSIAGLSAVSSWIIIALSQLRFRSQYIKGGGKLEDLKYRTPLYPIVPILALITNSIVVISLAFIPEQRMALYCGIPFIIFCYIYYYINKKRQKPMKVETTNETNNQTR

SEQ ID NO: 27926 - protein, 490 aa, Bacillus thuringiensis serovar konkukian str. 97-27
MTALLIIILFLFLALFLGIRAQHGKDMNLEQWSVGGRGFGTIFVFLLMAGEIYTTFTFLGGSGWAYSKGAPTFYILGYGALAYILSYFLLPPVWKYAKEHNLVSQPDFFVKKYKSQALGLIVSIIGVISIIPYLVLQLKGLGIIVSEASYGRVSPVIAVWIGAIVITIYVMVSGIHGSAWTAALKDIMILFIVMFLGIYLPYHYYGGFQPMFEAVEAAKPGFLSLPDEGMSISWFVSTIVLTALGFYMWPHTFASAFSAKNEKVFRKNAAIMPLYSLVLLFVFFAGFAAILQVPGLKGGDVDLSLFRLALQTFDPWFIGIIGSAGVLTALVPGSMLVMAASTLLAKNIYRTMVPSASDRQVAKVAKLFVPVVTLVAVLFTFKGGETIGALLLMGYSIVTQLFPALVCSLFPRQIITKQGAIAGMGIGLLVVAYITLSGSTIATMFPGFPQYIKDLNVGIVALLMNMIVMFIVSGFTKNVSIKKDNIIVEK

SEQ ID NO: 27927 - protein, 467 aa, Bacillus thuringiensis serovar konkukian str. 97-27
MKSLLRKKALSTESPRQLQRTLTALDLTFLGIGAVIGTGIFVLTGIVAAKHSGPGIMLSFLIAAFTCACVAFCYAEFASSIPVSGSVYTYAYMTVGEVVAFIVGWCLMLEYLLAVAAVAVGWSGYLQSLLQGFNIHLPAIIASAPGVGKDGLIDLPAVCILLIITGLLSFGIRESARINNIMVLIKLAVIIAFIVAGAKYVKPENWTPFIPFGYDGIITGAATVFFAFLGFDAIATAAEETKKPQRDLPIGIIGSLLICTVLYMIVSFVLTGMVPYTQLDVSDPVAFALHFVGEDTIAGLLAVGAMTGMTTVLLVVMYGQVRVSYAMSRDGLLPKALARVNKRVKIPLLNTWITGVVAALLAGLLDLHVLANLVNIGTLTAFTFVCCAVLILRKTHPDLKRGFRTPFVPVLPVVAILCCLYLMINLSKTTWISFAVWLIVGLCFYFFYSRKHSHLATEKTNDEQKKA

SEQ ID NO: 27928 - protein, 437 aa, Bacillus thuringiensis serovar konkukian str. 97-27
MLSIKGQKWRNWTGNVEGTPHYTMYPESIQDVVEVIELARKKGKKIRVVGSGHSFTPLVQTEEILVSLDEMKGIVNIDTEKMIAEVWAGTKLHELGKLLEEKGYAQENLGDIDSQSIAGAISTGTHGTGITFGSLSTQVIEITAVLSTGETIVCSETENVEYWRAFQLSLGMLGIIVRIKLNIIRAYSLVYESEKQSLATVMNKLEEYKKNRHFEFFVFPYSDEVQVKVTNETTGKKSDLKWHKLKVELLENKMFSLLSKGCKWFPSISKGVSRLSAKAVPNTKIIGPSYEVFATSRAVPFYEMEYSVPSKYMQAVVEEISNLIEKKKYKVHFPIECRYVKRDDIWLSPAYGRDSAYIAVHMYKGMKYAAYFGEVEKIFLKYEGRPHWGKMHTLTYGKLQNIYPELHSFLKVRKLLDEAEMFSNPYTEKLFTIMKKS

SEQ ID NO: 27929 - protein, 607 aa, Bacillus thuringiensis serovar konkukian str. 97-27
MCGITGWVDWKEDLSNQHVILKKMANRIQHRGPDAEGFWFSPRAAFAHRRLIVIDPEGGTQPKTFRAGDYTYALTYNGEIYNFRELREQLRKCGHLFETHSDTEVLLHAYLEWKEDCVQHLNGIFAFALWDDQKQRLFLARDHLGVKPLFYTERNNSIIFGSEIKALLAHPSVPAEIDADGINEIFGLGLFRTPGCGVFKHIQEVRAGHSITFTRDKKVVTKYWNLESKIHTDSIEDTSSRILSILQDTVKRQLIADVPLVCMLSGGLDSSGITALAGKEFAAENKTLHTYSVDFVNSAKDFELTFARTGLDAPWVKRVSEHVGTSHHDIIVNAEELANHLFVPLRAKDLPSAGEMETSLYLLFCEMKKDATVALSGESADEVFGGYPWFHQEELLYVDKFPWLTNWKTTSPLLLHEVSNQCNLENYIDTRFQEAILEVPTLEGESKKSAKQRQMFYLFLTRFLPFLLDRKDRMSMAVGFEVRVPFCDYRLVEYLWNVPFNIKSIDNIEKGILRRALKPALPDDVRNRRKSAYPTSQDPHYLQTIRNLTLEMCSNKNSPIFSLINHSTLLAIADGSNKEINNFEARSAMEYMLQVNEWLKTYHIHIA

SEQ ID NO: 27930 - protein, 522 aa, Bacillus thuringiensis serovar konkukian str. 97-27
MRMKSRKTDWPVFLISGGSLLLFVIAVFFNKSYVEGVINSSFAASIKYFGAFWQVLLIGTFIVAMCMAFSKYGRVKLGGLEKPEISTTKWLAIIMSTLLAGGGVFWAAAEPMYHLMTVPPIHEGITAGTKEAVMPALAQSYMHWGFLAWTILGTISAVVMMYGHYHKGMPLKPRTLLYPIFGEKLRKSWLGTLIDAFAIIAVAAGTIGPIGFLGLQASYGLQALFNIPDVFTTQLAIIVCVVAVSTISAVTGIDKGIQIISNLNVRLAILLMVFVLLFGPGGFIIDSFVSSFGFYINEFIPMSTYRGDTGWLGSWTIFFWGWFIGYGPMMAILVSRISRGRTIREIIVAIGIIAPIITTFWFTILGGSGVFYELMNPGSISTALSASGMPAAMIAITEQLPLSHIIGPAFLLLTILFVVTTGDSMAYSISMAVTGDGDPRISLRVFWSLIMGTVAAILLYMGEGSINALQSFIVVTAVPVSILLFPMLWLAPKVAGELALKQGIVKEEDKTAFLFQKASKSK

SEQ ID NO: 27931 - protein, 330 aa, Bacillus thuringiensis serovar konkukian str. 97-27
MRDTAKGDGTVKPKVYIAEPVPTFVENYLSEHCDYEKWEQNEKVPRDVLLEKIQDKDGLLNFGSAINEELLEAAPNLKVVSNISVGYDNFDLQAMAKHNVIGTNTPYVLDDTVADLVFALMLSAGRRVCELDSYVKNGEWNAEIGKEHFGLDVHHSTIGIIGMGRIGEAVAKRAKFGFDMNVLYYNRRRKEEAEQKFDATYCDLQILLKQSDFIVLLTPLTDETYHLIGEKEFSFMKETAIFINASRGKTVDEEALIDALTEKKIFAAGIDTFTQEPIQKDNPLLSLQNVVTLPHIGSATLKTRQQMAMTAAENLVAALQGKTPPNIVRG

SEQ ID NO: 27932 - protein, 438 aa, Bacillus thuringiensis serovar konkukian str. 97-27
MHHDEKNKIGLTVALSIVVGTIIGSGVFMKPGSVLDYSGSSNMAILAWVIGGLLTLASGLTVAEIGAQIPKNGGLYTYLEEIYGSFWGYLSGWMQTIVYGPAIIGTLGLYFSSLMINFFYLDKVWNLPIAIGTVVFLGVVNSMGTKYGGIVQTITTIGKMIPIVLIVVLGFWKGNSDIFNVVVPISENQSIGMAILATLFAYDGWILLASIGGEMKNPTKLLPKAMTVGILIVTAAYVLINLALLNVLPATQIVDLGENATATAAGMLLGEYGGKIISIGIIVSIFGCLNGKILTFPRIPMSMAERGQLPFAKFIAKESPRFKTPANAITVEIILGIILMIISDPNKLSEISVFIIYIFYVMTFIGVFILRKRNKNKERAYSVPLFPIVPIVAIFGSLFVIGSAIINDPLSCFLSIGIVFTGLPVYWYLNKKNKTEVS

SEQ ID NO: 27933 - protein, 540 aa, Bacillus thuringiensis serovar konkukian str. 97-27
MSYEKVWANNEKLNQTEKNKLKKDGLEIFNDIPYYAENGFESIPKEEWDAFKWAGLYLQRPKEAGYFMMRVNIPSGIITNAQAEVLASIAEDYGRDVIDITTRQAIQFHWLEIHQIPDIFKRLARVGLSSAGACGDITRNITGNPLAGIDANELFDTTHIVKEVYDYFQHNEEFSNLPRKFKMSISSNIYNAANAEINCVAFTPATKEIDSEKKDGFHIKVGGGLSARPYLADELDVFVLPEEVKAVAIAIATIFRDFGYREKRHLARLKFLVADWGAEKFKEKLIEYTGPLQSKGESALKGWNAGYFYGVQDQKQEGLKYVGFNVPVGRLHAEEMFEIARIAKQYGNGQIRTCNSQNFIIPNVPPENVTGLLTEPLFEAISANPKSFIGHAVSCTGIEYCNLALVETKERLRKIAEYLDTQIALDVPVRIHMVGCPNSCGQRQIADIGLQGVKMKTKEKGIVEAFEIYVGGTLLDGGAYNQKLKGKIDGEDLPDVLASFISYFKENKLPAETFYDFVGRVGVETLQIALNNVLEEVIAS

SEQ ID NO: 27934 - protein, 409 aa, Bacillus thuringiensis serovar konkukian str. 97-27
METIVQKFGGTSVGSVERIQHVANLIIEEYERGHSIVTIVSAMGKSTDELVALANAITENPSKREMDMLLSTGEQVTISLLTMALQAKGYNAISLTGWQAGITTESVHSSARITDIHTDRIQSYLAEGTIVIVAGFQGVSENHEITTLGRGGSDTTAVALAAALNAKKCDIYTDVTGVYTTDPRVVKDAYKLDEISYDEMLELANLGAGVLHPRAVEFAKNHNVILEVRSSTEQENGTIVKGECNMEQQSIVKGIAFEDNITRITVKGLEQGSLSTVFSTLAAAHINVDIIIQSITNEGTVHLSFSIHSNDLRETLKVLEQNQEALHYESVEYENHLAKVSIVGSGMVSNPGVAANMFTTLKEEDIHIKMVSTSEIKVSVVIDRLHLVTGVEALHQSFMAKIEPLVQLI

SEQ ID NO: 27935 - protein, 570 aa, Bacillus thuringiensis serovar konkukian str. 97-27
MKQYTTYEKLQCEEVTGAGHVIQCLKKLGVTTVFGYPGGAILPVYDALYESGLKHILTRHEQAAIHAAEGYARASGKVGVVFATSGPGATNLVTGLADAYMDSIPLVVITGQVATPLIGKDGFQEADIVGITVPVTKHNYQVRDVNQLSRIVQEAFYIAESGRPGPVLIDIPKDVQIKKVTSFYNEVIEIPGYKLEPRPDSMKLREVAKAISEAKRPLLYIGGGIIHADGSEELIQFARKKGIPVVSTLMGLGAYPPGDPLFLGMLGMHGTYAANMAVTECDLLLALGVRFDDRVTGKLELFSPHSKKVHIDIDPSEFQKNVAVEYPVVGDVKKALHMLLHMSIHTQTDEWLQKVKTWKEEYQLSYKQKESELKPQHVINLVSELTNGEAIVTTEVGQHQMWAAHFYKAKNPRTFLTSGGLGTMGFGFPAAIGAQLAKEEELVICIAGDASFQMNIQELQTIAENNIPVKVFIINNKFLGMVRQWQEMFYENRLSESKIGSPDFVKVAEAYGVKGLRATNATEAKQVMLEAFAHKGPVVVDFCVEEGENVFPMVPPNKGNNEMIMKRWEE

SEQ ID NO: 27936 - protein, 333 aa, Bacillus thuringiensis serovar konkukian str. 97-27
MVNSTSNRIKVYFGVCMLICLSVFPFVNDSRSLLILFTQIFIFAIFAMSFDVLLGYTGIVSFGHCMFFGIGAYGVALLFDRQGVSITNFFIGIVAAIIISAIVSYIIGLLSLRLKSHFYAMLTLAISQLFFVLAEKWRGLTHGGDGFTFGVPDVFRDRFTFYYVTLICLLIIFVLLRLFTKSSIGKVLKAISQNEQRVEALGYKVLHYKIIASVVAGVVAAISGGLFVITLRFVNTTVFSIEMTLNALLMTMIGGVGTLIGAIAGAGIIESLKYYLSELATEYPIFERWTIILGLLYIIVLLVFPKGLVGTVKGLKNMKRNKKEKSAEVEQNV

SEQ ID NO: 27937 - protein, 505 aa, Bacillus thuringiensis serovar konkukian str. 97-27
MRKLTKTFIVSLTLCIAFTLWGIIPESIIGKGSLGNVTTAIQTALVSKFGWFYIISVSIILGVSIFLIVSKYGSIRLGKDDDEPDYSYMTWFAMLFSAGMGIGLVFWGVAEPLNHLYAPPFGESATEESARLALRFSFFHWGLHPWGLYAFVALCIAYFTFRKGKASTISATVGPLFKGGDHGRIAHLFDVLAVFATVFGVATSLGLGAKQIAGGVSYLTSIPNSLTTQLVIIAIVTVLFMLSAQTGLDKGIKYLSNTNIILAFALMIIVLFAGPTNFIMNYFTSTIGAYIQELPSMSFRLSPLDEGGNQWIQSWTIFYWAWWIAWSPFVGTFIARVSRGRTIREFVIGVLLVPTVIGALWFSVFGGTGIHMELFGDAHIFEKVKEMGTEVGLFAMFDQMGSFGSALSVLAILLISTFFITSADSATFVLGMLTTHGSLNPPNRIKMIWGIVLAALASILLYVGGLEALQTAAIIAAFPFVFVIFFMMAALFKELQKEGRMKRHK

SEQ ID NO: 27938 - protein, 401 aa, Bacillus thuringiensis serovar konkukian str. 97-27
MDKKKVVLAYSGGLDTSVAIKWLQEKNYDIIALCLDLGEGKDLAFVKEKALSVGAIKSYMIDVQEEFANEYALMAMQAHTLYEGKYPLVSALSRPLIAKKLVEIAEQEGATAVAHGCTGKGNDQVRFEVSIQALNPYLEVIAPVREWKWSREEEIAYAKENNVPIPINLDSPFSIDQNLWGRSNECGILEDPWAAPPEDAYEMTLALEDTPNKPEFVEIGFEAGVPTTLNGTAYPLSELIKTLNALAGKHGVGRIDHVENRLVGIKSREVYECPAAMTLITAHKELEDLTLVKEVAHFKPMIEQKITELIYNGLWFSPLKQALHAFLQETQKNVTGMVRVKLFKGHAIVEGRKSEYSLYDEKLATYTAQDEFNHDAAVGFISLFGLPTKVYSQVNQKKVEA

SEQ ID NO: 27939 - protein, 397 aa, Bacillus thuringiensis serovar konkukian str. 97-27
MSKIIAINAGSSSLKFQLFEMPSETVLTKGLVERIGLEDSIFTITVDGEKQKEITNIPDHAVAVNMLLKKLTENGIVKSLDEIGGIGHRVVHGGEKFADSVLITDEVLADIEELSDLAPLHNPANVVGIKAFQEVLPNVPAVAVFDTAFHQTMPESAFLYSLPYEYYEKFGIRKYGFHGTSHKYVTERAAELLGRPLESLSLLSCHLGNGASIAAVEGGKSIDTSMGFTPLAGVTMGTRSGNIDPALIPYIMEKTGQTVEEVVSVLNKKSGMLGLTGYSSDLRDIIAKEEEGDHRAKVALDVFVSRIHKYIGSYTARMKGVDAIIFTAGVGENSAIIRERVLEGLEYMGVYFDAKRNNVFGEEAFINFPHSPVKIIVIPTDEEVMIARDVLRLGNID

SEQ ID NO: 27940 - protein, 381 aa, Bacillus thuringiensis serovar konkukian str. 97-27
MERIYLDHAATSPTHPEVVEKMIPYMTETFGNPSSIHFYGRQTRHAVDEARRACARSIHANPNEIIFTSGGTEADNLALIGVARANRHKGNHIITTQIEHHAILHTCELLEREGFEVTYLPVDETGRVQVSDIQKALTEETILVSVMFGNNEVGTMQPIAEIGKLLKEHQAYFHTDAVQAYGLVEINVKEFGIDLLSISAHKINGPKGVGFLYAGTNVKFEPLLIGGEQERKRRAGTENVPSIVGLQHAILLAEKTREQKNAQYEEFKDIMVSVFQNEGITFEVNGNLEYRLPHVLNISFTGMNIEPFLVNLDLAGIAVSSGSACTAGSIDPSHVLVAMFGKDSDQIRSSVRFSFGLGNTKEQIEKAAYETVKIVKRLTQN

SEQ ID NO: 27941 - protein, 428 aa, Bacillus thuringiensis serovar konkukian str. 97-27
MFVDQVKIYVKGGDGGNGMVAYRREKYVPKGGPAGGDGGKGADVVFIVEEGLRTLMDFRYQRHFKADRGQHGMSKGQHGRKSEDLLVKVPPGTVVKDEKTGQILADLVTHGQTAVIAKGGRGGRGNSRFATATNPAPEIAENGEPGQERDVILELKVLADVGLVGFPSVGKSTLLSVVSSARPKIAEYHFTTIVPNLGVVETGDNRSFVMADLPGLIEGAHAGVGLGHQFLRHIERTRVIVHVIDMSGLEGRDPYEDYVTINNELKEYNLRLTERPQVVVANKMDMPDAEENLQAFKEKVGDEVKIFPISAVTKQGVRDLLFEVANLIETTPEFPIHEVVDESDTSVMYKFETEGVKFDITRESDGTFVISGYDIEKTFKMTDFSRDESVRRFARQMRGMGIDEALRARGAKDGDIVKILEYEFEFID

SEQ ID NO: 27942 - protein, 323 aa, Bacillus thuringiensis serovar konkukian str. 97-27
MSNLFTTVKEKVQGKGISIVLPEGTDERILGAAERLAKEELVKPILVGNKEEISAKAASMNLTLAGVDIYDPATYEEMDAMVASFVERRKGKATEEDARKILKEENYFGTMLVYMGKAHGLVSGAAHSTADTVRPALQIIKTKPGVTKTSGVFIMVREEEKYVFADCAINIAPNSQDLAEIGIESAKTAELFGIDPRVAMLSFSTKGSAKSPETEKVVEATRIAKEMAPELTLDGEFQFDAAFVPSVAEKKAPGSTIKGDANVFVFPSLEAGNIGYKIAQRLGNFEAVGPILQGLNMPVNDLSRGCNEEEVYKLALITAAQAL

SEQ ID NO: 27943 - protein, 402 aa, Bacillus thuringiensis serovar konkukian str. 97-27
MLSEKTIEIVKSTVPLLQEKGVEITTRFYEILFSEHPELLNIFNHTNQKKGRQQQALANAVYAAATYIDNLEAIIPVVKQIGHKHRSLGIKAEHYPIVGTCLLRAIKEVAGAPDEVLNAWGEAYGVIADAFISIEAEMYEEAAHKEGGWKDFRNFVVVKKVKESDVITSFYLKPEDGGKVSSFIPGQYVTVQINIEGETYTHNRQYSLSDAPGKEYYRISVKKEKGVDTPDGKVSNYLHDHVKEGDMLPVSAPAGDFVLNMDSTLPVVLISGGVGITPMMSMLNTLIEQDSKRNVCFVHAAINSNTHAMKEHVEAVDNEYEQVKAYTCYSAPTEKDLEMKNFDKEGFVEREWLQTIIPTTEAEFYFCGPVPFMKHINAVLTDLGVKQEHIHYEFFGPAASLQ

SEQ ID NO: 27944 - protein, 586 aa, Bacillus thuringiensis serovar konkukian str. 97-27
MQGIKRYLQFVKPYRWLIAITIMIGLVKFGIPLIMPWLLKYIIDDVIQGAGSLQDKTSQLVTAIGIAFFIFAVLRPPIEYYRQYFAQRIANTILYDLRKHIFGHLQKLSLRYYSNTKTGEIISRVIHDVEQTKDFVITGLMNVWLDTATIAIAIIVMFSMNIKLTFVALLILPIYVVAVKYFFGRLRKLTKERSQALATMQGYLHERIQGMQVTRSFALEEYEGKQFEKRNNEFLTKALTHTSWTARTFSAVNTLTDLGPLLVIGFAAYEVIQGQLTLGTMVAFVGYMDSLYSPLRRLVNSSTTLTQSFASMDRVFELLDEKYDIVNVPSAVQTKKLNGEVIFDNVSFRYNADEKEILHNLSLTMLPGEKVALVGASGGGKSSLASLIPRFYDVSSGAVYVDGIDVRKYDMRNLRSHIGIVLQDNLLFSDTIGANILYGNPKATEEEVIAAAKAAQIHDFIIELPDGYDTVVGERGVKLSGGQRQRVAIARVFLKNPSLLILDEATSALDLENERYIQEALQTLAADRTTIIIAHRLATITHVDTIIYIEDGEIKETGSHEELMKKRGYYYNLYQLQHITETAPLA

SEQ ID NO: 27945 - protein, 393 aa, Bacillus thuringiensis serovar konkukian str. 97-27
MSKTVILSAARTPVGKFGGSLKDVKATELGGIAIKAALERANVSASDVEEVIFGTVIQGGQGQIPSRQAARAAGIPWEVQTETVNKVCASGLRAVTLADQIIRTGDQSLIVAGGMESMSNSPYILRGARWGYRMGNNEVIDLNVADGLTCAFSGIHMGVYGGEVAKEDGISREAQDEWAYRSHQRAVSAHKEGRFEEEIVPVTIPQRKGDPIVVAKDEAPREDTTIEKLAKLKPVFDKTATVTAGNAPGLNDGGAALVLMSEERAKQEGRKPLATILAHTAIAVESKDFPRTPGYAINALLEKTGKTIEDIDLFEINEAFAAVAIASTEIAGIDPEKLNVNGGAVAMGHPIGASGARIIVTLIHALKQRGGGIGIASICSGGGQGDAVMIEVH

SEQ ID NO: 27946 - protein, 323 aa, Bacillus thuringiensis serovar konkukian str. 97-27
MAKILVAGKIPEIGLELLKDHDVEMYDKEELISLDELTERVKDKDALLSLLSTKVTKEVIDAAPSLKIVANYGAGYDNIDYTYAGEKGIAVTNTPKVSTEATAELTFALLLAAARRIPEGDTLCRTTGFNGWAPLFFLGREVHGKTIGIIGLGEIGKAVAKRAKAFGMNILYTGPNRKPEVESELEATYVTLEELLQTADFITINCAYNPKLHHMIDEEQFKMMKKTAYIVNASRGPIMHEAALAHALKTNEIEGAALDVFEFEPKITEELKGLKNVVLAPHVGNATFETRDAMAEMAVRNILAVLNGEEPVTPVNQKVFVTK

SEQ ID NO: 27947 - protein, 522 aa, Bacillus thuringiensis serovar konkukian str. 97-27
MSETLLVIISILLLLMLLLIVFFIITFFIKKRTHHSILKLHPYLGRMRYLLEKIGPEFRQYWFDHDIDGKPFSRYDFQSVMFLAKYRSEILGFGSKRDFEASGYYIANTLFPVLTEELSVNVTPEREGKKYVIHKEGLFSRREKLTADTTNLWLYEEDDAIIIGENRKYPWKLYGMFGASATSYGSIGENYILASGFGAKMAGGSWINTGEGGVIPEHLHTGANIVAQIGPGLFGYRDEDGNFSMEKFMGKAKESNIKAFELKFGQGAKIRGGHLEGQKVNEKIAFVRNVREGETINSPNRFSFLNNAAETLYFIQQLQENGGKPVGMKIVIGQQEPLENLFKTMKELNIYPDFITIDGSEGGSGATYKSMADSMGMPLIPALLTFIDTANHYDIRDKFKVFAAGKLITPDKVAIALAIGADAVNSARGFMMASGCIMALQCNSGQCPSGVATTNPHYQKALDPYEKKWRVMNYIVSMRYSLFSLAAAAGVKSPRHLKRDHIVFKDEMGRVVPLSELFPISK

SEQ ID NO: 27948 - protein, 546 aa, Staphylococcus aureus subsp. aureus MRSA252
MKQRIGAYLIDAIHRAGVDKIFGVPGDFNLAFLDDIISNPNVDWVGNTNELNASYAADGYARLNGLAALVTTFGVGELSAVNGIAGSYAERIPVIAITGAPTRAVEQAGKYVHHSLGEGTFDDYRKMFAHITVAQGYITPENAATEIPRLINTAIAERRPVHLHLPIDVAISEIEIPTPFEVTAAKDTDASTYIELLVSKLHQSKQPIIITGHEINSFHLHQELEDFVNQTQIPVAQLSLGKGAFNEENPYYMGIYDGKIAEDKIRDYVDNSDLILNIGAKLTDSATAGFSYQFNIDDVVMLNHHNIKIDDVTNDEISLSSLLQQLTDISYTNNASFPAYHRPTSPDYTVGTEPLTQQTYFKMMQNFLKPNDVIIADQGTSFFGDYDLALYKSNTFIGQPLWGSIGYTLPATLGSQLADKDRRNLLLIGDGSLQLTVQAISTMIRQHIKPVLFVINNDGYTVERLIHGMYEPYNEIHMWDYKALPAVFGGKNVEIHDVESSKDLQEVFNTINGHPDVMHFVEVKMSVEDAPKKLIDIAKAFSQQNK

SEQ ID NO: 27949 - protein, 394 aa, Staphylococcus aureus subsp. aureus MRSA252
MQEAYIVAYGRSAAAKAKQGALFHERPDDVAAKVLQGVLKRIDGKFNKNMIEDVIVGTAFPEGLQGQNIARTIALRTGLSDTVPGQTVNRYCSSGLQTIAIAANQIMAGQGDILVAGGVELMSAVPMGGNEPTNNPTLQYDDIGASYPMGLTAENVASQFDVSREDQDAYAVRSHQRAYDAQRDGRFKDEIIPIQVNSVEYTNVGPKVHTNIFDQDEFIRPDTTMEALAKLRTVFKADGTVTAGTSAPLSDGAGFVVLMSGDKVKELGVTPIARFVGYKAVGVDPKIMGIGPAYAIPEVLSLSNLSVEDIDLIELNEAFASQTIASIKEVGLDISRTNVNGGAIALGHPLGATGAMLTARLLNEMGRRPDSRYGMVTMCIGVGMGAAAIFEYVR

SEQ ID NO: 27950 - protein, 381 aa, Staphylococcus aureus subsp. aureus MRSA252
MLTEQEKDIIKQTVPLLKEKGTEITSIFYPKMFKAHPELLNMFNQTNQKRGMQSSALAQAVMAAAVNIDNLSVIKPVIMPVAYKHCALQVYAEHYPIVGENLLKAIQDVTGLEENDPVIQAWAKAYGVIADVFIQIEKEIYDQMMWIGFKPFKITNIKQESEDIKSFTVETDAYDFSQYVPGQYITVDVSSDKLPYRAKRHYSIVSGDKNHLTFGVKRDVTTEHEGEVSTILHDEIKEGDMINLAAPVGGFVLENTTEPQLFLGSGIGVTPLVAMYEAASAKGLDTQMVQVAENEQHLPFKDNFNSIANHYDNAKLYTHLKGEQGYIGAEELKAFLANKPEIYICGGTKFLQSMIEALKSLNYDMDRVHYETFIPRLSVVV

SEQ ID NO: 27951 - protein, 393 aa, Staphylococcus aureus subsp. aureus MRSA252
MTRVVLAAAYRTPIGVFGGAFKDVPAYDLGATLIEHIIKETGLNPSEINEVIIGNVLQAGQGQNPARIAAMKGGLPETVPAFTVNKVCGSGLKSIQLAYQSIVTGENDIVLAGGMENMSQSPMLVNNSRFGFKMGHQSMVDSMVYDGLTDVFNQYHMGITAENLVEQYGISREEQDTFAVNSQQKAVRAQQNGEFDSEIVPVSIPQRKGEPIVVTKDEGVRENVSVEKLSRLRPAFKKDGTVTAGNASGINDGAAMMLVMSEDKAKELNIEPLAVLDGFGSHGVDPAIMGIAPVDAVEKALKRSKKELSDIDVFELNEAFAAQSLAVDRELKLPPEKVNVKGGAIALGHPIGASGARVLVTLLHQLNDEVETGLTSLCIGGGQAIAAVVSKYK

SEQ ID NO: 27952 - protein, 1499 aa, Staphylococcus aureus subsp. aureus MRSA252
MHNEKLIKGLYDYREEHDACGIGFYANMDNKRSHDIIDKSLEMLRRLDHRGGVGADGITGDGAGIMTEIPFAFFKQHVTDFDIPGEGEYAVGLFFSKERILGSEHEVVFKKYFEGEGLSILGYRNVPVNKDAIAKHVADTMPVIQQVFIDIRDIEDVEKHLFLARKQLEFYSTQCDLELYFTSLSRKTIVYKGWLRSDQIKKFYTDLSDDLYQSKLGLVHSRFSTNTFPSWKRAHPNRMLMHNGEINTIKGNVNWMRARQHKLIETLFGEDQHKVFQIVDEDGSDSAIVDNALEFLSLAMEPEKAAMLLIPEPWLYNEANDANVRAFYEFYSYLMEPWDGPTMISFCNGDKLGALTDRNGLRPGRYTITKDNFIVFSSEVGVVDVPESNVAFKGQLNPGKLLLVDFKQNKVIENNDLKGAIAGELPYKAWIDNHKVDFDFENIQYQDSQWKDETLFKLQRQFAYTKEEIHKYIQELVEGKKDPIGAMGYDAPIAVLNERPESLFNYFKQLFAQVTNPPIDAYREKIVTSELSYLGGEGNLLAPDETVLDRIQLKRPVLNESHLAAIDQEHFKLTYLSTVYEGNLEDALEVLGREAVDAVKQGAQILVLDDSGLVDGNGFAMPMLLAISHVHQLLIKADLRMSTSLVAKSGETREVHHVACLLAYGANAIVPYLAQRTVEQLTLTEGLQGTVVDNVKTYTDVLSEGVIKVMAKMGISTVQSYQGAQIFEAIGLSHDVIDRYFTGTQSKLSGISIDQIDAENKERQQSDDNYLASGSTFQWRQQGQHHAFNPESIFLLQHACKENDYAQFKAYSEAVNKNRTDHIRHLLEFKACTPIDIDQVEPVSDIVKRFNTGAMSYGSISAEAHETLAQAMNQLGGKSNSGEGGEDAKRYEVQVDGSNKVSAIKQVASGRFGVTSDYLQHAKEIQIKVAQGAKPGEGGQLPGTKVYPWIAKTRGSTPGIGLISPPPHHDIYSIEDLAQLIHDLKNANKDADIAVKLVSKTGVGTIASGVAKAFADKIVISGYDGGTGASPKTSIQHAGVPWEIGLAETHQTLKLNDLRSRVKLETDGKLLTGKDVAYACALGAEEFGFATAPLVVLGCIMMRVCHKDTCPVGVATQNKDLRALYRGKAHHVVNFMHFIAQELREILASLGLKRVEDLVGRTDLLQRSSTLKANSKAASIDVEKLLCPFDGPNTKEIQQNHNLEHGFDLTNLYEVTKPYIAEGRRYTGSFTVNNEQRDVGVITGSEISKQYGEAGLPENTINVYTNGHAGQSLAAYAPKGLMIHHTGDANDYVGKGLSGGTVIVKAPFEERQNEIIAGNVSFYGATGGKAFINGSAGERFCIRNSGVDVVVEGIGDHGLEYMTGGHVINLGDVGKNFGQGMSGGIAYVIPSDVEAFVENNQLDTLSFTKIKHQEEKAFIKQMLEEHVSHTNSTRAIHVLKHFDRIEDVVVKVIPKDYQLMMQKIHLHKSLHDNEDEAMLAAFYDDSKTIDAKHKPAVVY

SEQ ID NO: 27953 - protein, 445 aa, Staphylococcus aureus subsp. aureus MRSA252
MKQPILNKLESLNQEEAISLHVPGHKNMTIGHLSQLSMTMDKTEIPGLDDLHHPEEVILKSMKQVEKHSDYDGYFLVNGTTSGILSVIQSFSQKKGDILMARNVHKSVLHALDISQQEGHFIETHQSPLTNHYNKVNLSRLNNDGHKLVVLTYPNYYGETFNVEEVIKSLHQLNIPVLIDEAHGAHFGLQGFPDSTLNYQADYVVQSFHKTLPALTMGSVLYIHKNAPYRENIIEYLSYFQTSSPSYLIMASLESAAQFYKTYDSTLFFAKRAQLIECLENKGFEMLQVDDPLKLLIKYEGFTGHDIQNWFMNAHIYLELADDYQALAILPLWHHDDTYLFDSLLRKIEDMILPKKSVSKVKQTQLLTTEGNYKPKRFEYVTWCDLKKAKGKVLARHIVPYPPGIPIIFKGETITENMIELVNEYLETGMIVEGIKNNKILVEDE

SEQ ID NO: 27954 - protein, 494 aa, Staphylococcus aureus subsp. aureus MRSA252
MEKKNKQIDRGDLKQNLSEKFVWAIAYGSCIGWGAFILPGDWIKQSGPIAASIGIVIGALLMILIAVSYGALVERFPVSGGAFAFSFLSFGRYVSFFSSWFLTFGYVCVVALNATAFSLLVKFLLPDVLNNGKLYTIAGWDVYITEIIIATVLLLVFMLVTIRGASVSGSLQYYFCVAMVIVVLLMFFGSFFGNNFALENLQPLAEPSKGWLVSIVVIVSVAPWAYVGFDNIPQTAEEFNFAPNKTFKLIVYSLLAASLTYVVMILYTGWLLTSHQSLNGQLWLTGAVTQTAFGYIGLGVLAIAIMMGIFTGLNGFLMSSSRLLFSMGRSGIMPTMFSKLHSKYKTPYVAIIFLVSVSLIAPWLGRTALTWIVDMSSTGVSIAYFITCLSAAKLFSYNKQSNTYAPVYKTFAIIGSFVSFIFLALLLVPGSPAALTAPSYIALLGWLIIGLIFFVIRYPKLKNMDNDELSRLILNRSENEVDDMIEEPEKEKTK

SEQ ID NO: 27955 - protein, 328 aa, Staphylococcus aureus subsp. aureus MRSA252
MADLLNVLKDKLSGKNVKIVLPEGEDERVLTAATQLQATDYVTPIVLGDETKVQSLAQKLNLDISNIELINPATSELKAELVQSFVERRKGKTTEEQAQELLNNVNYFGTMLVYAGKADGLVSGAAHSTGDTVRPALQIIKTKPGVSRTSGIFFMIKGDEQYIFGDCAINPELDSQGLAEIAVESAKSALSFGMDPKVAMLSFSTKGSAKSDDVTKVQEAVKLAQQKAEEEKLEAIIDGEFQFDAAIVPGVAEKKAPGAKLQGDANVFVFPSLEAGNIGYKIAQRLGGYDAVGPVLQGLNSPVNDLSRGCSIEDVYNLSFITAAQALQ

SEQ ID NO: 27956 - protein, 319 aa, Staphylococcus aureus subsp. aureus MRSA252
MVKIVVSRKIPDKFYQQLSKLGDVVMWQKSLVPMPKDQFVTALRDADACFITLSEQIDAEILAQSPNLKVIANMAVGYDNIDVESATANNVVVTNTPNVLTETTAELGFTLMLATARRIVEAEKYVEADAWQSWGPYLLSGKDVFNSTVGIYGMGDIGKAFARRLQGFNTKILYHNRSRHKDAEADFNATYVSFETLLAESDFIICTAPLTKETHHKFNAEAFEQMKNDAIFINIGRGQIVDETALIDALDNKEILACGLDVLANEPIDHTHPLMGRDNVLITPHIGSASVTTRDNMIQLCINNIEAVMTNQVPHNPVN

SEQ ID NO: 27957 - protein, 401 aa, Staphylococcus aureus subsp. aureus MRSA252
MKEKIVLAYSGGLDTSVAVQWLIDKGYDVVACCLDVGEGKDLDIVYKKALDMRAVECHIIDATKEFSDEYVSYAIKGNLMYENAYPLVSALSRPLIAKKLVEIAEKTNSVGIAHGCTGKGNDQVRFEVAIKALNPSLKAFAPVREWAWSREEEIDYAIKHNIPVSINHDSPYSIDQNLWGRANECGILEDPYAAPPEDAFDLTNALEETPDTADEIILTFDKGIPVQIDGKTYELDDLILTLNALAGKHGIGRIDHVENRLVGIKSREIYEAPAAEVILKAHKALETITLTKDVAHFKPIIEKQFAEQLYNGLWFSPLTDSLKLFIDSTQQYVSGDVRIKLFKGNAIVNGRKSPYTLYDEKLATYTKEDAFNQDAAVGFIDIYGLPTQVNAMLHGGYSNEQ

SEQ ID NO: 27958 - protein, 869 aa, Staphylococcus aureus subsp. aureus MRSA252
MDINKMTYAVQSALQQAVELSQQHKLQNIEIEAILSAALNESESLYKSILERANIEVDQLNKAYEDKLNTYASVEGDNIQYGQYISQQANQLITKAESYMKEYEDEYISMEHILRSAMDIDQTTKHYINNKVEVIKEIIKKVRGGNHVTSQNPEVNYEALAKYGRDLVEEVRQGKMDPVIGRDEEIRNTIRILSRKTKNNPVLIGEPGVGKTAIVEGLAQRIVKKDVPESLLDKTVFELDLSALVAGAKYRGEFEERLKAVLKEVKESDGRIILFIDEIHMLVGAGKTDGAMDAGNMLKPMLARGELHCIGATTLNEYREYIEKDSALERRFQKVAVSEPDVEDTISILRGLKERYEVYHGVRIQDRALVAAAELSDRYITDRFLPDKAIDLVDQACATIRTEMGSNPTELDQVNRRVMQLEIEESALKNESDNASKQRLQELQEELANEKEKQAALQSRVESEKEKIANLQEKRAQLDESRQALEDAQTNNNLEKAAELQYGTIPQLEKELRELEDNFQDEQGEDSDRMIREVVTDEEIGDIVSQWTGIPVSKLVETEREKLLHLSDILHKRVVGQDKAVDLVSDAVVRARAGIKDPNRPIGSFLFLGPTGVGKTELAKSLAASLFDSEKHMIRIDMSEYMEKHAVSRLIGAPPGYIGHDEGGQLTEAVRRNPYSVILLDEVEKAHTDVFNVLLQILDEGRLTDSKGRSVDFKNTIIIMTSNIGSQVLLENVKETGEITESTEKAVMTSLNAYFKPEILNRMDDIVLFKPLSIDDMSMIVDKILTQLNIRLLEQRISIEVSDDAKAWLGQEAYEPQYGARPLKRFVQRQIETPLARMMIKEGFPEGTTIKVNLNSDNNLTFNVEKIHE

SEQ ID NO: 27959 - protein, 384 aa, Staphylococcus aureus subsp. aureus MRSA252
MKLSLNSNSKFLRAPSIRQFSNRMNNLDDCVNLTIGQPDFPMPDVVKKAYIDAINNDKTSYSHNKGLLETREAISQYFKNRYHFSYDPEEIIVTNGASEAIDTTLRSIIEPGDEIIIPGPIYAGYIPLIEVLGGKPIYIDTTATQFKITPDALESHISPKTKAVLLNYPTNPTGVVLKRNEVLNIVNVLKKYPIFIISDEIYAENTFSGKHVSFAEFEDIRDQLILIGGLSKSHSATGIRIGFLLGPQYLIDKLTFMHAYNCICANVPAQIACITALNEGLEAPKYMNEAYVERRNYLVSELTKLGFEITAQPEGAFYIFPNIKHITDDDFEFCVDLLESTHLAIVPGSSFTEFGKGFVRISYAYEMDVLKEGMKRLAKYLNTK

SEQ ID NO: 27960 - protein, 464 aa, Staphylococcus aureus subsp. aureus MRSA252
MACTMKVSKFGGSSVSNATQIKKVLNIVNSDPERKIVIVSAPGKRHDNDIKTTDLLIRLYEKVINHLDYHDKKREIIQRYDDIVKELQMDESILRTIDVTLEHYINQLKNEPKRLLDALLSCGEDFNAQLIALYNNSQGIPTKYISPKEAGIFVTDVPQEAQILDSAYSEIKKLRDYDEKLIIPGFFGVSHEGYIVTFPRGGSDITGAIISSGVRATIYENFTDVSGIYKANPNIIKDPELIEEITYREMRELSYAGFSVFHDEALQPLYKDRIPVVIKNTNRPQDKGTFIVHDREINAKNVISGISCDKDFTVINIKKYLMNRQVGFTRKILGVLEDNNISFDHMPSGIDTISIVMRSKQIQNKETKVLNEIRQKCDVDELSIEHDLAILMIVGEGMNKVIGTANKITHALAESKINLKMINQGASEISMMFGIHVDDAEKAVLSTYEFCYHGVALKNLCDKN

SEQ ID NO: 27961 - protein, 548 aa, Staphylococcus aureus subsp. aureus MRSA252
MNSSSPENPNGKKYSPVFIYSAIVVAIVVLLGAFLPEQFNYVTNNIKMWITEKLGWYYLILTTIIVFFCIFLIFSPIGKLKLGKPNDKPEFNTISWFAMLFSAGMGIGLVFYGAAEPMAHFATPPTADPKTTEAYTEALRSTFFHWGFHAWAVYGVVALALAYSQFRKGEPGLLSRTLRPLLGDKVEGPIGIFIDVLSVFATIVGVAVSLGMGALQINGGLHYLFNVPNNTFVQAIIIIVVTILFIASAWSGLSKGIQYLSNLNIGLGTILMVAALIVGPTVLILNMLTSSTGSLLNTFLFNSFDTAALNPQKREWMSSWTLYYWGWWLSWSPFVGVFIARVSKGRSIREFISGVLLVPAIVSFVWFSVFGVLGIETGKKYKEIFDMTPETQLFGVFNHVPFGIVLSLIALLLIASFFITSADSATFVLGMQTTFGSLNPSRMVKVVWGISQALIAFVLLLAGGGNGAEALNAIQSAAIISAFPFSFVVILMMVSFYKDANQERKFLGLTLTPNKHRLQEYIKSQQEDYESDILEKRQSRRNIEKKDN

SEQ ID NO: 27962 - protein, 401 aa, Staphylococcus aureus subsp. aureus MRSA252
MVTRSVLKFGGSSVSDFTKIKRIAEMLKERVNQDEQLIVVVSAMGNTTDQLMTNVSTLTKTPKQQELALLLTTGEQQTVSYLSMVLNDIGVNAKAMTGYQAGIKTIGHHLKSKIAQINPQTFEQAFQENDILVVAGFQGINDHQELTTLGRGGSDTTAVALAVSNQIPCEIYTDVDGVYATDPRLLPKAKRLDIVSYEEMMEMSALGAGVLETRSVELAKNYNIPLYLGKTLSNVKGTWIMSNEEILERKAVTGVALDKHMMHVTISYPLPDNQLLTQLFTELEEGAVNVDMISQIVNLDGLQLSFTIKDSDFHQISMILKTLKNQYEALAYKINEHYVKISLIGSGMRDMSGVASKAFLTLIENNIPFYQTTTSEISISYVIDDFNGQQAVEKLYDAFNI

SEQ ID NO: 27963 - protein, 372 aa, Staphylococcus aureus subsp. aureus MRSA252
MLVAVVKELKQGEGRVACTPENVRKLTDAGHKVIVEKNAGIGSGFSNDMYEKEGAKIVTHEQAWEADLVIKVKEPHESEYQYFKKNQIIWGFLHLASSKEIVEKMQEVGVTAISGETIIKNGKAELLAPMSAIAGQRSAIMGAYYSEAQHGGQGTLVTGVHENVDIPGSTYVIFGGGVAATNAANVALGLNAKVIIIELNDDRIKYLEDMYAEKDVTVVKSTPENLAEQIKKADVFISTILIPGAKPPKLVTREMVKSMKKGSVLIDIAIDQGGTIETIRPTTISDPVYEEEGVIHYGVPNQPGAVPRTSTMALAQGNIDYILEICDKGLEQAIKDNEALSTGVNIYQGQVTNQGLATSHDLDYKEILNVIE

SEQ ID NO: 27964 - protein, 366 aa, Staphylococcus aureus subsp. aureus MRSA252
MSDILKCIGCGAPLQSEDKNKPGFVPEHNMFGDDVICRRCFRLKNYNEVQDVGLESEDFLKLLSGLADKKGIVVNVVDVFDFEGSFINAVKRIVGNKKIILAANKLDLLPKQINKRRVKEWLKRTARKYSLEADDVVLISAEKGWGIDDLLSSIANIRENEDVYIVGTTNVGKSTLINKLIEASVGEKDVVTTSRFPGTTLDMIDIPLDETSFMYDTPGIIQDHQMTHLVSEKELKIIMPKKEIKQRVYQLNEAQTLFFGGLARIDYVSGGKRPLICFFSNDLNIHRTKTEKANDLWRNQLGDLLTPPGNLQNFDLNEVKAVRLETGKEKRDVMISGLGFITIGPGAKVIVRVPKNVDVVLRNSIL

SEQ ID NO: 27965 - protein, 380 aa, Staphylococcus aureus subsp. aureus MRSA252
MEIYADYAATTPVKPEVVDAMMTIYNSHYGNPSSIHAKGRDARKYLDESRRQIAQLLGADTHEIIFTSGATESNNTAIKGIVKANEQLGNHIITSKIEHHSVLHVFEQLEREGFDVTYLDVDDTGAIDLDQLEETITDKTILVSIMFVNNEVGTVQQIYDIQDIIAETNAYFHVDAVQAIGHLDVKFDEFEIDAMSITAHKFGGPKGVGALLVKDHVTLDYPQLGGEQELKRRAGTENLAQIVGMAKALQLAEKNRDDNNIHLMNLKEQFLVKLQERAIPFELNGSMTDATGHIVNLYFPFVEVETMLTLLDMAQIYVSSGSACTAGSTQPSHVLDAMFEDEERSNHSIRFSFNELTTENEINAIVAEIHKIYFKFKEES

SEQ ID NO: 27966 - protein, 430 aa, Staphylococcus aureus subsp. aureus MRSA252
MFVDQVKISLKAGDGGNGITAYRREKYVPFGGPAGGDGGKGASVVFEVDEGLRTLLDFRYQRHFKASKGENGQSSNMHGKNAEDLVLKVPPGTIIKNVETDEVLADLVEDGQRAVVAKGGRGGRGNSRFATPRNPAPDFSEKGEPGEELDVSLELKLLADVGLVGFPSVGKSTLLSIVSKAKPKIGAYHFTTIKPNLGVVSTPDQRSFVMADLPGLIEGASDGVGLGHQFLRHVERTKVIVHMIDMSGSEGREPIEDYKVINQELAAYEQRLEDRPQIVVANKMDLPESQDNLILFKEEIGEDVPVIPVSTITRDNIDQLLYAIADKLEEYKDVDFTVEEEESVGINRVLYKHTPSQDKFTISRDDDGAYVVSGNAIERMFKMTDFNSDPAVRRFARQMRSMGIDDALRERGCKNGDIVRILGGEFEFVE

SEQ ID NO: 27967 - protein, 453 aa, Staphylococcus aureus subsp. aureus MRSA252
MAEKLQRELSNRHIQLIAIGGAIGTGLFLGAGQTIALTGPSILLTYIIIGFMLFMFMRGLGEIIIQNTEFKSFADVTNTYIGPFAGFVTGWTYWFCWIITGMAEVTAVAKYVSFWFPEIPNWISALFCVLLLMSFNLLSARLFGELEFWFSIIKIATIIGLIVVGFVMILFAYKTQFGHASFTNLYEHGVFPKGASGFFMSFQMALFSFVGIEMIGVTAGETKDPVKTIPKAINSVPIRILIFYVGALAVIMSIIPWQQVDPDNSPFVKLFALIGIPFAAGLINFVVLTAAASSCNSGIFSNSRMLFGLSSQQQAPPNFSKTNKYGVPHVAIFASSALLLVAALLNYIFPDATKVFTYVTTISTVLFLVVWGLIIIAYINYSRKTPDLHKKATYKLFGGKYMGYLIFVFFIFVFGLLFINVETRRAIYFIPIWFILLGFMYLRYKRIAAKSNN

SEQ ID NO: 27968 - protein, 372 aa, Staphylococcus aureus subsp. aureus MRSA252
MKIGIPREIKNNENRVGLSPSGVHALVESGHTVLVETNAGSGSFFEDVDYKEAGAEIVAEQAKVWDVDMVIKVKEPLESEYPYFKEGLVLFTYLHLANEEKLTQALIDRKVISIAYETVQLPDRSLPLLSPMSEVAGRMSAQVGAEFLQKLNGGMGILLGGVPGVPKGKVTIIGGGQAGTNAAKIALGLGADVTILDVNPKRLQQLDDLFGGRVHTIMSNPLNIELYVKQSDLVIGAVLIPGAKAPRLVTEDMIKQMKNGSVIIDIAIDQGGIFETTDKITTHDDPTYIKHGVVHYAVANMPGAVPRTSTLALNNATLPYALMLANKGYREAFKSNQPLSLGLNTYKGHVTNKGVAEAFEMEYKSVEEALHL

SEQ ID NO: 27969 - protein, 400 aa, Staphylococcus aureus subsp. aureus MRSA252
MSKLILAINAGSSSLKFQLIRMPEEELVTKGLVERIGLKDSIFTIEVDGEKVKTVQDIKDHVEAVDIMLDAFKKHNIINDINDIDGTGHRVVHGGEKFPESAAITDEVEKEIEELSELAPLHNPANLMGIRAFRKLLPNIPHVAIFDTAFHQTMPEKAYLYSLPYHYYKDYGIRKYGFHGTSHKFVSQRAAEMLDKPIEDLRIISCHIGNGASIAAIDGGKSIDTSMGFTPLAGVTMGTRSGNIDPALIPFIMEKTGKTAEQVLEILNKESGLLGLSGTSSDLRDLSEEAESGKARSQMALDVFASKIHKYIGSYAARMHGVDVIVFTAGIGENSVEIRAKVLEGLEFMGVYWDPKKNENLQRGKEGFINYPHSPVKVVVIPTDEESMIARDVMTYGGLK

SEQ ID NO: 27970 - protein, 379 aa, Staphylococcus aureus subsp. aureus MRSA252
MIYLDNAATTKAFEEVLDTYLKVNQSMYYNPNSPHKAGLQADQLLQQAKVQINDMVNTNMTYDVVFTSGATESNNIALKGVAYRKFDTAREIITSVLEHPSVLEVVRYLEEREGFKVKYVDVTKDGTIDLQHFNDLMSDKVGLVTCMYVNNVTGQIQPIPQMAEVIKNYPKAHFHVDAVQAFGKISMDFNNVDSISLSGHKFNGLKGQGVLLVNHIQNIEPIIQGGGQEYGVRSGTVNLPNDIAMVKAMKMANENLEALNAFVTELNNDVRQFLSQYQGVYINSSTSGSPFVLNISFPGVKGEVLVNAFSKYDIMISTTSACSSKRNKLNEVLAAMGLSDKSIEGSIRLSFGATTTKEDIARFKEIFIIIYEEIKELLK

SEQ ID NO: 27971 - protein, 534 aa, Staphylococcus aureus subsp. aureus MRSA252
MKQFNVLVADPISKDGIKALLDHEQFNVDIQTGLSEEALIKIIPSYHALIVRSQTTVTENIINAADSLKVIARAGVGVDNINIDAATLKGILVINAPDGNTISATEHSLAMLLSMARNIPQAHQSLTNKEWNRNAFKGTELYHKTLGVIGAGRIGLGVAKRAQSFGMKILAFDPYLTDEKAKSLSITKATVDEIAQHSDFVTLHTPLTPKTKGLINADFFAKAKPSLQIINVARGGIIDEKALIKALDEGQISRAAIDVFEHEPATDSPLVAHDKIIVTPHLGASTVEAQEKVAISVSNEIIEILIDGTVTHAVNAPKMDLSNIDDTVKSFINLSQTVGELAIQLMYNAPSSIKITYGGDLASIDSSLLTRTIITHILKDDLGPEVNIINALMLLNQQQVTLNIENNKAETGFSNYLEVELSNDSDSVKVGASVFTGFGPRIVRINNFSVDLKPNQYQIVSYHNDTPGMVGKTGALLGKYNINIASMTLGRTEAGGDALMILSVDQPVSNNIIDELKQVGEYNQIFTTELTVQS

SEQ ID NO: 27972 - protein, 512 aa, Staphylococcus aureus subsp. aureus MRSA252
MLTMGTALSQQVDANWQTYIMIAVYFLILIVIGFYGYKQATGNLSEYMLGGRSIGPYITALSAGASDMSGWMIMGLPGSVYSTGLSAMWITIGLTLGAYINYFVVAPRLRVYTELAGDAITLPDFFKNRLNDKNNVLKIISGLIIVVFFTLYTHSGFVSGGKLFESAFGLDYHFGLILVAFIVIFYTFFGGYLAVSITDFFQGVIMLIAMVMVPIVAMMNLNGWGTFHDVAAMKPTNLNLFKGLSFIGIISLFSWGLGYFGQPHIIVRFMSIKSHKMLPKARRLGISWMAVGLLGAVAVGLTGIAFVPAYHIKLEDPETLFIVMSQVLFHPLVGGFLLAAILAAIMSTISSQLLVTSSSLTEDFYKLVRGEEKAKTHQKEFVMVGRLSVLAVAIVAIAIAWNPNDTILNLVGNAWAGFGASFSPLVLFALYWKGLTRAGAVSGMVSGALVVIVWIAWIKPLAHINEIFGLYEIIPGFIVSVIVTYVVSKLTKKPGAFVETDLNKVRDIVREK

SEQ ID NO: 27973 - protein, 506 aa, Staphylococcus aureus subsp. aureus MRSA252
MQNFKELGISDNTVQSLESMGFKEPTPIQKDSIPYALQGIDILGQAQTGTGKTGAFGIPLIEKVVGKQGVQSLILAPTRELAMQVAEQLREFSRGQGVQVVTVFGGMPIERQIKALKKGPQIVVGTPGRVIDHLNRRTLKTDGIHTLILDEADEMMNMGFIDDMRFIMDKIPAVQRQTMLFSATMPKAIQALVQQFMKSPKIIKTMNNEMSDPQIEEFYTIVKELEKFDTFTNFLDVHQPELAIVFGRTKRRVDELTSALISKGYKAEGLHGDITQAKRLEVLKKFKNDQINILVATDVAARGLDISGVSHVYNFDIPQDTESYTHRIGRTGRAGKEGIAVTFVNPIEMDYIRQIEDANGRKMSALRPPHRKEVLQAREDDIKEKVENWMSKESESRLKRISTELLNEYNDVDLVAALLQELIEANDEVEVQLTFEKPLSRKGRNGKPSGSRNRNSKRGNPKFDSKSKRSKGYSSKKKSTKKFDRKEKSSGGSRPMKGRTFADHQK

SEQ ID NO: 27974 - protein, 290 aa, Staphylococcus aureus subsp. aureus MRSA252
MKKKTLLPLFLGIMVFLAGCDYSKPEKRSGFFYNTFVDPMKNVLDWLGNNLLNDNYGLAIIILVLVIRIILLPFMLSNYKNSHMMRQKMKVAKPEVEKIQEKVKRARTQEEKMAANQELMQVYKKYDMNPIKSMLGCLPMLIQLPIIMGLYFVLKDQLVDGLFKYPHFLWFDLGRPDIWITIIAGVLYFIQAYVSSKTMPDEQRQMGYMMMVISPIMIIWISLSSASALGLYWSVSAAFLVVQTHFANIYYEKVAKKEVQPFIEAYEREHNGGSNKKGKNTQVVSKKKKK

SEQ ID NO: 27975 - protein, 302 aa, Staphylococcus aureus subsp. aureus MRSA252
MTKKKGIDIIGVPSTFGQRKLGVDLGPTAIRYAGLIPRLKQLDLDVNDKGDIKVSAVDIEKFQSEQNGLRNYDEIIDVTQKLNKEVSASIENNRFPLVLGGDHSIAIGSVSAISKHYNNLGVIWYDAHGDLNIPEESPSGNIHGMPLRILTGEGPKELLELNSNVIKPENIVLIGMRDLDKGERQFIKDHNIKTFTMSDIDKLGIKEVIENTIEYLKSRNVDGVHLSLDVDALDPLETPGTGTRVLGGLTYRESHFALELLHQSQSVTSMDLVEVNPLIDHNNHTAEQSVSLVGTFFGETLL

SEQ ID NO: 27976 - protein, 520 aa, Staphylococcus aureus subsp. aureus MRSA252
MKNKSVSLVFWVSLVICTIFVAFGAIFPKQLEKLTQNITSFIALHFSWYYLLLVLVILFVCVYILFSRYASITLGEEGEDPEFSLPSWFAMLFSAGMGIGLVFWTTAEPISHAFKLTPIHKAGTQSAINDAMQFSFFHWGIHAWAVYGIVALVFAYFSFHKGYPGLVSATLTPLLGEKAMRGPLGGAIDVLAVIATVTGVAATLGFGALQINEGLHFLFNVPSNFTMQVILIVIATILFTWSAWSGIDKGIKTLSNINMLLAFVVLLGLFIVGPTLYILNTFTNGLGNYIANFFSMSLRIPSGGQKFQWLQNWTIFYWAWWISWAPFVGIFIARVSKGRTIKEFILGVLFVPALVCFIFFAVFGASAIYLQDNHIAEIAKAATETATFATLQHYPLGFVLSLITLLVIMIFFVTSADSATYVLGMLSSSGDINPKSFVKVSWGIIMALFAIIMIYTGGTQAIQNLLIIAALPFSVVIIAMIWSLLKSLSEEKPRNSNKVLIKHRDPDVLEYRSSKHIDEN

SEQ ID NO: 27977 - protein, 317 aa, Staphylococcus aureus subsp. aureus MRSA252
MEKVYVAGAIPEVGLKLLQEHFEVEMYEGKGLVDKDTLIKGVKDATALISLLSTNVDKDVIDAGKDLKIIANYGAGFNNIDIEYAREKSIDVTNTPKASTNATADLTIGLVLAVARRIVEGDQLSRTTGFDGWAPLFFRGREVSGKTIGIIGLGEIGSAVARRARAFDMDVLYTGPNRKEEKEREIGAKYVDLDTLLKNADFITINAAYNPKMHHLIDTEQFKMMKSTAYLINASRGPIVHEQALVQALKNNEIEGAALDVYEFEPDITDDLKSLNNVVLTPHIGNATFEARDMMSKIVANAAISAVQGEKPQFVVN

SEQ ID NO: 27978 - protein, 374 aa, Staphylococcus aureus subsp. aureus MRSA252
MKIAIIGAGIGGLTAAALLQEQGHTIKVFEKNESVKEIGAGIGIGDNVLKKLGNHDLAKGIKNAGQILSTMTVLDDKDRPLTTVKLKSNTLNVTLPRQTLIDIIKSYVKDDAIFTNHEVTHIDNETDKVTIHFAEQESEAFDLCIGADGIHSKVRQSVNADSKVLYQGYTCFRGLIDDIDLKHPDCAKEYWGRKGRVGIVPLLNNQAYWFITINSKENNHKYSSFGKPHLQAYFNHYPNEVREILDKQSETGILLHNIYDLKPLKSFVYGRTILLGDAAHATTPNMGQGAGQAMEDAIVLVNCFNAYDFEKALQRYDKIRVKHTAKVIKRSRKIGKIAQYRSRLVVAVRNRIMKMMPNALAAGQTKFLYKSKEK

SEQ ID NO: 27979 - protein, 459 aa, Staphylococcus aureus subsp. aureus MRSA252
MENNELQRGLSARQIQMIALGGTIGVGLFMGATSTIKWTGPSVILAYLIAGIFLFLIMRAMGEMIYLNPTTGSFATFASDYIHPAAGYMTAWSNIFQWIVVGMSEVIAVGEYMKFWFPELPTWIPGVIAILLLMAANLFSVKAFGEFEFWFALIKVVTIILMIIAGFGLIFFGFGNGGHAVGISNLWTNGGFMPNGIVGFFFALSIVIGSYQGVELIGITAGETKDPQKNIVKAVNGVIWRILIFYLGAIFVIVSVYPWNQLGDIGSPFVATFAKIGITFAAGLINFVVLTAAMSGCNSGIFSASRMIYTLAHKGEMPKIFTKIMRNGVPLYTVVAVSLGILIGALLNVILPLYIDGAKSIFVYVYSASILPGMIPWFMILFSHLRFRKLHPEEVEGHPFKMPGGAVSNYLTILFLILVLVGMVFNVETRISVLIGVIFLTIVTIYYFIRYNKNNVKAK

SEQ ID NO: 27980 - protein, 402 aa, Staphylococcus aureus subsp. aureus MRSA252
MIELNAITTLCLACILYLLGKAIVNHVNFLKRICIPAPVIGGLIFAILVAALDSFGMVKIKLDASFIQDFFMLAFFTTIGLGASLKLFKLGGKVLLLYFMFCAIISVIQNIVGVSLAKVLNIKPLLGLTAGSMSMEGGHGNAAAYGKTIQDLGIDSALTAALAAATLGLVFGGLIGGPVVKFLIKRYNLKPQHSDDTFKDYSQVAYNEHLHSKFNATEVFFIQFTIVVFCMAVGSYFSHLFTAQTGINVPIYVGSLFVAVIVRNISESFNFNIVDLKITNQIGDVALGIFLSLALMSIQLIEIYKLAIPLIIIVLVQVVVMILFAVLILFRGLGKDYDAAVMVGGFIGHGLGATPNAMANLDVITKKYGNSPKAYLVVPIVGAFLIDLIGVIVIMGFIQWFS

SEQ ID NO: 27981 - protein, 545 aa, Staphylococcus aureus subsp. aureus MRSA252
MIKDKQLHNEKINLSQLVLLGLGSLIGSGWLFGAWEASSIAGPAAIISWVLGFLVIGTIAYNYIEIGTMFPQSGGMSNYAQYTHGSLLGFIAAWANWVSLVTIIPIEAVSAVQYMSSWPWHWAKPMKHLMENGSISTYGLLAVYLIIVIFSLLNYWSVKLLTSFTSLISVFKLGVPMLTIIMLMLSGFDTSNYGHSASTFMPYGSAPIFAATTASGIIFSFNSFQTIINMGSEIKNPEKNIARGIAISLSISAVLYIILQSTFITSMPQSMLQHSGWNGINFNSPFADLAILLGINWLAILLYIEAFVSPFGTGVSFVAVTGRVLRAMEKNGHIPKFLGKMNEKYHIPRVAIIFNAIISMIMVTLFRDWGTLAAVISTATLVAYLTGPTTVIALRKMGPTMTRPFRAKILKVMAPLSFVLASLAIYWAMWPTTAEVILIIILGLPIYFFYEYRMNWRNTKKQIGGSLWIIVYLIVLSILSFIGSKEFKGLNMIHYPFDFIVIIIVALIFYYIGTTSSFESVYFRRATRINTKMRESLNNESKSSY

SEQ ID NO: 27982 - protein, 525 aa, Staphylococcus aureus subsp. aureus MRSA252
MTFLTVMQFIVNIIIIGFLLTVMVIGLIWLIKDKRQSQHSVLRNYPLLARIRYISEKMGPELRQYLFSGDNEGKPFSRNDYKNIVLAGKYNSRMTSFGTTKDYQDGFYIQNTMFPMQRNEISVDNTTLLSTFIYKIANERLFSREEYRVPTKIDPYYLSDDHAIKLGEHLKHPFILKRIVGQSGMSYGALGKNAITALSKGLAKAGTWMNTGEGGLSEYHLKGNGDIIFQIGPGLFGVRDKEGNFSEGLFKEVAQLTNVRAFELKLAQGAKTRGGHMEAEKVNEEIAKIRNVEPYKTINSPNRYEFIHNAEDLIRFVDQLQQLGQKPVGFKIVVSKVSEIETLVRTMVELDKYPSFITIDGGEGGTGATFQELQDGVGLPLFTALPIVSGMLEKYGIRDKVKLAASGKLVTPDKIAIALGLGADFVNIARGMMISVGCIMSQQCHMNTCPVGVATTDAKKEKALIVGEKQYRVTNYVTSLHEGLFNIAAAVGVSSPTEITADHIVYRKVDGELQTIHDYKLKLIS

SEQ ID NO: 27983 - protein, 127 aa, Staphylococcus aureus subsp. aureus MRSA252
MIRTMMNAKIHRARVTESNLNYVGSITIDSDILEAVDILPNEKVAIVNNNNGARFETYVIAGERGSGKICLNGAASRLVEVGDVVIIMTYAQLNEEEIKNHAPKVAVMNEDNVIIEMIHEKENTIVL

SEQ ID NO: 27984 - protein, 482 aa, Staphylococcus aureus subsp. aureus MRSA252
MGSFFNKIARKEDPAIYQNKDGHLKRTLRVRDFLALGVGTIVSTSIFTLPGIVAAEHAGPAVALSFLLAAIVAGLVAFTYAEMAAAMPFAGSAYSWVNVLFGEFFGWVAGWALLAEYFIAVAFVASGFSANLRGLVKPIGIELPAALSNPFGTNGGFIDIIAAIVILLTALLLSRGMSEAARMENILVILKVLAIILFVIVGLTAINVSNYVPFIPEHKVTATGDFGGWQGIYAGVSMIFLAYIGFDSIAANSAEALDPQKTMPRGILGSLSIAIVLFIAVALVLVGMFHYSQYANNAEPVGWALRQSGHGVVAAIVQAISVIGMFTALIGMMLAGSRLLYSFGRDGLLPSWLSHLNDKHLPNRALVILTIIGVLIGSMFPFAFLAQLISAGTLVAFMFVSLAMYRLRKREGKDLPIPAFKLPLYPVLPAVTFVLVLLVFWGLGFEAKLYTLIWFIVGIILYLSYGLRHSKKNDVAEYHPPK

SEQ ID NO: 27985 - protein, 75 aa, Staphylococcus aureus subsp. aureus MRSA252
MQKHTEVFYMNNGTVKWFNAEKGFGFIEQENGGDVFVHFSGIASDGYKTLEEGQKVTFEITEGQRGDQAVNVQTV

SEQ ID NO: 27986 - protein, 869 aa, Staphylococcus aureus subsp. aureus MSSA476
MDINKMTYAVQSALQQAVELSQQHKLQNIEIEAILSAALNESESLYKSILERANIEVDQLNKAYEDKLNTYASVEGDNIQYGQYISQQANQLITKAESYMKEYEDEYISMEHILRSAMDIDQTTKHYINNKVEVIKEIIKKVRGGNHVTSQNPEVNYEALAKYGRDLVEEVRQGKMDPVIGRDEEIRNTIRILSRKTKNNPVLIGEPGVGKTAIVEGLAQRIVKKDVPESLLDKTVFELDLSALVAGAKYRGEFEERLKAVLKEVKESDGRIILFIDEIHMLVGAGKTDGAMDAGNMLKPMLARGELHCIGATTLNEYREYIEKDSALERRFQKVAVSEPDVEDTISILRGLKERYEVYHGVRIQDRALVAAAELSDRYITDRFLPDKAIDLVDQACATIRTEMGSNPTELDQVNRRVMQLEIEESALKNESDNASKQRLQELQEELANEKEKQAALQSRVESEKEKIANLQEKRAQLDESRQALEDAQTNNNLEKAAELQYGTIPQLEKELRELEDNFQDEQGEDTDRMIREVVTDEEIGDIVSQWTGIPVSKLVETEREKLLHLSDILHKRVVGQDKAVDLVSDAVVRARAGIKDPNRPIGSFLFLGPTGVGKTELAKSLAASLFDSEKHMIRIDMSEYMEKHAVSRLIGAPPGYIGHDEGGQLTEAVRRNPYSVILLDEVEKAHTDVFNVLLQILDEGRLTDSKGRSVDFKNTIIIMTSNIGSQVLLENVKETGEITESTEKAVMTSLNAYFKPEILNRMDDIVLFKPLSIDDMSMIVDKILTQLNIRLLEQRISIEVSDDAKAWLGQEAYEPQYGARPLKRFVQRQIETPLARMMIKEGFPEGTTIKVNLNSDNNLTFNVEKIHE

SEQ ID NO: 27987 - protein, 75 aa, Staphylococcus aureus subsp. aureus MSSA476
MQKHMEVFYMNNGTVKWFNAEKGFGFIEQENGGDVFVHFSGIASDGYKTLEEGQKVTFEITEGQRGDQAVNVQTV

SEQ ID NO: 27988 - protein, 901 aa, Phycomyces blakesleeanus
MSGMNFTEKVEKTLATAQAQAREFSHTLLHPAHIACAMFDDVDGQSLFKSILEKAGADPSLVERGYKKQMVHLPAQDPPPPEISISPQTAKLLRNAEKHMKDQKDSYISIDHLILALADETTTFQPMKDAGVTKKALESAVQQVRGNKRVDSKNAEEVYESLSKYAIDLTEMAQTGKLDPVIGRDDEIRRVIRVLCRRTKNNPVLIGEPGVGKTAIAEGLARRIVERDVPESLQCKLFSLDMGALIAGAKYRGEFEERLKAVLKEVKESEEGIILFIDEIHTVLGAGKGEGSMDAANLLKPMLARGELRCIGATTLTEYKVIEKDPAFERRFQKVDVGEPSVAATISILRGLKERYESYHGVKITDSALVVAAQLSDRYITTRFLPDKAIDLIDEAGANTRVQLDSKPEEIDVLERKHFQLEIEAMALGKEKNNKDSQERLKVVKEEMAKIQEELKPLKLRYDMDKGRLDEIRDLKQKLDELKRKAVEARNRYDLDSAADIEYYAIPDVEQRINALSAEKQRKMAEQMANDTAGQASTTGQLVSEIVRPEQIMEVISRWTGIPVQNLAKSEREKLLHMEAEIGKKVVGQKRAIESVCDAIRLSKAGLQNPTKPLASFMFLGPTGVGKTLLCKTLAEFLFNDERAMIRIDMSELMEQHSVAKLIGAPPGYVGHEDGGLFEAVRRKPYAVVLLDELEKAHKDVANVLLQVLDEGFIHDSKGRKIDFRNTIIVMTSNLGAHLLAEQSAAGGDPDLIILKESILQIVRQHFSPEFTNRIDEIVIFNRLTETNITNIVDVRLEEVQERLADRKITLDVSKPAKELLGKEGYEPVFGARPLNRLIQQKVLNPLARLIIDGGVRPGEVAHVGLNESGKLEVLRNHEIQSDYEVEEPMEENNDSDEDMD

SEQ ID NO: 27989 - protein, 437 aa, Acinetobacter sp. ADP1
MECDVKPVRLAILGLGTVGGGALKLLQENAAEIKRRTGREIQITHVGTRRSRPDLELEGIQQSDDLMHIVRQPDVDVVVEVMGGIHPAYEVIMEAIKHGKQVVTANKALLAEHGNELFKAAEDNAVQVAYEAAVAGGIPIIKVIREGLAANRIEWLAGIINGTGNFILTEMRDKGRAFTDVLKEAQELGYAEADPTFDVEGIDAAHKLTILASCAFGIPLQFDKVYTEGISKITAQDVKYAEELGFRIKHLGIARRVENGIELRVHPTLIPEEELIANVNGVKNAVLVQAHAVGPTLYYGAGAGAGPTASAVVADIVDIVRDISYTEDGAGTIPQLAFEALTDVPILKREEMTTGYYLRVDAEDQTGVLADITTILSRAGISIDAIMQQSRLKDLIPIVILTDPVVESKMDEALAKIQALPAIHGEIVRIRLESLDS

SEQ ID NO: 27990 - protein, 118 aa, Citrullus lanatus
  misc_feature (58)..(58): Xaa can be any naturally occurring amino acid
  misc_feature (84)..(84): Xaa can be any naturally occurring amino acid
  misc_feature (89)..(89): Xaa can be any naturally occurring amino acid
  misc_feature (99)..(99): Xaa can be any naturally occurring amino acid
  unsure (1)..(118): unsure at all Xaa locations
DLTPRQVEVWFQNRRARTKLKQTEVDCEYLKRCCENLTEENRRLQKEVQELRALKLSXQLYMHMNPPTTLTMCPQCERVAVSSXSSASXATTTRHPAAXSVQRPSMAINPWAVLPIQR

SEQ ID NO: 27991 - protein, 338 aa, Solanum demissum
MGRSKCCDEEGLKKGPWTHEEDQKLLSFIDKYGCGSWRGLPAKAGLQRCGKSCRLRWINYLRPDIKRGKFSLQEERTIIHLHAFLGNRWSTIATYLPSRTDNEIKNYWNSRLKKRLMKMGIDPMTHKPNAAGSSKYVANLSHMAEWESARLEAEARLVRKSKILFNKNNNSHNYNINPTTISQQLPYHQQLPCLDILKAWQMTSTKLPTINDISHAILLNNSRNKNLESSIPSTLNSSENIFANNVPTTTKVADDHQNLHNLSTINSCFEDDQLQTELPSFMQEFSGVFPEYTQNSTNGLQVDNIMGSFYGDFEDNKLINWNNFPNYLVNSPIGSPVF

SEQ ID NO: 27992 - protein, 271 aa, Neisseria meningitidis
MASKPFLKWAGGKHKLVPFIEHNLGNPTRKCLIEPFSGSAALSLALDFEHYLLNDINADLIGLFRILKEEKSGFIDYARSFFISENNSDSRFYELREQFNFSKNLHERSALFIYLNRHAFNGLCRYNSKGEFNVPFGRYKSPYFPQQEREGFIQKSDRVELMCGDLRMILSQTDNTDTVYCDPPYAPLEGPTASFTTYAKESFNLDNQIRLAQSAQQIAPDSQGVLISNHDTEFTRDIYSFAILKTIEVQRNIAAKGSSRKKVGELLAIYA

SEQ ID NO: 27993 - protein, 321 aa, Pectobacterium atrosepticum SCRI1043
MMKPSVILYKKVADDLRARLDQHFTVTELDAFPALDHPALATAEGIIGSGGKVDKDFLQHAPRLRAASTISVGYDTFNVDALNEKGVILMHTPTVLTETVADTVLALMLASARRVVEVVERVKAGEWKGGVGSDWFGTDVHHKTIGILGMGRIGLAVAQRAHFGFSMPVLYNARRHHAEAEERFNARHCDLDTLLAESDFLCITLPLTAETHHLIGREQLAKMKPSAILINIGRGAVVDEDALTEALVKGTIQAAGLDVFVKEPLPVDSPLLDLPNVVALPHIGSATHETRYDMAACAVDNLIAALSGQVKENCVNPQVLK

SEQ ID NO: 27994 - protein, 1498 aa, Pectobacterium atrosepticum SCRI1043
MRVTQSLGRFTNMLYDASQERDNCGFGLIAHIEGEPSHKVVRTAIHALARMQHRGAILADGKTGDGCGLLLQKPDRFFRLVAEEHGWRLAKNYAVGMMFLNQDEELARATRRIVEEELQNETLSVLGWREVPTNPDVLGEIALSSMPRIEQIFVNAPAGWRQRDMERRLFMARRRIEKRIEDKEFYVCSFSNLVTIYKGLCMPADLPRFYLDLADLRLESAICLFHQRFSTNTVPRWPLAQPFRYLAHNGEINTIAGNRQWARARAYKFKTPLIPDLQDAAPFVNETGSDSSSLDNMLELFLSGGMDIIRAMRLLVPPAWQNNPDMDPELRSFFDFNSMHMEPWDGPAGIVMSDGRYAACNLDRNGLRPARYVITKDKLITCASEVGIWDYQPDEVVEKGRVGPGELMVIDTRSGRILHSAETDNDLKSRHPYKEWMEKNVKRLVPFEELPDEQVGSREFNDELLETYQKQYGYSSEELDQIIRVLGENGQEATGSMGDDTPFAVLSSRPRIIYDYFRQQFAQVTNPPIDPLREAHVMSLATSIGREMNVFCEAEGQAHRLSFKSPILLYSDFTQLTSQDELHYRADTLDLTFDPSQQTLQQTIEKLCDEAESKVRDGAVLLVLSDRGISESRLPVPAPMAVGAVQRRLVEKSLRCDANIIVETASARDPHHFAVLLGFGATAIYPYLAYETLARMVDNHTIDKPYRAVMLNYRNGINKGLYKIMSKMGISTIASYRCSKLFEAVGLHKDVSTQCFLGVVSRIGGANYSDFEQDLLNLSKRAWLKRKTLEQGGLLKFVHGGEYHAYNPDIVTTLQTAVKSGEYSDYEQYAKLVNERPVATLRDLLALRPQEGAAIAIDNVEPATEMFKRFDTAAMSIGALSPEAHESLAEAMNGLGGFSNSGEGGEDPARYGTNKVSRIKQVASGRFGVTPAYLVNADVIQIKVAQGAKPGEGGQLPGDKVTPYIARLRYSVPGVTLISPPPHHDIYSIEDLAQLIFDLKQVNPKAMISVKLVSEPGVGTIATGVAKAYADLITIAGYDGGTGASPLSSVKYAGCPWELGLVETQQALVSNGLRHKIRLQVDGGLKTGLDIVKAAILGAESFGFGTGPMVALGCKYLRICHLNNCATGVATQDEKLRRDHYHGLPERVTNYFHFIAHETRVLMAELGVSRLVDLIGRTDLLVELDGFSAKQNKLDLSPLLHAAQPQPGKALHCTESNLSFDKGLLNKELLAQAQPHIDAKQGKALYFDIRNTDRSVGATLSGAIAEKHGDQGLAGDPIKAHFSGTAGQSFGVWNAGGLELKLIGDANDYVGKGMAGGSISVRPPVGSAFRSHEASIIGNTCLYGATGGKLFAAGRAGERFAVRNSGCITVVEGIGDNGCEYMTGGIVCVLGRTGVNFGAGMTGGFAYVLDEDGEFRKRVNPELVEVLDVEELAIHEEHLRGLITEHVQNTGSHRGEEILANWPIWAPKFALVKPKSSDVKALLGHRSRSAAELRVQAQ

SEQ ID NO: 27995 - protein, 277 aa, Phyllostachys edulis
KWNYDGSSTGQAPGEDSEVILYPQAIFKDPFRRGNNILVMCDCYTPAGEPIPTNKRYNAAKIFSSPEVAAEEPWYGIEQEYTLLQKDTNWPLGWPIGGFPGPQGPYYCGIGAEKSFGRDIVDAHYKACLYAGINISGINGEVMPGQWEFQVGPSVGISSGDQVWVARYILERITEIAGVVVTFDPKPIPGDWNGAGAHTNYSTESMRKEGGYEVIKAAIEKLKLRHREHIAAYGEGNERRLTGRHETADINTFSWGVANRGASVRVGRETEQNGKGY

SEQ ID NO: 27996 - protein, 168 aa, Cucumis sativus
GSVRAKNTMNIMLTNVLDAAAGGLFYYLFGFAFAFGTPSNPFIGRHFFGLKSIPSTAADYSFFLYQWAFAIAAAGITSGSIAERTQFVAYLIYSSVLTGFVYPVVSHWFWSPDGWASPSRTDGDLLFGTGVIDFAGSGVVHMVGGIAGLWGALIEGPRIGRFDKTGRS

SEQ ID NO: 27997 - protein, 589 aa, Rosa roxburghii
MQRALTLKRTLHRIANSITKNPLSSGRAFCNAPSPSPAPSASSASASASEVRKYMGYTALVSFCGAATYYSFPFPENAKHKKAQIFRYAPLPEELHTVSNWSGTHEVQTRVFHQPETLEELEKVVKEANENKYRIRPVGSGLSPNGIGSSRAGMVNLALMDKVLEVDKEKKRVRVQAGIRVQQLVDGIKDQGLTLQNFASIREQQIGGIVQVGAHGTGARLPPIDEQVISMKLVTPAKGTIEVSKEKDPELFYLARCGLGGLGVVAEVTIQCVDRQELLEHTIVSNMEEIKKNHKKLLSENKHVKYLYIPYTDTVVVVTCNPVSKWKGPPKFKPKYTTDEAIQHVRDLYRECLKKYRVVPDNSVDINELSFTELRDKLLALNPLNKDHIVKVNQAEAEFWRKSEGYRVGWSDEILGFDCGGQQWVSETCFPAGTLAKPSMKDLEYIADLKQLIEKEEIPAPAPIEQRWTASTKGPMSPASSSREDDIFSWVGIIMYLPTTDARQRKDITEEFFHYRHLTQTRLWDTYSSYEHWAKIEVPKDREQLTALQARLRKRFPVDAYNKARTELDPNRILSNIKLEKLFPLSDTI

SEQ ID NO: 27998 - protein, 317 aa, Silene latifolia
MKRLGGSDSLGALISMCPASDERSPRSKHMYSGRDYESMYDGMDEDGSIDEGSHIPEKKRRLSVEQVKALEKYFEVENKLEPERKVKLAQELGLQPRQVAVWFQNRRARWKTKQLERDYGVLKSNFDTLKLNYDSLLHDKDSLLNQIKMLKSKLNEKTENKICVKEEAMMCDSENNGKDIESITPQPSLDEVSDDAKLQNTQKRGVTDLKDGPSESDSSAILNEDNNNSPNASNCSSDGGIIQNEQQQLLLMSPRSPSLGFNRFSFTESRSVSDNVYQAQYVKLEEHNFFSEEACNFFSDEAAPTLHWYTPDQWTDV

SEQ ID NO: 27999 - protein, 216 aa, Silene latifolia
MRGVASPNSTVSTVSGKRSLCERDSTSAGAADDLDLERASSRGLSDDEDGGDNSRKKLRLTKDQSAILEDSFKEHNTLNPKQKLALAKRLGLGPRQVEVWFQNRRARTKLKQTEVDCEFLKRCCEQLTEENRRLQKEVQELRTLKLSPQFYMQMTPPTTLTMCPSCERVAAPPSGPVQPKPHPSLESRSSIRPVANNPWVTAAVPIRSFDAIHPRS

SEQ ID NO: 28000 - protein, 892 aa, Arabidopsis thaliana
MAKAKQVRFISIDCGSPPNINYVDTDTGISYTWDAPFINAGVNLNVSEEYGYPKNPVLPFPLADVRSFPQGNRNCYTLTPSDGKGNLYLIRASFMYGNYDGKNALPEFDLYVNVNFWTSVKLRNASENVIKEILSFAESDTIYVCLVNKGKGTPFISALELRPMNSSIYGTEFGRNVSLVLYQRWDTGYLNGTGRYQKDTYDRIWSPYSPVSWNTTMTTGYIDIFQSGYRPPDEVIKTAASPKSDDEPLELSWTSSDPDTRFYAYLYFAELENLKRNESREIKIFWNGSPVSGAFNPSPEYSMTVSNSRAFTGKDHWISVQKTAESTRPPILNAIEIFSAQSLDEFYTRIDDVQAIESIKSTYKVNKIWTGDPCSPRLFPWEVLLMSLFLYFAARRNLSSSGLHGPIAFAFRNLSLLESLDLSNNNLKGIVPEFLADLKYLKSLNLKGNNLTGFIPRSLRKRATANGLALSVDEQNICHSRSCRDGNRIMVPIVVSTLVIILIAALAIICIMRRESKIMYSGAYSGPLLPSGKRRFTYSEVSSITNNFNKVIGKGGFGIVYLGSLEDGTEIAVKMINDSSFGKSKGSSSSSSSSQVSKEFQVEAELLLTVHHRNLASFVGYCDDGRSMALIYEYMANGNLQDYLSSENAEDLSWEKRLHIAIDSAQGLEYLHHGCRPPIVHRDVKTANILLNDNLEAKIADFGLSKVFPEDDLSHVVTAVMGTPGYVDPEYYNTFKLNEKSDVYSFGIVLLELITGKRSIMKTDDGEKMNVVHYVEPFLKMGDIDGVVDPRLHGDFSSNSAWKFVEVAMSCVRDRGTNRPNTNQIVSDLKQCLAAELAREPKSNHEKKEVVKEKYTKTKSTVQNYSSNEYNSSSGSVSLSFGDYSTFGPMAR

SEQ ID NO: 28001 - protein, 162 aa, Daucus carota
MDLRFMGIDHPLFDTLYHILDDDEHDTTDTGNTKRNKSRHERRYVRDAKAMATTAADVKEYPNAYLFVVDMPGLKSGDIKVQVEDGNVLVVNGERKREEEEGVKYLSMGRKVGRFLKKFVVPENANLENIKAVCQDGVLSVTVEKLPPPEPKKPKTIEVQIA

SEQ ID NO: 28002 - protein, 324 aa, Phaseolus vulgaris
MVLHSFSSSTTTFAIAFFTLFLIGSSSAQLSENFYAKKCPKVLYAVKSVVQSAVAKEPRMGASLLRLFFHDCFVNGCDGSVLLDGPSSEKTAPPNDKSLRGYEVIDAIKSKVEALCPGIVSCADIVAIAARDSVNILGGPFWKVKLGRRDSSTGFFQLASSGALPSPASSLDTLISSFKDQGLSAKDMVALSGAHTIGKARCAVYGSRIYNEKNIESLFAKARQKNCPRNSNGTPKDNNVAPLEFKTPNHFDNNYYKNLINKKGLLHSDQVLFDGGSTDSLVRAYSNDQRAFESDFVTAMIKMGNIKPLTGSNGQIRRLCGRPN

SEQ ID NO: 28003 - protein, 521 aa, Solanum lycopersicum x Solanum peruvianum
MVLNNINSILEALQANPILIFFFIIPLFFLYLFSTSRRKRYPPGPLGWPLIGNMMIMDQLTHRGLAKLAQKYGGVFHLKMGYVHKIVISGPEEARQVLQVQDNIYSNRPKTVAISYLTYDRADMAFADYGPFWRQMRKLCVMKLFSRKRAESWDSVRDEVDSMVKIVTTNAGTSINLGELVFCLTRNIIYRAAFGTSSDEGQDDFIKILQEFSKLFGAFNMADFIPWLGWIGKQGLNVRLAKARASLDGFIDTIIDDHIERKKAIHVINDDGYRESDMVDELLAFYSEETKVNESEDLQNAIRLTRDNIKAIIMDVMFGGTETVASAIEWAMAELMKSPEDLKKVQQELANVVGLNRKVDESDFENLTYLKCCLKETLRLHPPIPLLLHETAEESTVSGYYIPANSHVIINSFAIGRDKNSWEDPDSFKPSRFLKEGVADFKGGNFEFLPFGSGRRSCPGMQLGLYALEMAVAHLLHCFTWELPDGMKPSELNMDDMFGLTAPLANRLVAVPTPRLLCEIY

SEQ ID NO: 28004 - protein, 144 aa, Nostoc sp. PCC 7120
TDPLLERFSLDPGALTRSLVSCTGAQFCNFALIETKNRALEMIKGLEAELTFTRPVRIHWTGCPNSCGQPQVADIGLMGTKARKNGKAVEGVDIYMVGKVGKDAHLGSCVQKGIPCEDLHLVLRDLLITNFGAKPRQEALVTSQ

SEQ ID NO: 28005 - protein, 440 aa, Nostoc sp. PCC 7120
MTHVSRRKFLFTTGAAAAASILVHGCTSNGSQSATTGEQAPSAAPAANVSAANAPKVETTKAKLGFIPLTDAAPLIIAKEKGFFAKYGMTDIEVIKQKSCPVTRDNLKIGSSGGGIDGAHILSPMPYLMTINDKVPMYILARLNTNGQAISVAEKFKELNVNLESKSLKDAAIKAKADKKALKMGITFPGGTHDLWMRYWLAAGGINPDQDVVLEAVPPPQMVANMKVNTVDGFCVGEPWNAQLVNQKIGYSALVTGELWKDHPEKAFSMRQDWIEQNPNAAQAILMAILEAQQWCDKAENKEEMCKICSDRKYFNVAAADIIERAKGNIDYGDGRKEQNFAHRMKFWADNASYPYKSHDIWFLTEDIRWGYLPKDTKVQDIVNQVNKEDLWKKAAKAIGVADAEIPASSSRGVETFFDGVKFDPEKPEEYLNSLKIKKV

SEQ ID NO: 28006 - protein, 287 aa, Oryza sativa Indica Group
TTTTSSPGAGSSSPWAAALNSIVGDVRRDQAAAHAAAAVGVGVGGEEMYQGRASTSPDSAAALSSASGKRERELERSGSGVDDDDGADGAGGRKKLRLSKDQAAVLEECFKTHSTLNPKQKVALANRLGLRPRQVEVWFQNRRARTKLKQTEVDCEYLKRWCERLADENKRLEKELADLRALKAAPSPASASAMQPSSSAAATLTMCPSCRRVATAGAPHQPNHQQCHPKSNITISSSSTAAAAVAVAGGNVLPSHCQFFPAAAAAADRTSQSTWNAAAPLVTRELF

SEQ ID NO: 28007 - protein, 266 aa, Oryza sativa Indica Group
PLFVSSAETGSANSEMCTRGFDVNTRPADGGAEAGRPSSPSSMQEASTRQQVADQEAADDEDNGGGGARKKLRLSKEQSSFLEDSFKEHSTLTPKQKSDLANRLNLRPRQVEVWFQNRRARTKLKQTEVDCEHLKRCCERLTRENRRLQREVAELRGALRTTTSSYPPLYGLHHLPAAAGTVFRVCPSCEHSKVVAAAASESFSPRVFAGGGAPAAITAAAAVPSPGAGSPPSSSAALFGARRPHFGPFAAAVIPPVLRRQPSATS

SEQ ID NO: 28008 - protein, 582 aa, Phaseolus vulgaris
MSSFSVRFLAPPCCPTSRSKTLLCASPTAAPAASEAVEASRLEPRVEERDGFWVLKEEYRGGISPQEKVKLEKDPMKLFMEGGIEDLAKMSLEEIESSKHTKDDIDVRLKWLGLFHRRKHHYGRFMMRLKLPNGVTTSSQTRYLASVIRKYGKDGCADVTTRQNWQIRGVVLPDVPEILKGLAEVGLTSLQSGMDNVRNSVGNPLAGIDPDEIVDTRPYNNLLSQFITANSLGNPAMSNLPRKWNVCVVGSHDLFEHPHINDLAYMPANNKDGRFGFNLLVGGFFSAKRCAEAIPLDAWVSADDVIPVCKAVLEAYRDLGFRGNRQKTRMMWLIDELGIEVFRSEVEKRMAGKQLERAQEDLVKKQWERRDYLGVHPQKQEGLSYVGIHIPVGRIQADEMDELALLADEYGSGELRLTVEQNIIIPNVDNSKLEALLQEPLLKHKFSPEPSLLMKTLVACTGNQFCGQAIIETKARALKVTEEVERQVAVTRPVRMHWTGCPNTCGQVQVADIGFMGCMARDENGKATEGVDIFLGGRIGSDSHLAELYKKGVPCKNLVPVVADILVKHFGAVQRNREEVED

SEQ ID NO: 28009 - protein, 290 aa, Acinetobacter sp. ADP1
MRIGFIGLGAMGWHMAGHLTQLDATVMVWNRTQHKAEAHAMQFGSLAVELEQLVQADLIFSCLPTSAEVEAVIAAYPPRSGSVWIDCTSGVPASAQQLSRHLKQHGVDFLDAPVSGQTIGAEKGTLTVMIGGERTAFERAQPIIQAFAGLIEHVGDSGAGFAVKAVNNILMAANLWALSEGMSVLKAHAVHLDAALACINHSSGKSTMSETIMPQKILSRGFHKTFALNLLQKDIGIAIDLIKAVGQPADVLHCVQQMYSEMDLERATQVDFSAAIQTLEQRNQLLLDLA

SEQ ID NO: 28010 - protein, 572 aa, Acinetobacter sp. ADP1
MDLMTQQSVTASQLLNQLKKIVGPSYVLTDDQQTRQYRQGRRFGEGHVLAVVCPATLLEQWHVLQAAIAADCIVIMQAANTGLTGGSTPYGQDYDRPVLVMSTRRLKGIQVIHEGKQVVCLPGATLDHLEQLLKSYNREPHSVIGSSCIGASVLGGVCNNSGGALVRRGPAYTELALYAQVDQQGQLHLVNHLGIDLGQTPEEILTRLESQQYQASDILDDTRQASDRRYADDVTQVDADSPARFNADPSRLFEASGSAGKVCVFAVRLDTYEKVESDVFYVGSNDADDLTAIRRYLLTSLPSLPIAGEYIHRDAYQIGEKYGKDTFLFIEKFGTANVPKAFAMKDKIDGVLEKLKIKGLTDHLLQALTFCLPSHLPKRMTEFRDLYQHHLILRIEKNSKALTEQFLTEYFALHSTGAYFLCDQDEGRKAFLHRFAIAGAAIRYRDTHRNEVEDIVALDIALRRNDRQWVEQLPEEMEKKILHKLYYGHFFCHVFHQDYIIQKGVNPLEMEHEMWKLLDARRAEYPAEHNVGHLYIAKPALANFYQRLDPTNRFNVGIGHTSKLKYWGKSTQ

SEQ ID NO: 28011 - protein, 720 aa, Acinetobacter sp. ADP1
MNTILMIPTGEGVGLTSACLGLIYALDCNGIKAGFLKPFSQELPNQVDRTTSLFSHLFQGKTVTSISHEKVLQRLALGERDELLEEAVSIHRNVAANYDVIIVEGLLPNAQDHFATELNAALAQALDAKVVLVSTADVQNPRRTAEKIEAHLHHFGGVSSNRTAGVLFMRTRGLPEETAQIPLTIDPSLRLNTEIAAFSQELQRYNRNLGTTTLPIIGLVPFSNTLSVPRTLDIASIIEGDWIHQGEARHRRILHSSLIASSIEYELNKFVAGELIISASERTDVLLASSLATSNGIPLAGLVLTERKAPNPQILDFCQHAIKQGLPILHTQLNTLETAQRLADFGNEIPVDDTERAEQVTRFVSSHIDTAWLNSQINTGVQPRLSPSAFRHELVQKSIAAKKRIVLPEGDEPRTVQAAAICQSRGIAHCILLAKPEAVVEVAKARGIELPDDLEIIDPDLIRNQYITPMVELRNGKLNELQAKEQLQDTVVLGTMMLALDQVDGLVSGAIHTTANTVRPAFQLIKTAPDYSLVSSVFFMLLPDEVYVYGDCAINPDPDADQLAEIAIQSADSAKAFGINPRIAMISYSTGTSGAGADVEKVAKATEIAKQRRPDLLIDGPLQYDAASVESVGRQKAPDSQVAGRANVFIFPDLNTGNTTYKAVQRSANVVSVGPMLQGLNKPVNDLSRGALVDDIVFTIALTAIQAEQQLEAKAAALAS

SEQ ID NO: 28012 - protein, 401 aa, Acinetobacter sp. ADP1
MSTSVLVINCGSSSIKYALVSERREDRIYGLAENLGSADARIKGITVGGAPLELSIPYADHEKALETLLGRLANYKPQAIGHRVVHGGTSTKAELLTPEIIEKIREATPLAPLHNPAHLVGIDATMRLFPELPQVAVFDTAFHQTMPAHAYRYALPKFLYTEHNVRRYGFHGTSHAYVSERGSELAGSFKQGGWLTAHLGNGSSTCAIWNGESVDTSMGLTPLEGIVMGTRSGDVDPSIHSFLASNLGWDIFKIDKMLNKESGLLGLSDNLSNDMRTLIEASEQGNEDATLAIEVFCYRLAKSLAALSCALPRLDGLFFTGGIGENSAYIREKTMAYLPHFGFKLNIEQNNTLKRGTEGRIDQGTGPQIWVIPTDEEGRIAKETEQVVEHAKKSESMVSFT

SEQ ID NO: 28013 - protein, 204 aa, Acinetobacter sp. ADP1
MKGMIKQGLTQQLQQRLRFAKRTQPAEAAVLIAITDEHDPKVLLTRRSTQLTNHAGEVSFPGGKRDIGDTSNIVVALREAQEETALNPFDVELIGDLPMQRARNGMRVKPIVGLIPPHVDLKPQPTEIDRIFFASLTELIDAPPTPYKVQYIKQTLYFPSLQVEDEVVWGLTARMLISLFNYGLGYQKEWPFLLNPPSFYQRKF

SEQ ID NO: 28014 - protein, 391 aa, Acinetobacter sp. ADP1
MTEIVIVNGARTAMGGFQGALAPLTATDLGAVTIKEAIYRSGLQPTDIEEVIMGCVLPAGLKQGPARQAMRKAGLPDTTGAVTINKLCGSGMKAVMQAVDMIKAGSAEIVIAGGMESMSNAPYVLPKARSGYRMGHGEIKDHMFLDGLEDAETGRLMGSFAQDMANTRGYTREQMDDFAIRSLKRAQNAITEGYFKAEIVPVTVSSRKGDVIIEQDEQPLNAKIDKIPSLKPAFAKDGTITAANSSSISDGASALVLTSIENADQRGLKPLAKVIATASNSQHPSEFTIAPVGAIGKVLKKSGWNAQEVDLWEINEAFAMVTMCAIDDFELDAEKVNIHGGACALGHPVGSTGSRIILSLIHALQRTGGKKGIAALCIGGGEATAVAIELI

SEQ ID NO: 28015 - protein, 411 aa, Acinetobacter sp. ADP1
MEFTFNAFYTLIAAVIVLLLGRFLVNKIDFLRRYNIPEPVAGGLVAATVSFAVHSIWGYSIIFSSELQTSFMLIFFASIGLSAHFAKLKEGGVGLIIFLICVASFIVVQDIVGISLATLLGIDPLIGLIAGSITLTGGHGTAGAWGEILETQHGIQGALALGMASATFGLIIGGIIGGPLAKLLINRHQLANAKTRAQIKDRDTHVDTHPDDLAPFENPHQVRLITADNAITTLGMFAACLAFADFMTGYSKGTWFELPTFVWALGGGVILRNVLESIFRVDIFDRAIDVFGNASLSLYLAMALLSLKLWQLVDLAGPLVIILAAQTLTMALYAAFVTFKVMGKNYDAAVLAAGHCGFGMGATPTAVANMQAITNMYGPSHKAFLIVPLCGAFFVDLINATVIQVILKFFV

SEQ ID NO: 28016 - protein, 318 aa, Acinetobacter sp. ADP1
MINMDVIIHKIHQLTPSIRAFELISANGSDLPAFDAGSHIDVHLKNGLTRQYSLSNCCSEQHRYVIGVLHDENSRGGSRCIHQDYREGDHLNIGTPRNLFEIHSKTQKAVLFAGGIGITPILSMAYRLKHQQIPFELHYFVRSHEMIAFYGNLTEHFPEQIHFHIQNQSETQCEMSKVLEEVAPDRHLYVCGPAGFMQFVMDSAQQAGWSDEQLHQEHFVAPQIDQSQNEAFTIEVLGSDRKIEVSAHQTATQALLEHGFDVPVSCEQGICGTCITRVVSGTPDHRDVFMTDEEHALNDQFTPCCSRAKSKILVIDLA

SEQ ID NO: 28017 - protein, 526 aa, Acinetobacter sp. ADP1
MWSKRDEQKTYPPIRLNPFVFWSSAISISIFGMLFVLFPETSQHGLTWIQQQVNQLFGWYYMLVIILSLGFVAWLAFSQVGNIPLGKAQDKPEFGYLVWTSMLFSAGIGIALLYYGVAEPVDHFLRPPEGQGGTVEAAQNAMMYSFLHWGIHGWVLYALVGVTLGYFAFRRDLPLALRSALYPIFGERIHGLVGHMVDGFGILATIISLVTNLGIGALVMISGISYLFPDLPNTSSTLVVTVIMMMLVATLTTVIGIEKGLAWLSRINLRLLYLLLLFVFLTGPTNHLLNGLVQNTGDYLSHFVQKSFDLYLYDKNATGWLASWTIFYWAWWIAWAPFVGMFIARISKGRTIREVVLGVCLIPLGFTLAWISIFGNTAIDLILNHGQQIIGSLVIQDPALSLFKLLEYLPFHPYVAGIVVVICFVLFLTPVGSGTLMIANLSSQGGSSDSDSPIWLRVFWSIAITIVSIGLLLAGSFSAMQSAVVLCGLPFSVILLLYMFGLAKALKQETQQPVVESHTTETSGSD

SEQ ID NO: 28018 - protein, 686 aa, Acinetobacter sp. ADP1
MATDNPRAVDDQETHPKDRLNRVVFYVSALIILIFSLTTILFNDFANRALNQVLDWVSSTFSWYYLLAATLYMVFVIFIACSRYGNIKLGPKHSKPEFSLLSWSAMLFSAGIGIDLMFFSVAEPLSHYMHPPVGEGQTYEAARQGMVWTLFHYGLTGWCMYALIGMALGYFSYRYNLPLTIRSALYPIFGKKINGPIGHSVDTAAVIGTIFGIATTCGIGVVQLNYGLHVLFDLPENLWVQTALILVAVIITIISVTSGVNKGLRILSEVNIYVSVGLMLFILFLGNTEFLLNALVQNVGDYLSRFPSLALESFAFDQPKEWMNSWTLFFWAWWVAWSPFVGLFLARISRGRTIREFVSGTLIIPLLFTLTWLSIFGNSALHNVIFDGNIALAETVLSNPAHGFYDLLAQYPWFPFIAGVATITGLLFYVTSADSGALVLGNFTTQFTNIDHDAPRWLSVFWAVAIGLLTLAMLMTNGITALQNATIIMGLPFSFVMFLVMAGLYKSLRLEDYRQASASLNAAPVVGNVDILNWKKRLTRVMHHPGTFETKRMLNEICRPAVHAVAEELQKRAVQVDVLEVPLEEDEELYHLDITIHLEEEQNFIYQIWPVRYIAPNFSERGKRGKQFYYRLETYLYEGSQGNDLVGYTKEQVINDILDRYERHMTFLHINRISPGNRPLFPDPKA

SEQ ID NO: 28019 - protein, 463 aa, Acinetobacter sp. ADP1
MLDSAAPLKRAMSTRHLVMLSLGGAIGTGLFLGSGEVITQTGPIGAVIAYMLGGLIAYMVMLCLGELAVHMPVSGSFGAYAKKYIGPGTGYMISWVYWLTWTATLGTEFTAAALLMQEWFPHTSMWIWTIIFALTIFGLNLSSTHIFAESEFWLSLVKVLTVISFIILGLLAIFGIIHFEGHASAPLFSNLTSHGWFPQGLMPIFATMLIVNFAFSGTELIGVAAGETKDPSINVPKAINAAIWRLLIFFVGTIVVISALLPYDQTGLGGHNVSNSPFVTVFQYIGIPYADHIIRFVIITALLSAANSGLYAASRMMWSLSNQRQLPSVFSKLTASGTPIIALVVTMFGAIPGLLSEQFAPETIFKNLLGVAAFTMVIVWMSICLSQFNFRRHWYKQGYHAKDLKFAAPLFPILPILGFLFCLITGLSMAKDPEMLPGFIGCLIFVACCYLSHYIFYREKSKL

SEQ ID NO: 28020 - protein, 446 aa, Acinetobacter sp. ADP1
MTDNATILQHVPVGKKVGIAFSGGLDTSAALLWMKQKGAEPYAYTANLGQPDEDDYDAIPKKAEQYGAVKARLIDCRLQLALEGIAAIQCGAFHISTGGVPYFNTTPLGRAVTGTMLVTAMKEDDVNIWGDGSTYKGNDIERFYRYGLLTNPNLKIYKPWLDQTFIDELGGRAEMSQFLIDNGFDYKMSKEKAYSTDSNMLGATHEAKDLEYLDAGIKIVDPIMGVAFWKDEVEIQPEQVSITFEEGMPVALNGQRIEDPVEFILEANRIGGRHGLGMSDQIENRIIEAKSRGIYEAPGMALLHIAYERLVTGIHNEDTIEQYRINGLRLGRLLYQGRWFDSQSLMLRETAQRWVAKAITGTVTLELRRGNDYTIMNTESPNLTYEAERLTMEKGDSMFSPMDRIGQLTMRNLDITDTRAKLGIYTNSGLLSIGHGSAVPQLETKK

SEQ ID NO: 28021 - protein, 353 aa, Acinetobacter sp. ADP1
MQAIQKRTTRLRSLTKSVFEPHATDFWLQKINPIWSTHLALAKIVDKKQVANDTVSLTLQPNRHVNLGRAGQHHPVKVKIAGRIYERSYSLTERHGQLILTVKKVAEGKVSAWLVDHSQIGDIIELGQPFGEMQLQDQQRLVLLAAGSGITPMLSLVEALKHQQALNTTQVQLLYWVKHHEDAAYAQWFEALAKQFPLFQFQIFYTQDQEHDGRLNVTHLAAIDDLDQSTVYACGPSGFVAKAEELFAQAQVFMSEAFSLSTVSEDETGFVNVTLSKSNKTVAIPKGQSILAGLEQANVKLTYGCRMGICNKCACQKAQGSTRNLLNASENSEPNNLLKICVNSAKSDLVIDL

SEQ ID NO: 28022 - protein, 121 aa, Acinetobacter sp. ADP1
MRLVEDLSMTEQARDTEALIRDQIAKHAVLLYMKGTPQFPQCGFSARAVEALSQIGRPFAYVNILENPDIRATLPAIANWPTFPQLWVNGELIGGSDIMLEMFQNGELKPLVEQYSAAPDA

SEQ ID NO: 28023 - protein, 426 aa, Acinetobacter sp. ADP1
MALIVQKYGGTSMGTPERILNVARRVKRWHDHGHKVVVVVSAMSGETNRLLALAKAITDTPDPRELDQMVSTGEQVTISMLAMALNSIGVEAKSYTGRQVGIKTDSAYNKARIEAIDTDVMTKDLDAGRVLVVAGFQGVDEEGNTTTLGRGGSDTTGVALAAALKADECQIYTDVDGVYTTDPRVAPKAKKVDRISFEEMLEMASLGSKVLQIRSVEFAGKYQVPLRVLSSFDNDNDGAFDEEFKQNVGTLITTEAEDTMEQPIISGIAFNRDEAKLTILGVPDEPGIAAKILVPISAANIEVDMIVQNVEEDGTTDFTFTVNRGDLAKAKKILEETASNIGAREVSTRDDIVKVSIVGVGMRSHAGVASKMFMALAEESINILMISTSEIKVSVLIEENYLELAVRTLHTAFGLDREHGESSARA

SEQ ID NO: 28024 - protein, 494 aa, Acinetobacter sp. ADP1
MKNPVTFSQRLLRRKPINFLVQETQQGGKTLKRSLTLFQLTMFGVGATIGTGIFFVLSEQVPVAGPAVLISFILAGITAGLTALCYAELSSMIPASGSSYSYAYATLGEGVAFLVAACLILEYGVSAAAVAIGWSEYLNNLIHNVFGVHLPNWLLSAPFVADGYKLHLGGTGLINLPAAILVFLCCMLLMRGVTESARINAVMVLIKLCVLILFISIAATAFNAEHLTPFSPHGFAGISAAAGSIFFTFIGLDAVSTAGEEVENPRRNLPLAIISALFVVIIFYILVALTALGAQEQGLFKGQQAGLAVILQEITGSTWPAIILAAGAVISVFSITLVVLYGQTRILFAMSRDGLAPKIFHRVSTQTLTPNANTLIVAVIVSIIAGFVPADVLWDLTSMGTLIAFTVVSIGVLVLRYRMPDAPRGFKVPFFPALPVLSICACLYLISSLSAIVYVIAAIWAVIAATYYFSCASKNSVLEAGSEAYSHQNGDDHQ

SEQ ID NO: 28025 - protein, 319 aa, Acinetobacter sp. ADP1
MAKNLHQPLGGNEMPRFGGIASMMRLPVIETPEELAKLDAAFVGIPLDIGTSLRSGTRFGPRQIRAESVMIRPYNMATGAAPFDCINVADIGDIAINTFNLLHAVEIIEQEYDRILSYGIIPLTLGGDHTLTLPILRALKKKHGKVGLVHIDAHADVNDHMFGEKIAHGTTFRRAVEEDLLDCDRVVQIGLRAQGYSADDFNWSRRQGFRVVQAEECWHQSLAPLMAEVREKVGGGPVYLSFDIDGIDPAWAPGTGTPEIGGLTTIQALEIIRGCEGLDIIGGDLVEVSPPYDTTGNTSLLGANLLFEMLCILPNVMKK

SEQ ID NO: 28026 - protein, 70 aa, Acinetobacter sp. ADP1
MTAREQGVVKWFNDTKGFGFIQRNGGDDVFVHFRAIMGDGHRSLRDGQRVEFSVVQGQKGFQAENVQPLD

SEQ ID NO: 28027 - protein, 321 aa, Acinetobacter sp. ADP1
MKKKVVVFSQIDPRILEQLKQQYQVVVLDPKKGDINEQICQEVVDADGMIGAGRLLNENNLAPAQHLKIVSTVSVGYDNYDVQYLNQKKIWLAHTPHVLTETTADLAFTLLVSAARKVPQLDAWTKAGEWKRTVGAAQFGQDIFGKTLGIIGLGNIGAAIARRGLYGFNMNILYHNRHEKLVLAQPLNAEYCSMQDLLQRSDFIVVAVDLNTESQALIGTQEFEQMQSHAVFVNISRGSVVDESALIEALKQKQIFAAGLDVYQKEPLQASELFDLDNVVTLPHVGSATAETRLKMSQLAYKNLVDALEGKTPRYLVNPDF

SEQ ID NO: 28028 - protein, 405 aa, Acinetobacter sp. ADP1
MKRPIYLDYAATTPVLPEVAERMMECLTFEGTFGNPASRSHAYGWQAEEKVEYAREQVANLIKADPREIVWTSGATESDNLALKGIAQFYGSKGKHIITSKIEHKAVLDPCRELEEAGFEITYLEPEPRTGLITPEMVAAALRPDTILVSLMMVNNEIGTITDVAAIGELTRANKTFFHVDAAQAAGKVEIDLSTMKIDLMSFSAHKAYGPKGIGALYVRRTPRVRLKAQIHGGGHERGMRSGTLATHQIVGMGEAFEIAGKTLHSEQQRLRKLRDKLWNGLQGLEQVFLNGHPTQNVANYLNVSFNFVEGESLMMALKDAAVSSGSACTSATLEPSYVLRALGLSDELAHSSIRFSFGKYTTEEDIDHVLEVTKAAVEKLRELSPLWDMYKEGIDLSTVEWAEH

SEQ ID NO: 28029 - protein, 401 aa, Acinetobacter sp. ADP1
MKHAYIVDAIRTPFGRYAGGLAAVRADDLGAIPIAALIERNPSVNWAQVDDVIYGCANQAGEDNRNVGRMSALLAGLPVEVPATTVNRLCGSSLDAIAMAARAIKAGEAHLIIAGGVESMSRAPYVMGKSEGAFGRTQKIEDTTMGWRFINPKLKAMYGVDTMPQTAENVAEQFGIQREDQDQFAYTSQQRTAAAQAKGYFAKEIVPVTIPQRKGEPVVIATDEHPRASTTLEGLAKLKGVVKPEGSVTAGNASGINDGAAAVLIASDEAVAQYQLKARAKIIASTTVGIEPRIMGFAPAPAIKKLLKQANLTLDQMDVIELNEAFAAQALACTRDLGLADDDARVNPNGGAIALGHPLGASGARLVTTALNQLEQSGGKYALCSMCIGVGQGIALIIERV

SEQ ID NO: 28030 - protein, 474 aa, Acinetobacter sp. ADP1
MNTMKDSELSLDNGATRDVDYFAKRQLKKGAVGWLLLVGLGVSYVISGDFAGWNFGLAQGGWGGLFIATVIVALMYLCMSLSMSEMSTMLPTAGGGYSFARVAFGPLGGYLTGTAILIEYAIAPAAIAVFIGSYCESLFGIGGWSVYLLCYLVFMGIHLKGAGEALKIMFIITAIACVALLVFIVAMIPHFESGKLFDIAVSNNVGASAFLPLGYLGIWAAVPYAIWFFLAVEGVPLAAEEAKDPVRSLPRGLIGSMLILAAFALLILFLSAGAAGSDALKASGAPLVDALIAVYGQHTWLASFVNFVGLAGLVASFFSIIYAYSRQIFALSRAGYLPKSLSLTNKNKAPFLAIIIPGIIGFLMSLTHEGDLLILMAVFGATISYVLMMLSHIKLRISHPNLARPYKTPGGVVTSSIALVLAAIAVVAGLMVNPKVWLLTAMIYVAFILYFILYSRFHLVKGTPEEEFARVNED

SEQ ID NO: 28031 - protein, 325 aa, Acinetobacter sp. ADP1
MTHAIDFKKIALETISVEQHAIDVLVNQIDERFDQACEIILQCQGRVVVTGMGKSGHIGRKMAATFASTGTPSFFMHPGEAGHGDLGMLVRGDVLIAISNSGKSDEIMMLMPLIKHLEVPLITISRDDKGPMPQNADIALTLGDSNEACPLGLAPTSSTTATLVLGDALAVALLEARGFTADDFARSHPAGALGKRLLLHVKHLMHTQQELPKVSPDTPMNQVLYEISNKRLGLTTIVDENDHLLGIFTDGDLRRLIDKQQGFDVNLPVRQVMVEHPATISQEARAVEALQKLNEKKINQFVVVDDQNKVIGVISMHDLIQAGVS

SEQ ID NO: 28032 - protein, 387 aa, Acinetobacter sp. ADP1
MNVAYIVDAVRTAGGRRNGKLASWHPVDLGAEVINALLDRTGIDPNVIDDAVFGCVTQAGEQTFAFARNIVLASKLPIHVPGVTIDRQCGSSQQAVQFAAQAILSGMQDVVIAGGVESMSRAPMLSNASLHAKAGLPADPLSPRIKARFDVDQFSQFTGAEMMAKKYGFDREQLDQYALLSHQRAIQATETGNFENEIVVLDVDGEAHRIDEGIRFDANLESVSGLKPLVENGVVTAANASQICDGASAVLIVSERALKAYDLTPKARLIHMSVSAGDPVMMLEEPIFATQKALKKAGLKITDIDLYEVNEAFAPVPLAWLQALDANPEALNIHGGAIALGHPLGASGTKLMTTLIHALHTQGKRYGLQTMCEGGGMANVTILEACS

SEQ ID NO: 28033 - protein, 297 aa, Acinetobacter sp. ADP1
MNIAFIGLGNMGGKMVQNLLKTGATVYGFDLSQTAIAHFVEAGGIASDSPHDAAKNADIVITMLPAAKHVKEIYLAEDGVFTVLKQGSICIDSSTIDPQSIKDIAKIGAEKGIKVCDAPVSGGTIGAQAGTLTFMVGTDADLFEQVKSVLSSMGKNIVYCGEVGSGQIAKICNNLILGISMTAVAEGMALGAKLGIDPQILAGVINSSSGRCWSSEVCNPWPDVSANAPAGRGYSDGFATQLMLKDLGLAIEAAGQVKQPVLLAGLVQQQYQQLCMQGNAQLDFSSIIQQYLPQNSQ

SEQ ID NO: 28034 - protein, 393 aa, Acinetobacter sp. ADP1
MNNEVVILSAIRTPMGGFLGELKPFSATELGSFAIQEAVKQAGIESDQIDQVLMGCVLTAGQGQAPARQATLKAGLSVSVACTTLNKVCGSSLQSIIFAKNLLETQQAQVVIAGGMESMSNTPYLLQHARAGYRMGHGKVLDHMFLDGLEDAYQPGRLMGTFAEDSAQHYQLSREQQDHFAITSLQRARDAIETDQFKAEIVALTVHHKDQQHIIQQDEQPLKAKPEKISQLKPAFSSSGTITAANASSISDGAAALVLTSKNYAQSQGLKPLARIVGQTSYAGEPHLFTTAPVYAIQKLIKQCDWNIDQVDLFEINEAFAIVPMIAMHELGIPHAKVNVHGGACALGHPLGTSGARIVVTLIHALRQRQLKRGIAAICIGGGEALALAIEID

SEQ ID NO: 28035 - protein, 497 aa, Acinetobacter sp. ADP1
MNSINPTTITFIFYIVAMVCIGLYAYRATTDFSDYILGGRSLGSFVTALSAGASDMSGWLLMGLPGAIYLSGLSEAWIAVGLIIGAWLNWLFVAGRLRVHTEVQSNALTLPDYFTNRFNDTKKLLRISSALIILIFFSIYCASGMVAGARLFETIFGMEYHTALWISAIATISYVCVGGFLAISWTDTFQAGMMFFALMLTPIFAYLAIGDGQQQFAQLIDAARPHAFNMLSGVSFIAIISAMAWGLGYFGQPHILVRFMAADSVKSIPAARRIGMSWMILCLGGAVGAGFFGIAFFQGHPELAGHVSNNSELVFMELAQILFNPWVAGIIMAGILSAVMSTLSCQLLVCSSTLTEDFYKSLLRKNASQKELVWVGRVMVLAISVFAILLASNPESKVLGLVSYAWAGFGAAFGPLIILSLFWKRMTLNGALAGMVVGAVVVIGWKNLFASTGIYEIIPGFIFAAIAIVVVSLVGKQPSKEVTERFEEADRLYHSSK

SEQ ID NO: 28036 - protein, 401 aa, Acinetobacter sp. ADP1
MLNAYIYDGLRTPFGRHAGELASIRPDDLAGLVIQRLIEKTGVAGADIEDVIFGDTNQAGEDSRNIARHAALLAGLPVTVPGQTVNRLCASGLAAIIDSARAITCGEGDLYIAGGVESMSRAPFVMGKAESAYSRDAKIYDTTIGTRFPNKKIVAQYGGHSMPETGDNVAVEYGISREQADLFAAQSQAKYQKALEEGFFAGEITAVEVSQGKKLPPKQVTEDEHPRPSSTLEALSKLKPLFEGGVVTAGNASGINDGAAALLIGSEVAGQKYGLTPMAKILSAAAAGVEPRIMGAGPIEAIKKAVARAGLTLDDLDIIEINEAFASQVLSCLKGLGIDFNDPRVNPNGGAIAVGHPLGASGARLALTVARELQRRNKKYAVVSLCIGVGQGLAMVIENVS

SEQ ID NO: 28037 - protein, 401 aa, Acinetobacter sp. ADP1
MKHAYIVDAIRTPFGRYAGGLAAVRADDLGAIPIAALIERNPSVNWAQVDDVIYGCANQAGEDNRNVGRMSALLAGLPVEVPATTVNRLCGSSLDAIAMAARAIKAGEAHLIIAGGVESMSRAPYVMGKSEGAFGRTQKIEDTTMGWRFINPKLKAMYGVDTMPQTAENVAEQFGIQREDQDQFAYTSQQRTAAAQAKGYFAKEIVPVTIPQRKGEPVVIDTDEHPRASTTLEGLAKLKGVVKPEGSVTAGNASGINDGAAAVLIASDEAVAQYQLKARAKIIASTTVGIEPRIMGFAPAPAIKKLLKQANLTLDQMDVIELNEAFAAQALACTRDLGLADDDARVNPNGGAIALGHPLGASGARLVTTALNQLEQSGGKYALCSMCIGVGQGIALIIERV

SEQ ID NO: 28038 - protein, 478 aa, Acinetobacter sp. ADP1
MSRLIILSNRVSLPQTECVAGGLAVAMQDALSQLGGVWVGWNGKKIEQPFEQHFDILYKSKITYMTCALTQQQYQDYYCGFSNNTLWPAMHDREDLIEYNPKEFKTYQDVNRLFATKIAEFAQPDDLIWVQDYHFLSVARHCRELGMQNKIGFFLHIPFASLEIWRKIPCAEQLMDDLCHYNLIGLQTAQDQENCISVCSVLLKAQKIQNNMISLNQRVTQIQDYPIGVDVKGIQKTLSNLSDQDQYLTNPSAIKTIIGVDRIDYSKGLFERFNAFAEFLDRNTAFHQKVQHVQIASPCRLEVATYKRLFERFKLKVELINSEFSQDNWLPIVCHYDSKPHHELMQFYRNADICWVTSLKDGMNLVAKEYIAAQNPDNPGVLILSEFAGAAEQMQDALIVNPKNRDAMIKALKLALNMSLEERQYRYHKLIKQLIEYDINQWRDDFLKDLNSSQYIQNFDYNHRLSTVLFYPNYSSRI

SEQ ID NO: 28039 - protein, 70 aa, Acinetobacter sp. ADP1
MSNTIQGTVKWFNETKGFGFISSDSGEDVFAHYSEISNSGFKTLLEGQRVEFLVVNGKKGLQASNISIVK

SEQ ID NO: 28040 - protein, 343 aa, Acinetobacter sp. ADP1
MSQIEKKQLQLGYIPLLDCIALLWAKERGYFEEMGLDVTLVKEASWASLRDRLAFGILDAAHCLSAMLPAAAIGEDQIGIPLKTPLVLSKNRAYISLSQKLCYELSIQNADNAQENSAKLVKYLEQEQSIALAHVFHHSIHHYCLREWLALSHLDLAKAIQLKTLPPPYMLDALASASIDGFCVGEPWNTQGEIEGYSQIVASSRDIIPEVADKVLAVTEEWAAHHPNTVIALTAAILKAQQELETLSNLEPVWQILINFNIVRFQCSKSVHVKSYHALEQIIRHLVVGQAAPCSEDMLWLFGQMQKWHDLTIETTALNELSQRCIDQNSFEKAMQHVQSNTG

SEQ ID NO: 28041 - protein, 575 aa, Acinetobacter sp. ADP1
MKPNDVVSTLPNSPTTNTHTSVDSAQQEQQAGLDFVRQVITEDLNEGRTQTVVTRFPPEPNGYLHIGHVKAICLNFGVAEEFGGYCNLRFDDTNPDAEEQEYVDGIANDVKWLGFEWKDEPRYASSYFDQLYTWAVQLIKQGDAYVDLQTPEEIKLNRGNFVEPGKNSPYRDASVEENLQHFEKMKDGTYQEGQAVLRAKIDMASPNVHMRDPILYRILHSEHHQTGDTWKIYPMYDYAHPLSDAIEGVTHSLCTLEFQDHRPFYDWVIEKVHSEAVPRQYESSRLNIDYTITSKRKLRRLVEGGFVNGWDDPRMPTVVGMRRRGFTSEGLRDFCKRVGVSKTDGIVDVAMLEFCIRQSLENTASRGMAVLNPLKVTLTNLPETLDLVHARHPNVDMGERVIPLTSELYIDRKDFEEVPPKGFKRLIPGGEVRLRHAYVIKCDEVVKDEQGEVIELKCSIDPDTLGKNPEGRKVKGVIHWVSATKGLPAEVRIYDRLFTEAAPDADDDFLANLNPDSLQVVQAYIEPALAQASPEQRFQFEREGYFVADQHDHTSEKPVFNRILDLKDSFKPEKK

SEQ ID NO: 28042 - protein, 69 aa, Acinetobacter sp. ADP1
MSNSVNGTVKWFNEVKGFGFIQQDSGPDVFAHFKEIASSGFKTLYEGQRVSFGIVDGQKGPSAVNIIAL

SEQ ID NO: 28043 - protein, 476 aa, Acinetobacter sp. ADP1
MSQKKSVIFKNLLPVIKQYQQAGFTHEKIVALLKDQHDLDLVTTETFKSYLYRYAKVTPTPSESLKMTNTIQTPREIKKSSKLEHVCYDIRGPVLRAANEMEEQGHKIIKLNIGNPAPFGFEAPQEIINDVALNLPNAIGYTDSKGIFPARKAICQYYQQKGIRDMHVNDVYVGNGVSELIVMAMQGLLNDGDEMLVPMPDYPLWTAAVNLSGGTAIHYKCDEENSWYPDIVDMESKITPNTRGIVVINPNNPTGSVYPRHVLQQIVALAKKHDLILFADEIYDKIIYDGIEHVALASLAGDQLCISFNGLSKSYRVAGYRSGWMAITGDKSRAKDYIEGLDMLASMRLCANHQAQYAIQTALGGYQSINDLIRPSGRLYEQRNIAWEMLNEIHGVSCVKPEGAMYCFPKLDPNIYQVEDDEQLMLDFLRAEKVLLVQGTGFNWPTHDHFRLVFLPAENELREAITRLSRFLATRR

SEQ ID NO: 28044 - protein, 756 aa, Acinetobacter sp. ADP1
MDDQSLKQAALYYHENPTPGKISVTPSKQLVNQHDLALAYSPGVAAPCLEIERDPSTAAKYTARGNLVAVVTNGTAVLGLGNIGPLASKPVMEGKGVLFKKFAGVDVFDIEIAENDPDKIVDIVAALEPTFGGINLEDIKAPECFYIEKKLRERMNIPVFHDDQHGTSIIVGSALLNALQLVNKKIEDIKIVASGAGAAALSCLDLLCALGARKENIIVADSRGLLTTSRDGLDESKKRYVQDITATQLHEVITGADMFLGLSAAGILTKEMVKGMAENPIIFALANPDPEILPEHAHEVRPDVIMATGRSDYPNQVNNALCFPYIFRGALDVGATTINEDMKIACVHAIARMAHVEADAATYGEKSASFGRDYLIPRPLDQRLILEIAPAVAQAAMDSGVATRPIEDFSAYRQKLSEFVYNSAFIMKPIFSQAKADPKRIAYAEGEDYRVLRTAQIVVDDGIAFPVLVGRTAVIEANIKKLGLRLENGVNIEIVDQENNPLYEEFWKDYYQIMQRKGVTVEYAQREARRRSTLIAAMLVKFGKADGMLCGTYSSYDIHLDFVSKVIGLKEGMNNFFTLNALMLEDRNLFIADTYVNTNPTAEQLADMTILAAEEVRRFGITPRVALLSHSSFGSNQEDPSAQKMREVYRLLNERAPELEVEGEMHGDAALDESIRHSAFPGSNFKGSANLLIMPNLDAANISFNLLKATSGNNVTIGPILLGAAKPVHILTPTATTRRVLNMTALTVAEIQQSEG

SEQ ID NO: 28045 - protein, 290 aa, Acinetobacter sp. ADP1
MIQSVAFIGLGAMGYRMASHLPRHFDTVYVWNRSFEKAKQHATEYGTQAVELSQAVQADIIFSCLPTSADVAQLVENLELKPGTIWVDCTSGVPDLARQLVTQLKNQGVDYLDAPVSGQTIGADNATLTVMVGGDFTAFERAYPAMQAFGKLIKHVGESGAGFAVKAVNNMLLAVNLWSVAEGFTTLKAHGVNLGEALDCINASSGKSGVTETIFPQRVLNRSFPVTFALPLLAKDAGIALDLVHAAKLPAPLIALTQSLIQAANQTAEENSDFSAAVKMYESWSKITLE

SEQ ID NO: 28046 - protein, 574 aa, Acinetobacter sp. ADP1
MKQDFKVYVRLLSYLKPYWGIALLVLVGFGINAATEVSVAKLLKYIIDAIQEGSRADLDWFPLLIVLLVFFRGLGLFMGGYYTAVISRRLIFSIRQEIYAKLIRLPSQYYLDNSSGHISAKIMYNVEQLTAASSESLKIMVKDGLITLGLLGYLLYTNWRLTLCIFIFMPIIGVLVRKASKRMRKLSIQVQNTMGDVNHVVQESIGGQAVVKSFVGEEFEQKRFYKSSEDNLKRGLKMVIVQNLNSPLVQLVMAMAMSLIVWLALRPQILGETTAGEFVAYITAAGLLAKPIKNLTDVNEKLQRGIAAAYSVFELLDLPSEENHGTQTPKLQGDVRFDHVTLEYAGQVKAIKDFNLTIEPGETVAIVGRSGAGKTSLVNLLVRFQEVTSGSLYLDHIPIQDIELSCLRQQVAMVNQQVVLFNRSVRENIAYGQLEGAAEADIVAAAKAAYAHDFIMNLPQGYDTILGAQGLNLSGGQRQRIAIARAILKNAPILILDEATSALDNESEHFIQKAFDEAMQNRTTIVIAHRLSTIENADRIVVMDKGQIIEQGTHQELLLKQGAYFQLHQRNFEE

SEQ ID NO: 28047 - protein, 394 aa, Acinetobacter sp. ADP1
MDMSKIMIAAAARTPMGSFQGSLAGLTAPDLGAVVIQRVLEQTQIPAADIDEVIMGCVLPAGLKQAPARQAMRQAGLPDHVGATTINKVCGSGMKATMFAADAILAGSIQIAVVGGMESMTNSPYLLPKARSGYRMGHGQVLDHMFLDGLEDAYTGRAMGSFAQDMANQKGYTREQMDAFAIRSLTRAQHAITAGHFQSEIAPVTVATRKGDITVSEDENPGNAKIDKIPSLRPAFAKDGTITAANSSSISDGASALLITSEQQAEQRGLKVLAEIKGYTTHSQLPAEFTIAPVGAIEKLLKKIGWTAEEVDLWEINEAFAMVTMAAIDAFKLDAEKVNINGGACALGHPLGSSGSRIIVTLIHALKRLGKRKGIAALCIGGGEATALAIELVD

SEQ ID NO: 28048 - protein, 400 aa, Acinetobacter sp. ADP1
MRFVDEAVITVEAGDGGNGVASFRREKFVPFGGPDGGDGGRGGSVYIQADDDTGTLVDYRYTRKFRAERGKNGAGANCTGRGGEDVVLKVPVGTTIVDVESGDIIGDLVEDGQRVMVATGGDGGLGNTHFKSSTNRSPRKFTTGVKGEFREIRLELKVLADVGLLGMPNAGKSTFIRAVSAAKPKVADYPFTTMVPNLGVVDADRHRSFVMADIPGLIEGAAEGAGLGIRFLKHLARTRILLHIVDVQPIDGSDPVHNAKAIVGELKKFSPTLAELPVVLVLNKLDQIDEANREEWCQHILTELEWTGPVFRTSGLLLEGTKEVVYYLMDQIEQQRELEAEDPEYARKVKAFREQLEAETREQTIAAKEAYRAMRKAQREADQDDDFDDDDDEVEVIYVR

SEQ ID NO: 28049 - protein, 410 aa, Acinetobacter sp. ADP1
MDVRLSDRVNAIKPSPTLAVTNKAAELKAAGKNVIGLGAGEPDFDTPQHIKDAAIEAINNGFTKYTAVDGTPGLKKAIIAKFKRDNNLDYQANQILVSCGGKQSFFNLALALLNKGDEVIIPAPYWVSYPDMVIIAEGTPVIVKCGEDQRFKITPEQLEAAITPNTRLLVLNSPSNPTGMIYTKAELEALADVLRKHPQVYIASDDMYEPIRWEDEFYNIATVAPDLYDRTLVLNGVSKAYAMTGWRIGYAAGPAKIIGAMKKIQSQSTSNPTSISQVAAEAALNGPQDVLEPMIEAFKRRHDLVVNGLNEIHGISCLPADGAFYAYANIRPLIRAKGLKSCTEFSEWLLEETGVAVVPGDAFGLGGFMRISYATADDVLVDALARIKKAADSIEGIDAAIASIEAEKNA

SEQ ID NO: 28050 - protein, 345 aa, Acinetobacter sp. ADP1
MSMHSDQVNPDSHENNDETQSPNMIDQFFSAAGTEIPSDFRSGFVAIVGRPNVGKSTLMNHLLGQKLSITSRKPQTTRHKIVGIDSREKSQAVYVDTPGMHKKEVRAINKMMNRAAHSALRDVNLVLFVVDIHKWTQNDDLVLEKLKNAEMPVILVINKVDTLEDKKSLLPLIQERTKLMNFAEIIPVSALRGANLDQLRDTVEKYLPFQPPLYSLDQITDRSERFLASEIIREKIMRQLGEELPYDLTVQIESFKTEEPTVSEKTGRLKPACTYIDATIFVERAGQKAIVIGEKGAKLKRIGMEARTDMEKMFEQKIMLTLWVKVKGGWSDDERALKSLGYSDI

SEQ ID NO: 28051 - protein, 470 aa, Acinetobacter sp. ADP1
MSNEMHGQPSGEGELSRSLSNRHLQLIAIGGAIGTGLFMGSGKTISLAGPSILFIYLIIGVMVFFVMRALGELLLSNLQYKSFIDFSTDLIGPWAGYFVGWTYWLCWITIGIADLSAIIYYLQFFNNGMPFTPTEGAMISVAAIFFIMGLNLMTVKLFGELEFWFAMIKITAIVVLILVGLWMIFTGFTSTSGEVASFTHLWANGGFFPTGMHGFLAGFQIAIFAFVGVELVGTTAAETKNPEINLPKAVNSIPIRIIIFYVLALLIVMSVTPWNRIDPNISPFVNLFSQAGIAAAAIIMNLVVLSSVMSSMNSGVFSTSRMLFGLSKEKQAPQAFGALNKGRVPANALYFSTVCLLLGAALQYVVPNTVEAFTLATTLSTILFICVWLMIIWSYMVYYKKRPELHAKSIFKLPGGLFTCWILIIFFVGMIYVLSLEPDTMKALMVSPIWLVILVIGYFGFYKPRLKSKK

SEQ ID NO: 28052 - protein, 343 aa, Acinetobacter sp. ADP1
MNHSVALNFADGKTFFIAVQEDELLLDAAVRQGINLPLDCREGVCGTCQGTCETGIYEQEYVDEDALSERDLAKRKMLACQTRVKSNAAFYFDHHSSICNAGETLKIATVVTGVELVSETTAILHLDASQHVKQLDFLPGQYARLQIPDTDDWRSYSFANRPNASNQLQFLIRLLPNGVMSNYLRERCQVGQTLIMEAPLGSFYLREVERPLVFIAGGTGLSAFLGMLDNIAEQPNQPSVHLYYGVNTEADLCEQKRLTTYAERIKNFSYHPIISKASEQWQGKSGFIHEHLDKNQLSEQSFDMYLCGPPPMIEAVKTWLDEQAIADCHIYSEKFLQSNTAKT

SEQ ID NO: 28053 - protein, 631 aa, Acinetobacter sp. ADP1
MSDLFKNAVLWLIILGVLILIFSNISDRNKPAAMNYSEFVASVNAGQIKQVTIDGLNISGEKTNGSHFETVRPQVEDTELLPSLNKNKVVVEGTAPQRQGLLMQLLIASFPVLLIILLFMFFMRNMGGGAGGKNGPMSFGKSKAKMLSEDQIKVTFKDVAGCDEAKQEVVEIVDFLKDPAKFKRLGATIPRGVLMVGPPGTGKTLLAKAIAGEAKVPFFSISGSDFVEMFVGVGASRVRDMFEQAKRHAPCIIFIDEIDAVGRHRGSGTGGGHDEREQTLNQMLVEMDGFEGNEGVIVIAATNRVDVLDKALLRPGRFDRQVMVGLPDINGREQILNVHLTKLPSVTGVDVKVLARGTPGFSGAQLANLVNEAALFAARRNKNTVDMHDFEDAKDKIYMGPERKSMILREEERRATAYHESGHAIVAEVLPGTDPVHKVTIMPRGWALGVTWQLPEQDQISHYKDKMLNEISILFGGRIAEEIFINQQSTGASNDFERATKMARAMVTKYGMSDRLGVMVYEDDNTQGFFGNVGSRTISEATQQQVDQEVRRILDEQYKVAWDILEQNKDKAHVMVKALMEWETIDREQVRDIMEGREPRPPKVYVAENPVIDVEPPSNGPSTPPPLPSMG

SEQ ID NO: 28054 - protein, 317 aa, Acinetobacter sp. ADP1
MPNLVVFSGNAHPQFAQKVVSHLHIPLGAASVGHFSDGEISVEITENVRGKDVFIVQPTCAPTNDNLMEILVMADALRRASAGRITAVIPYFGYARQDRRPRSARVPITAKVVADMLTTVGVDRVVMIDLHADQIQGFFDIPVDNIYGTPALLADLRQQSHDNLMVVSPDVGGVVRARAVAKQMGDIDLAIIDKRRQKANESQVMHLIGDVKDRDCVIVDDMVDTAGTLCKAADALKQFGARRVVAYATHPVLSGKALENLQNSVLDELVVTDTIPLSPEALNLGKIRQVSVASMVAETIRRINNEESISAMFDSYL

SEQ ID NO: 28055 - protein, 126 aa, Acinetobacter sp. ADP1
MLSRLLKCKIHRAVVTHAELHYEGSCAIDGVLMDLAGIREYEEIHVWNVTNGKRFTTYAIRGEDHSGIISVNGGAAHQAEVGDLVIIATFGDFTEVEANAHKPRLVYANPDNTVNHTANCIPVQVA

SEQ ID NO: 28056 - protein, 470 aa, Acinetobacter sp. ADP1
MINDYEDTPLTTHTGTQPAAKLQKNLVLWHIIIIGLAYIQPMTVFDTFGLVSQDSHGHVPTSYIFALIAILLTSISYGHMIRRYPSAGSAYTYAQKSIHPNVGFMVGWSSWLDYLLSPLVNIILADIYLRALFPGVNNWFWVIGLTILMTVVNLFGARFVARFNSTIVFVQIGVIFYFTYKVYLLLSQGINADGSLDQSQYQLWSLAPFWNEMTSVGALITGATILCFSFTGFDALSSLAEETKNAEKVLPRAIFLTALIAGVIFIISTYFMQIYFPSNPAQYFQKIDETQPEILLAIGGITFQTVILYFAIVTVMASGISAHAGVSRLMYVMGRDGVINKKIFGHISPKLFTPTYNIVIVGVVALTAGFLDFEHIANLISFGALTAFSFVNFSVISRYALRDGRTKNMKDILNYIVIPTLGFASVFMMWLEIDQLALKIGLIWAAVGVGYLAYKTRGFRYPPPQHNEHE

SEQ ID NO: 28057 - protein, 103 aa, Acinetobacter sp. ADP1
MYAVIQSGGKQHRVVEGETLKVELLKAETGSTITFDDVLMVVSGESVQIGAPVVAGAKVTAEVVGHGRHDKIRIIKMRRRKHYRKQQGHRQWFTELKITGISG

SEQ ID NO: 28058 - protein, 452 aa, Acinetobacter sp. ADP1
MNNDSSKLQRGLKNRHIQLIAMGGAIGTGLFLGSAQVIQSAGPSIILGYAIGGLIAFLIMRQLGEMIVHEPVAGSFSHFAYKYWGKFPGFLAGWNYWVLYILVAMTELTAVGKYINYWWPQIPAWQSVLFFFVVITLVNLTNVKFYGESEFWLAIIKVVAVISMIIFGLYLLFTADSSSTASFSNLWAHGGFFPNGFEGLFYMLAFLMFAFGGIELIGMAAAEAENPAKTIPKAINQVVFRILVFYVGSLTILLSLVPWNQLDLGGLDKSPFVMIFSQLGIGWAAHLLNFIILTAALSVYNSGMFANSRMLFGLAQQGNAPKIFTKVNKQGVPIPAVLFSALLIFGCVLLNYFVPEDALGHLMYVVVGALVLNWAMISLTHLKFKAAVKKLKLNVTFPALWAPVSNYLVLIFIALVLFIMWQQGFKESVIMIPVWIVLMFGLFHLLTNKDHT

SEQ ID NO: 28059 - protein, 547 aa, Acinetobacter sp. ADP1
MYLYTDFDQQLINERVAQFRDQTERYLAGKLTEDEYRPLRLQNGLYVQRYAPMLRIAVPYGLMNSKQLRKIAEISKEYDRGYAHVSTRQNIQLNWPALEDVPDILAELATVQMHAIQTSGNCIRNTTTDQYAGVVAGEIADPRPTCELIRQWSTFHPEFAFLPRKFKIAVSALEEKDRAATSFHDIGVYIVKNDAGEMGYKIKVGGGLGRTPIIGSVIREFLPREDLIAYLDAVLRVYNLHGRRDNKYKARIKILVKALTPAVFAEKVEAEFAQIRESLKIQPEVLNKLDQVFTPFSYQALNDEDFSAVFAEHPKFKQWYNINTNAHKVKGYRIVNISLKRAGVAPGDMTTEEMNLIADLADQYTFGELRTTHEQNISLVDVPQKDLFALWQTLEQHNMARAHIGFLTDIICCPGGDFCSLANAKSIPISEAITRRFEDLDTIYNLGELDLNISGCMNACGHHHVGNIGILGVDKKGAEFYQITLGGNADHDASIGDILGPSFAADAVPDVVEEILNTYLDLRQDQERFIDTYRRVGIQPFKERAYA

SEQ ID NO: 28060 - protein, 291 aa, Acinetobacter sp. ADP1
MRFDRHTPIAFIGMGLMGSRMATRLVQAGFSVAVWNRTQSACDVLLDMGAQALSLEKIADYPVILMCLADDQAVNHVYEQVHHLVRPQQIIVDFSSLSVNQTKYLADRAQQQQAIWIDSPVSGGTSGAEQGTLVIFAGGNESTIQDLGLIYNVLSQRVTRMGDTGTGQATKICNQLIVAANSALIAEAVALAHRAGVDTTLLAPALANGFADSKPFQILAPRMARQIFEPVQWKVQTLAKDLNNAVELATHYALDIPVAHQALHQLHSHQQNGYAQSDLATMIKQVEDQDQ

SEQ ID NO: 28061 - protein, 375 aa, Acinetobacter sp. ADP1
MQIGIPTETIAGENRVAATPETVKKLISAGHHVVIERGAGVKAAYIDSAYEQVGATITDNAYQGSQLILKVRAPHSDEIQKLSANTTVVAMFDPYRNPDLDAFADQNVSAFALELLPRTLSRAQNMDVLSSQANLAGYKSVLLAAAEYQRMFPMLMTAAGTVKPARVVIMGVGVAGLQAIATAKRLGAVVEATDLRPTAKEQVESLGGKWLDVPMSPEEQARADEAAKNGYGWTPGEQYIKDQAAIVDKAVSNADIVITTALLPGRNAPRLIKAETVAKMKPGSVILDMAVETGGNVEGSKVGETVFTENGVKILGVPNIPSTLSTEASALYARNVFNFVETLFDQDKNFAINPEEEIQKALLVTHGGQVLLKRG

SEQ ID NO: 28062 - protein, 574 aa, Acinetobacter sp. ADP1
MELLSGGEMLVRALADEGVEHVFGYPGGAVLHIYDALFQQDKINHYLVRHEQAAGHMADAYSRVTGKTGVVLVTSGPGATNTVTPIATAYMDSIPMVILSGQVASHLIGEDAFQETDMVGISRPIVKHSFQVRHASEIPAIIKKAFYIASSGRPGPVVIDIPKDATNPAEKFAYEYPEKVKLRSYQPPSRGHSGQIRKAVDELLTAKRPMIYTGGGVVQGNASELLTELAHLLGFPVTNTLMGLGGFPGDDPQFVGMLGMHGTYEANMAMHNADVILAIGARFDDRVTNNPAKFCQNAKVIHVDIDPAAISKTIMAHIPIVGAVQPVLQEMLTQLKQLNVSKPNPEAISAWWDQINEWRKVHGLQYQAGQDGIMKPQQVVEALYKATDGNAIITSDVGQHQMFGALYYKYKRPRQWINSGGLGTMGVGLPYAMAAKLACPDQQVVCITGEASIQMCIQELSTCKQYGLNVKILCLNNRALGMVKQWQDMNYEGRHSSSYVESLPDFAKLMEAYGHVGIQIDHTDELESKLAEAMAINDKCVFINVMVDRTEHVYPMLIAGQSMKDMWLGKGERT

SEQ ID NO: 28063 - protein, 254 aa, Acinetobacter sp. ADP1
MTPQQIELVKSTVPVLREHGVTLTSYFYNRMLNNHPELKNVFNLDHQSTGRQPRALAAAVLAYAEHIEQPEKLAKAVERITTKHVSLNIQPEQYAIVGENLLHSISEVLNVPFESELIEAWKQAYLQLADILIEVEKEKYHQLAKQDGGWTGWRSFKIIAIQEQYEGKCFKISATDQQAILAATLGEYISVKVHVPEKELDQPQQFNLNTTQADDHYEFVVKPEPAHSDYDVANILLNHYSLGDEVMVSAPIRN

SEQ ID NO: 28064 - protein, 318 aa, Acinetobacter sp. ADP1
MNAAFLDYGSLDMNDLDFSPLQACFNDLQLYSASTPDQVIPRLKDVQVAITNKVVINAEALTRLPKLKLILVSATGTNNVDLRAAKAQGIVVCNCQGYGTASVAQHTLTLMLALATSLLRYDHAVAQGRWQQASQFCFLDYPIIELSGKTLGIVGYGELGKEVARLAQAFGMKILIANLPQRPKHEDRLELEALLPQVDFLSLHCPLTEHTQHLIDAHAFALMKPSAFLINCARGGIVHEQALLDALKQGRIAGAATDVLSIEPPKNGNPLLDEKLPNLIITPHSAWGSVQSRQRMVEQLAENAKAFSIGQTIRQVNA

SEQ ID NO: 28065 - protein, 1493 aa, Acinetobacter sp. ADP1
MHLPSPNTVAPAQGLYQPDEFKDNCGFGLIAHMKGDSSHHLVQTAIHSLSCMTHRGGIAADGKTGDGCGLLLAMPKQFFREEAKKLSDITLSEIFAVGTVFLNIDPALAQHAKAILTKEIESEGLRVLAWRVVPTNNDVLGEIALQSLPAFEQVLVNCPMGVTEVEFNRKLFLARRRAEQQLTNDPLFYVTTLCSTVISYKGLMMPAAIADFYTDLADERLASHIVVFHQRFSTNTLPRWPLAQPFRYLAHNGEINTITANRNWAMARTPKFENPLLPGLTELKPIVNRTGSDSSSLDNMLEILIGGGMDLFRALRMLVPPAWQNVETLDADLRAFYEFNSKHMEAWDGPAGLVIQDGRHAICMLDRNGLRPARWVVTKNDYITLASEIGVWDYQPEDVISKGRVGPGQILVIDTFTGKVLDTQDVSNHLKRMRPYRQWLRENSLRLQGSPELEEHLIDKGLAGDSLKAAQKMFLVTFEERDQLLRPIAESGQEAVGSMGDDTPMAVLSRQVRPVSDYFRQQFAQVTNPPIDPLRESIVMSLETCMGREQNVFEQGPEHADRLIISSPVLSNSKMHQIRTLGRKGYEIADIDLNYPESEGLQAAIQRICEESAQAIRDGKTLLVISDKKIREGYLPANAILATGAIHHYLINIGLRTDANIIVETGVARDPHQFAVILGFGATAIYPYLAYDVINDLVAKGELLGDPVHAQANFRKGIEKGLLKVLSKMGISTVASYRGGQLFEAVGLSKEVVNTCFVGVPSRIEGATFNDLENDQKKLAATAWKNRQPIDQGGMLKFVFGKEYHAFNPDVINSLHKAVRSGNYQDFKEYAELVNNRPVATIRDLFKLKIGNSIPLEQVEAVEQILPRFDSAGMSIGALSPEAHEAIAIAMNTMGGRSNSGEGGEDPARYGTIRNSKIKQIASGRFGVTPAYLTSAEVLQIKVAQGAKPGEGGQLPGGKVNSLIARLRYAVPGVTLISPPPHHDIYSIEDLSQLIFDLKQVNPQAMVSVKLVSEPGVGTIAAGVAKAYADFITISGYDGGTAASPLSSIHHAGSPWELGLSEAHQALRVNDLRGKVRVQTDGGLKTGLDVIKAAILGAESFGFGSTPMIALGCKYLRICHLNNCATGVATQQDHLRQEHYIGEPEMLINFFHFIAEETREWLAALGVASLKDLIGRVDLLEILPGETDKHAHLDLSPLIQSHPSAEGKAQYCQVQGNAPFDKGLLAEKMVAEMLPAIEAGTGGEFHFEIGNCDRSIGARLSGEIARRYGNLDMEAHPVVLNLKGTAGQSLGVWNAGGLHIKLEGDANDYVGKGMAGGRVSIFPPKGSPFQTQNTAIIGNTCLYGATGGKLFAAGTAGERFAVRNSGAFAVIEGAGDHCCEYMTGGIVTVLGKVGHNFGAGMTGGFAYVLDLENDFVDYYNHELIDLTRISTESMEDHQENLLRILDEHIQETGSAWAYKIRNEFDFYSRKFWLVKPKAANLLTLLKATKADPQ

SEQ ID NO: 28066 - protein, 660 aa, Acinetobacter sp. ADP1
MPSKTSSRFANINPNVFVSTIMIIAIFLAIVILAPDAFELLTQQLKNWITESFSWFYVLSVAFFLIVLGYIACSSSGKIKLGPDHSQPDYSNSSWFAMLFTAGMGIGLMFFGIAEPIMHYVSPPSGEPETILAAQQSMRVTFFHWGLHAWGIYAIVALSLSYFAYRHDLPLKIRSSLYPLIGKKIYGPMGDAVDTFATIGTIFGVATTLGFGVTQISSGLNYLFGFEPTSFSKVVLIIIVSAMAALSVGLGLDKGVKRLAELNLVLAVTLLAFVFFTSATVYLLQTTIQNTGQYISNLFEMTFNLYAYQPNGWIGGWTIMYWAWWISWSPFVGMFIARVSRGRTIREFIIGVMLIPTGFTLIWMGFMGNAGLYSILHDGNLSLLNAVQRDSSVALFEFLHSLPFSGVMSLLATVLVVLFFVTSADSGALVVDYLTAKSEDSPVWQRLFWIVVMAGLAIILLLAGGLTALQSATIMSALPFTFIMLLICWGLIKALRIDSTKMQAIQEARTTPRAIQNPRSWQQRLGLIMHYPHSKVEVDAYIKKHVQRAFESLEREFKRRHLTVAISETDDGLQLKVDHHDEINFIYHVVSRETMPPSFMLEQEHNADVEKYFQAEVFLREGGQNYDVMDWTEEDLIQDIIDQYERHLYFLSVMRAQTGN

SEQ ID NO: 28067 - protein, 578 aa, Acinetobacter sp. ADP1
MKKDCTKMKWNSFKALALMAVGVLFSTLAMASPDLGQSEQQATNWHAIIMFVAFVGGTLFITKWAAKQTTSTKDFYTAGGGISGFQNGLAIAGDYMSAASFLGISALVFSSGFDGLLYSLGFMVGWPIVLFLIAERLRNLGKYNLSDVVSFRLEEKPVRTLAAFSSLVVVAFYLIAQMVGAGQLIKLLFGLNYNIAVVIVGLLMMAYVIFGGMLATTWVQIIKAVLLLSGATFMAFMVMKAVGFSFSNMFTQAIDVYANVRNISLDDAAKIMGPGKLAANPIDAISLGLALMFGTAGLPHILMRFFTVKDAKEARKSVVVATGFIGYFYLLTFIIGFGAILFVSNNPQFLDVAKMAVTGKLELMGGNNMAAVHLSDALGGDLFMGFISAVAFATILAVVAGLTLSGASAISHDLYANVFRKGKTTPESELRMSKIATLGLAIFAMILGILFEKQNVAFMVGLAFSVACCANFPVLVLSMFWKGLTTRGAVIGGVVGLTTAVVLIILSKAVWVDTLKISDTPINPFNGPAIFAMPLSFLCCWFFSITDNSARAKAERKAFDAQYVRSMTGVGISGASDH

SEQ ID NO: 28068 - protein, 384 aa, Acinetobacter sp. ADP1
MQPLSSKLPNQGVTIFSTMTALAQRLNAINLSQGFPDFATPDALIEALCDATRAGFNQYVSGDGWLPLREQVVQQFEQRDQVRLDPVHEITITPGATIAIFAAIQAVIHTGDEVVIFDPSYDSYAPAVRVAGGIPVHLALTAPDFRVDWQQVQDNINARTRMIIVNTPHNPTGTLWTLDDWHHLIELAEKHDLIVLSDEVYEHLVFDGHHHYSALHFSTLRERSFVVGSFGKTFHVTGWKTGYCVASPMLMKLFRQIYQYANFCGNTPAQVALSQYMQQHPEHIQELGSFYQAKRDLFNQGLTQSRFKFQPTHGTYFQTVDYTAIRPDLNDLEMCYFLAEQYGVVAIPLSVFYQQPDPELRLIRFCFAKTEQTLKDATQRLSQC

SEQ ID NO: 28069 - protein, 305 aa, Acinetobacter sp. ADP1
MDLKISTIYSNTYINKLIYFNHGMVVAKSSVNPVLSPHTAGVLMLKRSTLLLAVTTTLSALMLPTFANADALADIKKAGVIKIAIPQDFPPFGTVGTDLKAQGYDIDVAKLIAQDLGVKLQLVPVTSANRIPYLTTKKVDLVISSLGKNPEREKVIDFVGPYAPFYNGVFGQKNVSVKSAADLAGKTIAVTRGSIEDLELSKVAPSSTTIKRFEDNNSTVSAFYSGQVNLIATGNVVAGTLSKHFSKKPLETKFIIKNSPCYIGLNKGETALQNKLTAIIKTAKGNGQLNRISVQWLGTPLPKQL

SEQ ID NO: 28070 - protein, 647 aa, Acinetobacter sp. ADP1
MAKIIGIDLGTTNSCVAVLEGDKVKVIENAEGTRTTPSIVAYKDSEILVGQSAKRQAVTNPKNTLFAIKRLIGRRYEDQAVQKDIGLVPYKIIKADNGDAWVEVNDKKLAPQQVSAEILKKMKKTAEDYLGETVTEAVITVPAYFNDAQRQATKDAGRIAGLDVKRIINEPTAAALAFGMDKKEGDRKVAVYDLGGGTFDVSIIEIADLDGDQQIEVLSTNGDTFLGGEDFDTALIDYLVEEFKKEQSVNLKNDPLALQRLKEAAEKAKIELSSSSSTEINLPYITADATGPKHLVINVTRAKLEGLVADLVARTIEPCRIALKDAGLSTSDISDVILVGGQSRMPMVQQKVQEFFGKEPRKDVNPDEAVAIGAAIQGAVLSGDKTDVLLLDVTPLTLGIETMGGVLTPIIEKNTTIPAKKSQVFSTAADNQPAVDISVYQGERKMAQQNKLLGNFQLGDIPPAPRGVPQIEVSFDINADGILKVSAKDKSTGKEQSIQIKANSGLSDAEIEAMIKDAEANAEEDRKFEELAKARNEADALVSSSNKAVKDLGDKVTEDEKTAITTAVSELEAATKENDVEDIKAKTEALQNILMPITQRAYEQAQGAGGAQGFDPNAFQGGDAGQQQKADDGVVDAEFTEVKDDKK

SEQ ID NO: 28071 - protein, 330 aa, Pectobacterium atrosepticum SCRI1043
MKKQYIEKQQQISFVKSFFSSQLEQLLGLIEVQAPILSRIGDGTQDNLSGTEKAVQVKVKALPDATFEVVHSLAKWKRKTLGAYDFSFGEGIYTHMKALRPDEDRLSPIHSVYVDQWDWERVMEDGERNAEYLKSTVTRIYQGIKATEAAVHQAFGIQPFLPEQIHFVHTETLLKRYPDLDAKGRERAIAKELGAVFLIGIGGKLSSGHSHDVRAPDYDDWTTPGEQELAGLNGDIVVWNPVLNDAFEISSMGIRVDAEALTRQLALTQDEERLKLEWHQALLRGEMPQTIGGGIGQSRLVMLLLQLPHIGQVQCGVWPQPLRESVSGLL

SEQ ID NO: 28072 - protein, 448 aa, Pectobacterium atrosepticum SCRI1043
MTTILKHLPVGQRIGIAFSGGLDTSAALLWMRQKGAVPYAYTANLGQPDEDDYDEIPRRAMEYGAENARLIDCRKQLVAEGIAAIQCGAFHNTTAGVTYFNTTPLGRAVTGTMLVAAMKEDGVNIWGDGSTYKGNDIERFYRYGLLTNAELKIYKPWLDTDFIDELGGRQEMSEFMSQAGFGYKMSAEKAYSTDSNILGATHEAKDLEFLNSSVKIVNPIMGVKFWDENVKVPAEEVTIRFERGHPVALNGKTFTDDIELMLEANRIGGRHGLGMSDQIENRIIEAKSRGIYEAPGMALLHIAYERLLTGIHNEDTIEQYHANGRQLGRFLYQGRWFDSQALMLRDSSQRWIASAITGEVTLELRRGNDYSIMNTVSDNLTYKPERLTMEKGDSVFSPDDRIGQLTMRNLDITDTREKLFNYAETGLLSSSASTGLPQVGQLQDKTEK

SEQ ID NO: 28073 - protein, 387 aa, Pectobacterium atrosepticum SCRI1043
MEKVVIVDAVRTPMGRSKGGAFRQVRAEDLSAHLMRSLLSRNTALDAREIDDIYWGCVQQALEQGFNVARNAALLAEIPVSVPATTVNRLCGSSMQALHDAARAIMVGDANVCLIGGVEHMGHVPMNHGVDFHPGLSRTIAKAAGMMGLTAEMLARMHNISREMQDQFAARSHQRAYHATQSGAFRHEIVPTAGHDADGALQRFDYDEVIRPDTTIDSLAALKPAFDPVNGTVTAGSSSALSDGASAMLIMSESRAASLGLPVRARIRAMAVVGCDPSIMGYGPVPATKLALKRAGLSLADIGIFELNEAFAAQTLPCIKDLGLLEQLDEKVNLNGGAIALGHPLGCSGARISTTLINLMESRDAQFGVATMCIGLGQGIATVFERA

SEQ ID NO: 28074 - protein, 341 aa, Pectobacterium atrosepticum SCRI1043
MKRIVISTLVAGASLFAAINQAHAGATLDAIQKKGFVQCGISDGLPGFSYADASGKYSGIDVDVCRGLAAAVFGDANKVKYTPLTAKERFTALQSGEVDVLSRNTTWTSSRDGGMGMLFTGVTYYDGIGFLTHNKAGLTSAKELDGATVCIQAGTDTELNVADYFKTHKMQYTPVTFDRSDESAKALESGRCDTLASDQSQLYALRIKLSKPAEFIVLPEVISKEPLGPVVRRGDEEWFSIVRWTLFAMLNAEEMGVTSKNVDQLAAKPTTPDMSHLLGHEGSYGKDLKLPNDWAFKIIKQVGNYGEIFERNVGMGSELKIKRGLNELWNKGGIQYAPAVR

SEQ ID NO: 28075 - protein, 483 aa, Pectobacterium atrosepticum SCRI1043
MQIEILLPLIGYLLLVFGLSVYAYRRRQAGNFLNEYFLGGRSMGGFVLAMTLIGTYVSASSFIGGPGAAYKYGLGWVLLSMIQLPTMLLSLGILGKKFAILARRYNAITLNDMLYARYKSPLLVWFASISLLIAFIGAMAVQFIGGARLLETAANIPYDIGLLIFGVTIALYTTFGGFRASVLNDAMQGIVMLIGTVILLVGVIYAAGGLHSAVDKLQQIDPMLVSPQGSGGILSMPFMASFWVLVCFGVIGLPNTAVRCISYRDSKALHRGIIIGTIVIGILMLGMHLAGALGRAVMPNLTIPDQVLPALMVTVLPPLAAGIFLAAPMAAIMSNINAHLLQASATIIKDLYLSVRPEQIHNERRIKILSSVTTLLLGLLVLLASLRPPEMIIWLNLLAFGGLEAVFLWPLVLGLYWERANAAGALSAMFTGAICYTLLASFNLQLAGYHPIVPSLLLSLMAFMIGNRFGHNPPAPVAASSSL

SEQ ID NO: 28076 - protein, 357 aa, Pectobacterium atrosepticum SCRI1043
MSQFEQDAHLKQQSDRALSDHELQADHTRQKTHELPAHFDFQQAGKQVLSIERDGLAQLDQYIDDNFTLACKNIFHCKGKVVVMGMGKSGHIGCKIAATFASTGTPAFFVHPGEASHGDLGMVTPHDIVIAISNSGESHEILSLIPVLKRQKVFLICMTSAPESTMGKAADIHLCVHVPQEACPLGLAPTTSTTATLVMGDALAVALLQARGFTAEDFALSHPGGALGRKLLLRVSDIMHSGDEIPHVPHDASLRDALVEITRKNLGMTVICEADMKIQGIFTDGDLRRIFDMNIDLNSARIADVMTAGGIRVAPQTLAVDALNLMQSRHITSVLVAENDRLVGIVHMHDMLRAGVV

SEQ ID NO: 28077 - protein, 390 aa, Pectobacterium atrosepticum SCRI1043
MKFVDEATILIVAGDGGNGCISFRREKYIPNGGPDGGDGGDGGDVYLLADENLNTLIDYRFEKSFRAERGQNGQSRDCTGKRGKDITIKVPVGTRVLDQGTGEVLGDMTRHQQSLMVGKGGWHGLGNSRFKSSVNRAPRQKTNGTKGEERELTLELLLLADVGMLGLPNAGKSTFIRAVSAAKPKVADYPFTTLVPSLGVVRMDSEQSFVVADIPGLIEGASDGAGLGIRFLKHLERCRVLLHLVDLAPIDESNPIENAKVIINELEQYGAGLAEKPRWLVFNKVDLIDKAEAEKRAKEIAAALGWDDKYYLISAANREGVNPLCWDVMNFLKANPKMMAIAESAPEKVEFMWDDYHREQLAEVEKEAEEEWDDDWDDEDDEGVEIIYQK

SEQ ID NO: 28078 - protein, 645 aa, Pectobacterium atrosepticum SCRI1043
MAKNLILWLVIAVVLMSVFQSFGPSESNGRRVDYSTFLTEVNQDQVREARINGREISVIKKDSNRYTTYIPVNDPKLLDNLLTKNVKVVGEPPEEPSLLASIFISWFPMLLLIGVWIFFMRQMQGGGGKGAMSFGKSKARMLTEDQIKTTFADVAGCDEAKEEVSELVEYLREPSRFQKLGGKIPSGILMVGPPGTGKTLLAKAIAGEAKVPFFTISGSDFVEMFVGVGASRVRDMFEQAKKAAPCIIFIDEIDAVGRQRGAGLGGGHDEREQTLNQMLVEMDGFEGNEGIIVIAATNRPDVLDPALLRPGRFDRQVVVGLPDVRGREQILKVHMRRVPLSPDMDASVIARGTPGFSGADLANLVNEAALFAARGNKRVVSMVEFEKAKDKIMMGAERRSMVMTEKQKESTAYHEAGHAIIGRLVPEHDPVHKVTIIPRGRALGVTFFLPEGDAISASRQKLESQISTLYGGRLAEEIIYGVEHVSTGASNDIKVATSIARNMVTQWGFSEKLGPLLYAEEDGEVFLGRSVAKAKHMSDETARIIDQEVKSLVERNYLRARELLMANMDILHSMKDALMKYETIDAPQIDDLMGRKKDVRPPAGWEESRSDNDSGNGGAPKAPTPVDELQTPNPDNTMSEQVDDK

SEQ ID NO: 28079 - protein, 365 aa, Pectobacterium atrosepticum SCRI1043
MSHFIFSSPRKYVQGRGVLDELGEQLKPLGTKAFLMADGIVWDIIGQRVDASLKQVSIGYHYERFNGEASSNEITRLAKLARDAGTNIVVGLGGGKTLDTAKAVADELKHNVAIVPTVASTDAPCSALSVIYTDEGVFESYRFYDKNPDLVLVDTAVCAQAPARLFASGIADGLATFVEAQAVLRSHALSMLGGKPTLAGMAIAETCEKTLLAYGYSAYKAVEKGVVTPAVESVVEANTLLSGLGFENGGLAGAHAIHNGFTAIKGDIHHLTHGEKVAYGTLTHMVLEQRPDEEIARYIRFYRAINMPTLLKDLHLENEPFENLIKVGELACSDADTLKNLDSGLTAEDVAHAIIAVDAFSKTIS

SEQ ID NO: 28080 - protein, 759 aa, Pectobacterium atrosepticum SCRI1043
MDEQLKQSALDFHQYPIPGKIQVSPTKPLATQRDLALAYSPGVAAPCLEIAADPLAAYKYTARGNLVAVISNGTAVLGLGNIGALAGKPVMEGKGVLFKKFSGIDVFDIEVDELDPDKLIDVIASLEPTFGGINLEDIKAPECFYIEKKLRERMKIPVFHDDQHGTAIICTAAVLNGLRVVEKNISDVRLVVSGAGAASIACLNLLVALGLQKHNIVVCDSRGVIFHGRDENMEETKAAYAIEDNGARKLADVIPDADIFLGCSGPGVLTPDMVKTMAPRPLIMALANPEPEILPPLAKEVRPDAIICTGRSDYPNQVNNVLCFPFIFRGALDVGATTINEEMKLACVHAIADLALAEQSEVVASAYGDQELSFGPDYLIPKPFDPRLIIKIAPAVAKAAMNSGVATRPIEDFDAYVEKLTQFVYKTNLFMKPVFAQARQQPKRVVFAEGEDARVLHATQELVTLGLAFPILIGRPSVIEMRLQKLGLQLTIGKDFEVVNNESDPRFKEYWSEYFELMKRRGVSQEKAQRAVIGNPTLIGSIMVHRGEADALICGTIGTYEEHFDVVEKVFGYREGVHTAGAMNALMLPSGNTFIADTYVNADPTPEQLAEITLMAAESVRRFGIEPKVALLSHSSFGTSDSPTAQKMRATLALVNKLAPELEIDGEMHGDAALVEAIRREQMPDSPLKGSANILIMPNMESARISYNLLRVSSSEGVTVGPVLMGISKPVHILTPIASVRRIVNMVALAVVEAQTQPL

SEQ ID NO: 28081 - protein, 458 aa, Pectobacterium atrosepticum SCRI1043
MEQPSSKLKRGLSTRHIRFIALGSAIGTGLFYGSASAIQMAGPSVLLAYLIGGIVAYIIMRALGEMSVHNPQSSSFSRYAQDYLGPLAGYVTGWTYCFEMLIVAIADVTAFGIYMGVWFPAVPHWVWVLSVVLIIGAINLMNVKAFGELEFWLSFFKVATIIIMIAAGIGIIVWGIGNGGEPTGIHNLWSNGGFFSNGVMGTILSLQLVMFAYGGVEIIGITAGEAKDPHKSIPRAINSVPWRILVFYVGTLFVIMSIYPWNQVGTNGSPFVLTFQHMGITAAAGILNFVVITASLSAINSDVFGVGRMLHGMAEQGHAPKVFSRVSKRGIPWVTVVVMMMALLVAVYLNYIMPGKVFLVIASLATFATVWVWIMILFSQIAFRRRLSVDEVKALAFPLRGGIATSVFGIVFLFFIIGLIGYFPDTRISLYVGIIWILVLLVGYVWKKKHQNAVAAQN

SEQ ID NO: 28082 - protein, 392 aa, Pectobacterium atrosepticum SCRI1043
MNDSIVIVNAKRTAIGKFAGSLANTSAIDMASATIRDCLSTLPDTLAIDEVILGNVLQAGLGQNPAHQASKAAGLPFETPSLTISKVCGSGLKAVVMGAQSILSGDNQVCVTGGMENMSAAPYLLEKARHGYRMGDGKLVDIMIKDGLWCAFNDYHMGTTAENIAERYQLTREEQDQVALASQQKAVAAIEAGRFKAEITPLSLRSKKETRIFDRDEFPRADTTLASLAALRPAFSANGTVTAGNASGINDAAATLVLMRESEAKKQGITPLARIRSWASAGVPSEVMGLGPIPATQKALLKAGLTIGDIDLIEANEAFAAQFLAVQRDLHLDPEKVNVNGGAIALGHPIGASGARILVTLVHALHSYNKTLGLATLCIGGGQGIAMIVERV

SEQ ID NO: 28083 - protein, 554 aa, Pectobacterium atrosepticum SCRI1043
MCSIFGVLDLKSDPVELRKKALELSRLMRHRGPDWSGVYASDKAILAHERLSIVDVNTGAQPLYNAERTHILAVNGEIYNHQALRQQYGDRYAFQTGSDCEVILALYQEKGPEFLDELRGMFAFALYDSEKDAYLIGRDHLGIIPLYMGYDEHGNLYVASEMKALVPVCRTIKEFPAGSYLWSKDGEIREYYQRDWFDYDAVKDNETDKVALHDALEEAVKSHLMSDVPYGVLLSGGLDSSVISAITKKYAARRVEDDARSEAWWPQLHSFAVGLEGAPDLKAAQEVAKHLGTVHHEIHFTVQEGLDAIRDVIYHIETYDVTTIRASTPMYLMSRKIKAMGIKMVLSGEGSDEVFGGYLYFHKAPNAKELHEETVRKLLALHQYDCARANKAMSAWGVEARVPFLDKNFLDVAMRINPRDKMCGNGKMEKHILRECFESYLPHSVAWRQKEQFSDGVGYSWIDTLKEVAANQVTDQQLETARFRFPYNTPGSKEAYLYREIFEELFPVSSAAECVPGGPSVACSSAKAIEWDESFKTLDDPSGRAVGVHQSAYK

SEQ ID NO: 28084 - protein, 552 aa, Pectobacterium atrosepticum SCRI1043
MSEAEARPTNFIRQIIDEDLASGKHDHIQTRFPPEPNGYLHIGHAKSICLNFGIARDYQGQCNLRFDDTNPVKEDIEYVESIKRDVEWLGFSWSGDVRYSSDYFDQLHAYAVELIGKGLAYVDELTPEQIREYRGTLTAPGKNSPYRDRTVQENLALFEKMRNGGFAEGTACLRAKIDMASSFIVMRDPVLYRIKFADHHQTGNKWCIYPMYDFTHCISDALEGITHSLCTLEFQDNRRLYDWVLDNISIPCHPRQYEFSRLNLEYAIMSKRKLNQLVVENVVEGWDDPRMPTISGLRRRGYSASSIREFCVRIGVTKQDNNVEMAALESCIRDDLNENAPRAMAVLDPVKVVIENLPAGHEEFVAMPNHPNKPEMGSRQVAFSREVYIDRADFREEANKQYKRLVLGKEVRLRNAYVIKADRIEKDEQGTITTIYCSYDAETLSKDPADGRKVKGVIHWVSAAHAVPAEFRLYDRLFSVANPAAADDFLSTINPDSLKITQGFVEASLVQAEVEKAYQFEREGYFCADRVYSSAEHLVFNRTVGLRDTWVG

SEQ ID NO: 28085 - protein, 598 aa, Pectobacterium atrosepticum SCRI1043
MKIRVADFIVQHLRNIGVDTVFLLNGGGMMHMVDALARCEGMHYVCSHHEQASAIAADAYARLSGKLGVCYATAGPGATNILTGVVGAWQDSSPALFITGQSKSTQTIAMSGIKGLRQFGTFEVNTVPIMESVTKYSHMLTDASTIKYHLEKAIHEATSGRPGPVLLDIPLDIQGALIDPETLQGFIDEEPAALAPTENEIQQIIAAVSGAKRPVILAGVGVRVANASEAFRKLIEEWQIPVVTTQLGKDVMYYEHPLFVGHSGPKGDRAGNFAVQTADVILSLGTSLHGQTTGWENKLFAPTATKIQIDLDDAVLEREQINVNLKVRAGVAEFIESIKPFIMPHASEKWRACCHSWKTRYPVHAEPHQHEEDGANFYDFAEILSQLLPENACVVSDAGSAFYVTGQAIRLKDGQRFISSGSLGAMGYALPAANGCSLLDRNRPIVCVTGDGSLMTNVHELATMRMEQRNVKLFVINNSGYVSMRNTHRDFFQGLIVGADYASGVFIPAMESLAKSYELPYLCCKTDEEIRNTIKEALEIDGPVLVEVITMKNQRIIPTVASKRLPDGRMVSTPIHEMQPALPDDVIEKEMSAAILED

SEQ ID NO: 28086 - protein, 515 aa, Pectobacterium atrosepticum SCRI1043
MTEPLLNITNLAKSFSGVWALSSAQLTVQPGEIHALLGENGAGKSTLLKALAGAQPQTSGDIWFGGQQLLPLESPVERQKRGIITIYQEFNLLPNMSVAENMFLGREPQRSGLFVDALAVNREAKAVLDYLKLNIAPTTQVARLSVAQQQMVEIARALTLNAKLIVMDEPSAALSDSEVDSLHRVVRELKGRGVSVVYVTHRLHEVFQLCDRFTVFQDGRYTGSGDVASTNVQEIIRLMVGRDVVFNRRPPSETHHQDKPVRLAVKGLSREKPPLDAHGIALKDISFQVHAGEVLGIAGLVGAGRTEIARCLFGADGFSTGEFMLDDAPYHPSTPLHALSQGIALVPEDRKKEGAVLGLSIRENISLSNLSSLMRWRWFVNTRKEDDLIDAYRQALHIKMVNSDQEVRKLSGGNQQKVILARCMALNPKVLIVDEPTRGIDVGTKSEVHQVLFDMAKRGVAVIVISSDLPEIMAISDRIITLSEGRISGEIHGDDATEEKLMTMMAICHDALHAA

SEQ ID NO: 28087 - protein, 367 aa, Pectobacterium atrosepticum SCRI1043
MIAIQAPQTYLNRDGVIRSVGEYAAPYASTILIITSPQAWKTTADAVEHSLNEHGLRYQVEFLPGDCTKPAIETLTAQARTFSAELILGIGGGRVLDVAKAVGDILGQIPVIAVPTIAATCAAWSPISVIYNESGAHNGPFPLTRLPVWVLVDSEIIAHSPSRYLKAGIVDALAKWYEFQPYLRHGDDGLALALKAQAAKLAVETFNTYGEQAIADNEQGLVTPALRRVIDAVIALAGVANSMKDEVPRIGVAHAIHNSMTRLPELHDWLHGEKVGFGLAAQAFLEHDNDADREELFTQLRRYGSPITLSALGLNERPLLVESIAQNVKIAPKIAARLPFATDAERIQQALWHTQTLEGHVVDSHAA

SEQ ID NO: 28088 - protein, 677 aa, Pectobacterium atrosepticum SCRI1043
MPASETTTQQDRLNPVVFYTSAGLILTFSLMTMLFNKEANEWITHALNWVSATFGWYYLLAATLYIVFVIFIASSRFGSIKLGPEQSKPEFSLMSWAAMLFAAGIGIDLMFFSVAEPITQYMMPPEGQGQTMEAARQAMVWTLFHYGLTGWSMYALMGIALGYFSYRYNLPLTIRSALYPIFGKRINGPIGHSVDIAAVLGTIFGIATTLGIGVVQLNYGLKVLFQIPENLTVQASLILLSVIMATISVTSGVNRGIRFLSELNVLLALGLILFLLFWGDTEFLLNALVLNVGDYINRFTGMTLNSFAFDRPTEWMNSWTLFFWAWWVAWAPFVGLFLARISRGRTIRQFVVGTLIIPFVFTLLWLSIFGNSALYQVIHGNLDFANEVMQHPERGFYSLLAQYPGFSLSASVATITGLLFYVTSADSGSLVLGNFTSRLADINNDAPNWLRVFWSVAIGLLTLGMLMTNGISALQNTTVIMGLPFSFVMFFIMAGLYKSLRVEDYRKASSLQTSAPMPISGDDRLNWKQRLSRVMNFPGTTHTQKMLDNVCKAAMDDVARELRLRGASVEVNELPPVEDERLNHLELLVDLGDEQNFLYQIWPQRYSVPAFTYRARSGKSDYYRLETFLLEGSQGNDLMDYSKEQVINDILDQYERHLNFLHLNREAPGNTLTFPDA

SEQ ID NO: 28089 - protein, 248 aa, Pectobacterium atrosepticum SCRI1043
MLSIENLKVSVEGKEIIKGLNLTIKPGEVHAIMGPNGSGKSTLSATLAGREEYEVTDGSVSFKGKDLLELSPEDRAGEGVFMAFQYPVEIPGVSNQFFLQTSVNAVRKYREQEPLDRFDFADFIEEKIKLLNMPEDLLTRSVNVGFSGGEKKRNDILQMAALEPDLCILDETDSGLDIDALKIVSNGVNSLRDGKRSFIIVTHYQRILDYIKPDHVHVLYQGRIVKSGDFSLVKQLEEQGYGWLTDEQ

SEQ ID NO: 28090 - protein, 116 aa, Pectobacterium atrosepticum SCRI1043
MTTPTIEKIQRQIAENPILLYMKGSPKLPSCGFSAQTVQALSSCGERFAYVDILQNPDIRAELPKYANWPTFPQLWVDGELVGGCDIVVEMFQRGELQQLIKETADKYKAQQADQE

SEQ ID NO: 28091 - protein, 315 aa, Pectobacterium atrosepticum SCRI1043
MPDMKLFAGNAIPELAQRIANRLYTSLGDAAVGRFSDGEVSVQINENVRGGDIFIIQSTCAPTNDNLMELVVMVDALRRASAGRITAVIPYFGYARQDRRVRSARVPITAKVVADFLSSVGVDRVLTVDLHAEQIQGFFDVPVDNVFGSPILLEDMLQQNLENPIVVSPDIGGVVRARAIAKLLNDTDMAIIDKRRPRANVSQVMHIIGDVAGRDCVLVDDMIDTGGTLCKAAEALKERGAKRVFAYATHPIFSGNAYENIKNSVIDEVIVCDTIPLAENIRSLPNVRTLTLSGMLAEAIRRISNEESISAMFEH

SEQ ID NO: 28092 - protein, 509 aa, Pectobacterium atrosepticum SCRI1043
MRIGVPRERLTNEARVAATPKTVEQLLKLGFTVSIEREAGKLASFDDAAYEEVGASIVDSSEVWQSDIVLKVNAPQDDEIELTRGGSTVVSFIWPAQNPELLEKLAARQVTVMAMDSVPRISRAQSLDALSSMANIAGYRAIVEAAHEFGRFFTGQITAAGKVPPAKVMIIGAGVAGLAAIGAAGSLGAIVRAFDTRPEVKEQVKSMGAEFLELDFEEEAGSGDGYAKVMSEAFIKAEMELFAAQAKDVDIIVTTALIPGKPAPRLITKEMVLSMKPGSVIVDLAAQTGGNCELTVADRVTVTQNGVKIIGYTDLPSRLPTQSSQLYGTNLVNLLKLLCKEKNGEIDVDFDDTVIRGVTVVKEGEITWPAPPIQVSAQPQQAKPAAAAVKIEAKPTSPWKKYAFLVIAILLFGWLANVAPKEFLSHFTVFALSCVVGYYVVWNVSHALHTPLMSVTNAISGIIVVGALLQIGHGGWVSFFSFIAVLIASINIFGGFTVTQRMLKMFRKN

SEQ ID NO: 28093 - protein, 192 aa, Pectobacterium atrosepticum SCRI1043
MPPTAFALNDFITRFQLQLPPSLRPVHQQRQAAVLVPIICHPTPTLLLTRRSADLRKHAGQVAFPGGAADKTDRSIIETALREAQEEVAIPPENVQVLGVLPPLDSVSGFQVTPVVGLIAAQTRFHPNEDEVAELFEMPLDEAFALTRYYPLDIERKQQRHRVYLSWYQQQFVWGLTAAIIHQLALQISDRP

SEQ ID NO: 28094 - protein, 70 aa, Pectobacterium atrosepticum SCRI1043
MSNKMTGLVKWFDAGKGFGFITPDNGSKDVFVHFSAIQSNDFKTLDEGQKVEFTIENGQKGPSAGNVVAL

SEQ ID NO: 28095 - protein, 594 aa, Pectobacterium atrosepticum SCRI1043
MVGYFFPIQVHYMLNDKDLSTWQTFRRLWPMISPFKAGLAVAAIALIINAAGDTLMLSLLKPLLDEGFGKADRSVLLWMPLVVIGLMLVRGASGFVSSYCVSWVSGKVVMNMRRRLFSHIMGMPVAFFDQQSTGTLLSRITYDSEQVAASSSGALITVVREGASIIGLFILMFYYSWQLSIILIVIAPIVSIAMRMVSKRFRSISKNMQDTMGHVTTSTEQMLKGHKEVLMFGGQDVETKRFEQVSNRMRQQGMKMVSASSISDPIIQLIASLALAFVLYAASFPSVMETLTAGTITVVFSSMIALMRPLKSLTNVNAQFQRGMAACQTLFAILDMEQERDTGKREIERAKGELEFRQVNFAYPARENLALKNINLHIPVGKTVALVGRSGSGKSTIASLITRFYDIQSGEILLDGHDLREYRLSSLRNQVALVSQNVHLFNDTIANNIAYARNENYSREEIERAAKMAYAMDFINKMEHGLDTVIGENGVMLSGGQRQRIAIARALLRDSPILILDEATSALDTESERAIQAALDELQKDRTALVIAHRLSTIEKADEILVVEDGRIIERGNHTALLATNGAYAQLHRMQFGE

SEQ ID NO: 28096 - protein, 456 aa, Pectobacterium atrosepticum SCRI1043
MSLDTHLPNAGTKRTQLKRTLTLWPVVMMGLAYMQPMTIFDTFGIVSGLTDGHVATAYAFALVAILFTALSYGKLVKRFPSAGSAYTYAQKAISPHVGFMVGWSSLLDYLFMPMINILLAKIYLEAIFPGVPSWIFVAALVGLMTLFNLRGINLVANLNSIIVVVQVAIMAVFLGLVIHGVYLGEGAGTLTSTRPFWSEDAHVVPMITGATILCFSFLGFDGISSLSEETHDAGRVIPKAIFLTALFGGVIFVAVAYFLQLYFPDISRFKEPDASQPEIMLYVAGKFFQSVILVFSCVTVLASGMAAHAGVSRLMYVMGRDGVFPERFFGYIHPKWRTPSLNVLLVGVIALSAVSFDLVTATALINFGALVAFTFVNLSVISQFYIRERRNRTVKDTINFLVLPVMGALTVGALWVNLEASSMTLGLVWATIGLLYLAFVTRSFRQPVPQCSEEPV

SEQ ID NO: 28097 - protein, 355 aa, Pectobacterium atrosepticum SCRI1043
MGQKYLFIDRDGTLIAEPPEDFQVDRLDKLALEPDVIPSLLALQKAGYTLVMITNQDGLGTDSFPQETFDPPHNLMMQILTSQGIHFEHVLICPHLPADNCTCRKPKTELVTAYLNGGLMDVANSYVIGDRQTDIQLAQNMGITGLLYQRGGLNWQAITDQLTKRNRHAHVNRVTRETAIDVNVWLDQEGGSKINTGVGFFDHMLDQIATHGGFRMNIEVKGDLYIDDHHTVEDTGLALGEALNNALGDKRGIGRFGFILPMDECLARCALDISGRPHLEYKAEFNYQRVGDLSTEMVEHFFRSLSYSMACTLHLKTKGRNDHHRVESLFKVFGRTLRQAIRVEGDTLPSSKGVL

SEQ ID NO: 28098 - protein, 286 aa, Pectobacterium atrosepticum SCRI1043
MKADNPFTLLLPAAMAKVAEDAGVYKATKQPCTTFYLAITAGVFISIAFVFYITATTGTATIPFGIAKLIGGICFSLGLMLVVVCGADLFTSTVLIVIAKASGRITWKQLACNWANVYVGNLIGALFFVGLIWFSGEHMVANGAWGLNVLQTAEHKLEHTFVEALCLGILANLLVCLAVWMSYSGRTLTDKMFAMILPVAMFVSSGFEHSIANMFMVPMGIVIKNFAAPEFWNAIGMVPSQFEHLTVSHFITDNLIPVTLGNIIGGGVMVGLTYWVIYLRGGDKHH

SEQ ID NO: 28099 - protein, 282 aa, Pectobacterium atrosepticum SCRI1043
MIRPFIKWAGGKTRVLPDLLPLLPKGDCLVEPFVGGASVFLNTDYPSYVLADINPDLINCYRVATTDTDALISTAKVLFQHGNNKAEYETRRRSFNYQRSTGYGTGIEQAALFLYLNRHGYNGMCRYNREGGFNIPFGKYRAPYFPEQEIRQFAEKANDTGAIFVCADFKETLRVYAEPDTVIYCDPPYLPVSDTANFTQYHHSAFTHEHHRQLAKYLKHVRYETDAAVVISNSDTPATREIYQHYQFHEVSVSRSLGAAVASRKKARELIGVLTAGMLRDA

SEQ ID NO: 28100 - protein, 341 aa, Pectobacterium atrosepticum SCRI1043
MTMPVPHAGPTPLCSNRMQVHSITQETPDVWTISLVNHDFYPYQPGQYALVSIANSEETLRAYTISSSPGLSRFITLTVRRLDDGVGSRWLTQTLKIGDYLWLSDAQGEFTCANAVSDRYLMAAAGCGVTPIMSMCRWLLANKPQIDIHIIFNVRNPQQVIFASEWQDLVQRYPQQLHLTLMAEFDAAPGFLAGRISGDLLVERVPDITNRTVMTCGPAPYMNQIETLSQQLGVASNRIFKEQFRPTDEVVDEDADQITLTISRPLKNLRVPVGISLLAALEANKVHVLAACRAGVCGSCKTRVLSGKYTTTSTMTLTPAEIEQGYVLACSCQLQGDTVLA

SEQ ID NO: 28101 - protein, 362 aa, Pectobacterium atrosepticum SCRI1043
MHTTTVRVQVGPANYFSFPGAIDKLLEFYPPEVLKNALWIYGERAIAAARPYLPAEFEAPSARRVQFSAHCSEGEVAKLVAQAGDDCQVVIGVGGGAVLDTAKVAARHIGVPLVAIPTIAATCAAWTPLSVWYNDAGQALRFEIFPDANHLVLVEPRIMLAAPVEYLLAGVGDTLAKWYEAVVLSPQPETLPLSVRLGLQTALDIRNVLLQQSAAALEAVKRGELTQDFLDVVDAIIAGGGMVGGLGERYTRVAAAHAVHNGLTVLPQTERFLHGTKVAYGILVQSALLGDSETLLQLKAAFKVFGLPTSLAELDVDIHDRAALQAVIARTLQAGESIHYLPLSLNEDVLLAAFNTVELSGK

SEQ ID NO: 28102 - protein, 329 aa, Pectobacterium atrosepticum SCRI1043
MNSNQGAMMLKITFLDKGSLPETIFLKKTSFRRPQCRHEWIEYSHTSPDQVIARAKDTHVIITNKTLLTRETLAALPALKLIAVTATGTDNIDLAAAKELGITVKNVPGYSTQAVSEHVIAMMFALKHSLMAWYRDQLSDRWASQSQFSYFDHPVKDIAGSTLGIIGAGTIGREVARLALALGMKVIFAEHRGVSLCRAGYLPFEEVLRLADVISLNCPLNASTQHLINSETLALCKPTAFIINTARGGLIDERALAAVLLQRGIAGAALDCLTQEPPEKDNPLMVAAKTLPNLLITPHISWTSASSLQLLMEKTIENIDEYVQQNGHR

SEQ ID NO: 28103 - protein, 402 aa, Pectobacterium atrosepticum SCRI1043
MKNIYLDNNATTRLDPMVLEAMMPFLTDYYGNPSSIHDFGTPCRGALEKARQQVASLLGARYDSEIIFTSCATEATSTAIHSAVALAPERREIIISAVEHPATLEVCEHLARQGYTIHQIGVSAQGELDMAQYRALLSDRVALVTMMWANNETGVLFPVREMASLAHEQGALFHCDAVQAVGKIPIVLSSCDIDMLSCSAHKIHGPKGVGCLYLRRSTRFRPLLRGGHQERGRRAGTENIAGIVGMGSACELADVHLPMMSAAVEPLRDRLQKGLAQVIPSVIVMGEGQPRTPNTLNIAFEFIEGEAILLLLNHVGIAASSGSACTSGSLEPSHVMRAMNIPYTAAHGSIRFSLSRYTREKEIDQVITALPPIIERLRTLSPYWQQGKPQTVSGGEFMPTYG

SEQ ID NO: 28104 - protein, 420 aa, Pectobacterium atrosepticum SCRI1043
MMSDSKTKSITVSRRQFLLGSAALGSSLMLPGLMNSAWAAGSDAPEKKEIRVGFIPLTDCASVVMAAVKGFDKKYGITLVPSKEASWAAVRDKLVSGELDAAHILYGQLYGLQMGLSGAQSNMAALMTLNQNGQGITLANQLREANVTDLAALQKYIAASPAGTYTFAQTFPTGTHAMWLYYWLASAGIHPLNDVRTVVVPPPQMVMNMKIGNMVGYCVGEPWNQRAISEKIGFTAATSQDIWPDHPEKVLGTRADWVNANPHSARALTAAILDASRWIDASDDNRRETAGVVAGRAYINAKEETIVGRMLGQYENGLGKSWKDEHAMRFYHDGSVNYPYLSDGMWFLTQHKRWGLLTEDPDYLAVAKQVNRIDIYKQAADAVGNVPLPSGDMRSSVLIDGRRWDGSDPAGYANSFSVKK

SEQ ID NO: 28105 - protein, 404 aa, Pectobacterium atrosepticum SCRI1043
MSPIEKSKKLENVCYDIRGPVLKEAKRLEEEGNKVLKLNIGNPAPFGFEAPDEILVDVIRNLPTAQGYCDSKGLYSARKAIVQHYQARDMRDMTVEDVYIGNGVSELIVQSMQALLNPGDEMLVPAPDYPLWTAAVSLSNGNAVHYLCDESSDWFPDLDDIRKKITSNTRGIVIINPNNPTGAVYSKELLLDIVAIAREHSLIIFADEIYDKILYDDAQHHSIAALAPDLLTVTFNGLSKTYRVAGFRQGWMVLNGPKKHAKGYIEGLEMLASMRLCANVPMQHAIQTALGGYQSISEFIQPGGRLYEQRNRSWELINQIPGVSCVKPRGALYMFPRIDAKRFNIHDDQKLVLDLLLQEKVLLVQGTAFNWPYPDHVRIVTLPRIDELDMAIHKLGRFLGHYHQ

SEQ ID NO: 28106 - protein, 400 aa, Pectobacterium atrosepticum SCRI1043
MSSKLVLVLNCGSSSLKFAIIDAINGEEYLSGLAECFNLPEARIKWKMDGGKQDAELGAGAAHSEALNFIVNTILSQKPELSAQLVAIGHRIVHGGEKFTKSAIITDDVLQGIKDSVPFAPLHNPAHLIGIDEALKSFPHLTDKNVAVFDTAFHQTMPEESYLYALPYKLYKENHIRRYGAHGTSHYFVSREAAKVLNKPVEELNVITCHLGNGGSVTAIRNGECVDTSMGLTPLEGLVMGTRSGDIDPAIIFHLHDALGMDVASINTLLTKESGLLGLTEVTSDCRYVEDNYETKADAKRAMDVYCHRLAKYIGSYAALMEGRLDAVIFTGGIGENAAMVRELSLKKLGLLGFDVDHERNLAARFGKGGNIAKDGTRPALVIPTNEELVIAEDAYRLTA

SEQ ID NO: 28107 - protein, 712 aa, Pectobacterium atrosepticum SCRI1043
MSRIIMLIPTGTSVGLTSVSLGVIRSMEQKGVRLSVFKPIAQPRSGDNTPDQTTTIIRANSAINAAEPLAMSRVEALLSSNQQDVLMEEIIARYHENTKDAEVVLVEGLVPTRKHQFANALNYEIAKTLNAEIVFVLALGNDSPAQLKDRIELARSSFGGSKNKNITGVIINKLNAPVDDQGRTRPDLSEIFDDSTKASVANIDPKQLFANSPLPVLGCIPWSFDLIATRAIDMAKHLNARIVNEGDIQTRRVKSVTFCARSIPHMLEHFRPGSLLVTSADRPDVLVAACLAAMNGVEIGALLLTGGYEMDPSIAKLCERAFQTGLPVFMVDTNTWQTSLSLQSFNLEVPADDRQRVEKVQEYVARHIDTQWIDSLSAESERSRRLSPPAFRYQLTELARKAGKRIVLPEGDEPRTVKAASICAERGIAHCVLIGNPEEIQRVAAAQGVELGKGIEIVDPIVVRERYVARLVELRKSKGMTEVVAREQLEDNVVLGTLMLEQGEVDGLVSGAVHTTANTIRPPLQLIKTSPGSSLVSSVFFMLLPEQVLVYGDCAINPDPTAEQLAEIAIQSADSATAFGIDPRVAMISYSTGNSGAGSDVEKVREATRLAQEKRPDLVIDGPLQYDAAIMADVAQSKAPNSPVAGKATVFIFPDLNTGNTTYKAVQRSADLISIGPMLQGMRKPVNDLSRGALVDDIVYTVALTAIQATQL

SEQ ID NO: 28108 - protein, 585 aa, Pectobacterium atrosepticum SCRI1043
MKDDVTSESRISIDSHDLIRTLTRIVGKPHILTDKNKTERYRKGFRSGSGEALAVVFPASLLEQWRVFKASIEAGCIVLMQAANTGLTEGSTPSGNDYDREIVIINTLRLDSVQLLDEGRQVVALPGSTLWHLERVLKPLGREPHSVIGSSCIGASVIGGICNNSGGSLVHRGPAYTEMALYGRVNEQGQVELINHLGINLGDTPEAILTRLESQQYDVKDVIYDERQASDHDYIERVRDVDADTPSRFNADERRLFEAAGCAGKLSIFAVRLDTFPAEKSQQVFYIGTNQPQVLTELRRHMLADFKNLPVAGEYMHRDIFDIAETYGKDTFMMIDKLGTDKLPLFFNLKGQVDTIFSKVPFLPSHLVDRTMQFLGRLLPSHLPARMKTYRDRFEHHLMVKMAGDGIDEAHRWLEEYFHDADGEFFVCTPEEGAKAFLHRFAAAGAAIRYHAVHSNDVENILALDIALRRNDREWFEHLPADISDMLVHRLYYGHFMCHVFHQDYIVKKGVDVHELKERMLALLDQRGAEYPAEHNVGHLYQAKPQLKAFYQKSDPTNSLNPGIGKTTKLKNWGCTGCEEHHTNH

SEQ ID NO: 28109 - protein, 404 aa, Pectobacterium atrosepticum SCRI1043
MKLPIYLDYSATTPVDPRVAEKMMQCLTLDGTFGNPASRSHRFGWQAEEAVDIARNQIAELVGADPREIVFTSGATEADNLAIKGAANFYQKKGKHIITSKTEHKAVLDTCRQLEREGFDVTYLAPQRNGIIDLVELEAAMREDTILVSIMHVNNEIGVVQDIAAIGEMCRSRGIVFHVDATQSVGKLPIDLSQLKVDLMSFSGHKIYGPKGIGALYVRRKPRIRLEAQMHGGGHERGMRSGTLPVHQIVGMGEAYRIAKEEMTAEMDRLSMLRDRLWNGINDIEEVYLNGDIEQGVPNILNVSFNYVEGESLIMALKDLAVSSGSACTSASLEPSYVLRALGMNDELAHSSIRFSLGRFTTEEEIDYTIELVRKSIGRLRDLSPLWEMFKQGVDISSIEWAHH

SEQ ID NO: 28110 - protein, 396 aa, Pectobacterium atrosepticum SCRI1043
MLDNHTIAIVKSTIPLLAETGPKLTAHFYDRMFTHNPELKDIFNMSNQRNGDQREALFNAICAYATNIENLAALLPAVERIAQKHTSFNIQADQYQIVGNHLLATLDEMFSPGQEVLDAWGKAYGVLANVFIQREDDIYRSTETKTGGWSGVRPFRIVNKQLQSSVITSFTLEPTDGQPIADFQPGQYLAIYIKHDSFANQEIRQYSLTHAPNGKSYRIAVKREAQGTVSGYLHDTAREGDIVHLAAPHGDFFLDIPTDTPVALISGGVGQTPMLGMLHTLKQQDHQAKVLWLHAAENGTAHAFTDEIEQTGQALPHFDHHIWYREPQQTDRPGEDYHHSGLMQLASLKGELTTPDMHYYLCGPVVFMQFVAQQLLAMGIPAEQLHYECFGPHKVV

SEQ ID NO: 28111 - protein, 301 aa, Pectobacterium atrosepticum SCRI1043
MSEVQTHCGFVAIVGRPNVGKSTLLNQLLGQKISITSRKPQTTRHRIMGIHTEGPYQAIYVDTPGLHIEEKRAINRLMNRAASSSMGDVELIIFVVEGTHWNDDDDMVLNKLRDQKLPVLLAINKVDNVTDKTKLLPHIQFLSQQMDFLDVVPISAEKGSNVDTIASIVRKHLPQATHHFPEDYITDRSQRFMASEIIREKLMRFLGEELPYSVTVEIERFVTNERGGYDINGLILVEREGQKKMVIGNKGSKIKTIGIESRQDMEEMFEAKVHLELWVKVKSGWADDERALRSLGYSEDL

SEQ ID NO: 28112 - protein, 126 aa, Pectobacterium atrosepticum SCRI1043
MIRTMLQGKLHRVKVTQADLHYEGSCAIDQDFMDAAGILEYEAIDIYNVDNGQRFSTYAIAGERGSRIISVNGAAARCACVGDKLIICSYVQMSDEQARSHSPKVAYFSGENELQRQAKAIPVQVA

SEQ ID NO: 28113 - protein, 385 aa, Pectobacterium atrosepticum SCRI1043
MSAALIPDSKLPSLGTTIFTQMSALAQQHQAINLSQGFPDFDGPDYLQQRLAYHVSQGANQYAPMTGVSPLRQAIAEKTEALYGWRPDADSEVTVTAGATEALFAAIAALVRPGDEVICFDPSYDSYAPAVTLAGGVLKRIALQPPAFRVDWSSFTDLLSDRTRLVILNTPHNPSATVWQKTDFEQLWQAIAARNIFVLSDEVYEHICFDNEGHASVLAHPSLRQRAIAVSSFGKTFHMTGWKVGYCVAPAALSAEVRKVHQYLTFSVNTPAQFAIADMLREQPQHWRELPDFYRARRDRFINALAGSRFEILPCEGTYFLLADYRAISDLDDVSFCRWLTEHVGVAAIPLSVFCADPFPHTLIRLCFAKQEATLDAAAERLCQL

SEQ ID NO: 28114 - protein, 268 aa, Pectobacterium atrosepticum SCRI1043
MLINKLSIKKGLLAVMGAAMLLVQAGSVMADQLQDIEKRGVLRVAVPQDFPPFGSVGTDLQPQGYDIDIARYLAKEMKLTLQLVPVTSANRVPYLQTNKVDLVISSLGKNAEREKVIDFSRAYAPFFLGVFGPKDSALASSEALEGKSIGVTRGAVEDMVLTETAPKAAQIKRYEDNNTTLSAYLSGQVEFVATGNLVVAAIAEQNPTKAPVAKFMLKDSPCYIGMKKDEPALKAKVDALIEQALKDDTLNSLSEKWLKAPLPASIKA

SEQ ID NO: 28115 - protein, 187 aa, Pectobacterium atrosepticum SCRI1043
MAQSIPAIFLDRDGTINVDHGYVHEIDHFQFIDGVIDAMRELKDMGFALVVVTNQSGIARGKFTEDQFMQLTEWMDWSLADRSVDLDGIYFCPHHPEAGENEYRQTCDCRKPEPGMLLSAQRELHIDMAASYMVGDKLEDMQAAIGAGVGYKLLVRTGKPVTEQGEALADGVLGSLADLPKWIKTRS

SEQ ID NO: 28116 - protein, 294 aa, Pectobacterium atrosepticum SCRI1043
MKIGFIGLGIMGKPMSKNLLKAGYSLVVMDRNLEAVAEVVAAGATSAETPKQVAEQSDVIITMLPNSPHVKEVVLGENGVIEGARAGSIVVDMSSIAPLASREIAAVLAEKEIAMLDAPVSGGEPKAVDGTLSVMVGGDKAQFERCFEILKSMAGSVVHTGDIGAGNVTKLANQVIVALNIAAMSEALVLATKAGVNPDLVYQAIRGGLAGSTVLDAKAPMVMDRNFKPGFRIDLHIKDLANALDTSHGVGAQLPLTAAVMEMMQALKADDLGSADHSALACYYEKLAKVEVTR

SEQ ID NO: 28117 - protein, 555 aa, Pectobacterium atrosepticum SCRI1043
MSENYTVGDYLLDRLTQIGIQHLFGVPGDYNLHFLDHVIRNPDITWVGCANELNAAYAADGYARCRPAAALLTTFGVGELSAINGIAGSYAECLPVIHIAAAPCLASQRNGELLHHTLGDGDFSHFSRMAAEVTVAQASLTVENATAEIDRVIGEALAQHKPVYLFLPVDVAAAPVGARPYPLVIPEPLHSDDSLRAFTTAATDMLSKAKSVSLLADFLAQRFSLAGKIQRWLDKTPLPHATLLMGKGTLNEQHRSFTGTYSGSGSHESIRAHIEDADAIISIGVRYTDTITTGFSHQIPIEKNIDIQPTLARVGNQVFPSVPMSDAIAVLEKITEKFASRWDHCTITPPVLPQSEHRSALSQREFWQQIQRFLRPDDILVTDQGTSCFGAATLRLPAGCHFIVQPLWGSIGYSLPAAFGAQIAEPERRVVLLIGDGSLQLTVQELGSIIRDRLNMVIVVLNNEGYTVERAIHGSEQRYNDIAAWNWTQLPTALGANENEILCKQVRSPIALAQVLEQVNAESRLSLIEVVLPRMDIPALLHTITQSLETRNTVQ

SEQ ID NO: 28118 - protein, 221 aa, Pectobacterium atrosepticum SCRI1043
MEFYLDTADVAAVERLAGVLPIKGVTTNPSIVARGKSDIYSVLRDMQAVIGAEGQLFAQVMSRDPDVMVEEALKLREVIPSLVVKVPVTHAGLRAIKQLTELDIPTLGTAVYGAGQGFYAALAGARYIAPYVNRIDAQGGDGIALVKELQTLINLHSPQTQVLAASFRTPRQVLDCLLAGCQAITVDPAVAELFLQDPAVDDALNRFDHDWQARFGHANLG

SEQ ID NO: 28119 - protein, 452 aa, Pectobacterium atrosepticum SCRI1043
MDNQQTDGTLKRGLKNRHIQLIALGGAVGTGLFLGIAQTIKMAGPSVLLGYAIGGLIAFLIMRQLGEMVVEEPVAGSFSHFAYKYWGDFAGFASGWNYWVLYVLVAMAELSAVGIYVQYWWPDIPTWVSAAVFFLLINAINLANVKVYGEMEFWFAIIKVAAIIGMIAFGGWLLISGTGGPEATVTNLWAQGGFFPNGGLGLVMAMAVIMFSFGGLELVGITAAEADDPEKSIPRATNQVIYRILIFYIGSLAILLSLYPWGKVVEGGSPFVMIFHELNSNVVATILNVVVLTAALSVYNSCVYCNSRMLFGLAKQGNGPKVLETIDSRGVPVVAIGISALATALCVLINYLIPGKAFELLMALVVSALVINWAMISLAHLKFRAQKDKEGTVTKFKALLYPLGNYICLLFLAGILVIMFLTPGIQISVMLIPVWLIILGVGYFIKKKNQAK

SEQ ID NO: 28120 - protein, 572 aa, Pectobacterium atrosepticum SCRI1043
MEMLSGAEMVVRSLIDQGVKHVFGYPGGAVLDIYDALHTVGGIEHILVRHEQGAVHMADGYARATGEVGVVLVTSGPGATNAITGIATAYMDSIPMVVLSGQVATSLIGYDSFQECDTVGISRPIVKHSFLVKKAEDVPTILKKAFYLASTGRPGPVVVDLPKDIMSPANKLPYVYPESVSMRSYSPTVQGHKGQIRRALQTLLAAEKPIIYSGGGVINAECHEELLTLAEKLNLPVTTSLMGLGGFPGTHRQCLGMLGMHGTYEANLAMHNADVIFAVGVRFDDRTTNNLAKYCPNATVLHIDIDPASISKTVNADIPIVGDAKQVLSLMLELLAQDGAQQQFDALRDWWQGIEQWRGRHCLKYNTESDKIKPQAVIETLHRLTEGKAYVASDVGQHQMFAALYYPFDLPRRWVNSGGLGTMGFGLPAALGIKLALPEETVICVTGDGSIQMNIQELSTALQYDLPVVVINLNNRFLGMVKQWQDMIYSGRHSSSYMESLPDFVKLAEAYGHVGISIDTPDELESKLSQALAQKDRLVFVDINIDSSEHVYPMQIRGGAMDEMWLSKTERT

SEQ ID NO: 28121 - protein, 554 aa, Pectobacterium atrosepticum SCRI1043
MRYTGAQLIVRLLEQQGITTVAGIPGGAALPLYDALSQSQTIRHVLARHEQGAGFMAQGMARASGRAAVCMASSGPGATNLITAIADAKLDSIPLVCITGQVPSSMIGTDAFQEVDTYGISIPVTKHNYLVRDINELPRVIPEAFRIAQSGRPGPVWIDIPKDIQNATIELSELPDIFPLDTPPTIAQQEIERAAAMINAAQRPILYLGGGIISGVAHEQAVQLAERASLPTTMTLMALGAMPVDHPLSLGMLGMHAARSTNLILEQADLLIVLGARFDDRAIGKAEQFCPQASIIHIDIDPAELGKIRQPHVAINADVAEVLDHLLPHITPQQRGVWRATVSGLQQEFPFSMPNADDPLSHYGLVQATAQALTDDAIITTDVGQHQMWVAQSYPLRRPRQWLTSGGFGTMGFGLPAAIGAALAEPDRTVVCFSGDGSLMMNIQEMATAAEEGLNVKIVLMNNQSLGLVHQQQDMFFQQRIFAADYRYNTNFLAIAAGFGFATCDLNAAADPQAALKEALNQPGPALIHVRIDANEKVFPIVPPGAANIDMIGD

SEQ ID NO: 28122 - protein, 635 aa, Pectobacterium atrosepticum SCRI1043
MGKIIGIDLGTTNSCVAIIDGTQVKVLENSEGDRTTPSIIAYTQDGEILVGQPAKRQAVTNPQNTLFAIKRLIGRRFKDEEVQRDSNIMPYKIVAADNGDAWLEVKDQKMAPPQISAEVLKKMKKTAEDYLGETITEAVITVPAYFNDAQRQATKDAGRIAGLEVKRIINEPTAAALAYGLDKEVGNRTIAVYDLGGGTFDISIIEIDEVDGEKTFEVLATNGDTHLGGEDFDNRMINYLVDEFKKEQGFDLRNDPLAMQRLKEAAEKAKIELSSAQQTDVNLPYITADATGPKHLNIKVTRAKLESLVEELVNRSLEPLKVALQDAGLSVSEIQDVILVGGQTRMPLVQKKVADFFGKEPRKDVNPDEAVAIGAAVQGGVLSGDVKDVLLLDVSPLSLGIETMGGVMTALIAKNTTIPTKHSQVFSTAEDNQSAVTIHVLQGERKRAHDNKSLGQFNLDGIQAAPRGMPQIEVTFDIDADGILHVSAKDKNSGREQKITIKASSGLNEEEIQKMVRDAEANAEADRKFEELVQARNQGDHLLHSTRKQLEEVGDKLAADDKTAIDDALKALESALKGEDKAEIEAKIQALVQVSGKLLEASQPQPGAEGAADDASARRDDDVVDAEFEEVKDKK

SEQ ID NO: 28123 - protein, 458 aa, Pectobacterium atrosepticum SCRI1043
MSATEVSANANATVIAKFGGTSVADFDAMNRSADVVLSNPNVRVVVLSASAGITNLLVALAEGQTQETRAEHLAKIRQIQYAIIDRLTNQSVIRDEIDRMLDSVTTLSEAAALATSNALTDELVSHGELMSTLLFVEILRQRDVIAEWFDVRKIMRTDDHFGRAQPDCDVLGELTRSLLQPRLEQGLVITQGFIGSEAKGRTTTLGRGGSDYTAALLGEALNVNRIDIWTDVPGIYTTDPRVVPTAKRIDQIMFEEAAEMATFGAKVLHPATLLPAVRSDIPVFVGSSKDPAAGGTLVCNKTENPPLFRALALRRKQTLLTLHSLNMLHTRGFLAEVFSILARHNISVDLITTSEVNVALTLDTTGSTSTGGSLLSSALLTELSSLCRVEVEENLSLVALIGNKLSQACGVGKEVFGVLEPFRIRLICYGASSNNLCFLVPGDDAERVVQTLHRSLFE

SEQ ID NO: 28124 - protein, 270 aa, Pectobacterium atrosepticum SCRI1043
MKKNRAFLKWAGGKYPLVEEIRRYLPAGDCLIEPFVGAGSVFLNTEYDRYILADINSDLINLYNIVKSNADEFVTDARKLFTDEVNTSETFYLLREEFNLCRDAYRRALLFLYLNRHCYNGLCRYNMRGEFNVPFGRYKKPYFPEEEIRWFALKAQNATFICEHYQDTLEKAEKGSVIYCDPPYAPLSATANFTAYHTNNFSRADQQSLALLARRLSVESQIPVLISNHDTLLTREWYQEAVLYVVKARRTISRNILGRSKVSELLALYR

SEQ ID NO: 28125 - protein, 494 aa, Pectobacterium atrosepticum SCRI1043
MTISTPMLVTFLVYIFGMVLIGLFAYRATNNFGDYILGGRRMGSVVTALSAGASDMSGWLLMGLPGAIFISGISESWIAIGLTLGAYLNWKWVAGRLRVHTEINHNALTLPDYFTHRFEDNSKLLRVISALVILVFFTIYCASGVVAGARLFESTFGMSYGTALWAGAAATIAYTFIGGFLAVSWTDTVQASLMIFALILTPVMVVLSLGGIDSSLMVIEAKNPANLDMFKGLNFVAIISLMGWGLGYFGQPHILARFMAADSHHTIHSARRISMTWMILCLAGAVTVGFFGIAYFNNNPDQAGNVAQNSERVFIELSMLLFNPWIAGILLSAILAAVMSTLSCQLLVCSSAITEDLYKPFLRKNASQKELVWVGRTMVLLVAIIAIALSLNPENRVLGLVSYAWAGFGAAFGPVILISLLWPRMTRNGALLGMIVGAATVLIWKQYAWLGLYEIIPGFIFNSLTIFIVSLLGKAPSKTITDRFNQAEAEYQSV

SEQ ID NO: 28126 - protein, 548 aa, Pectobacterium atrosepticum SCRI1043
MNGAQWVVQALRAQGVETVFGYPGGAIMPVYDALYDGGVKHLLCRHEQGAAMAAIGYARATGKVGVCIATSGPGATNLITGLADALLDSVPVVAITGQVGSALIGTDAFQEIDVLGLSLACTKHSFLVESLESLPEVMAEAFAIANSGRPGPVLVDIPKDIQLAVGDFIPNFAPVANDVDFPEQDITLAYALLAKAQKPVLYVGGGVGMANAVPALREFLNVTDIPSVSTLKGLGAVDANHPYYLGMIGMHGTKAANLIVQECDLLIAVGARFDDRVTGKLNAFAPHASVIHMDIDPAELSKLRHANVALQGDLKAVLPALQQPLNVSAWRQQSTMMKAEYPWRYDHPGQAIYAPALLKTISERMDADTVVTTDVGQHQMWAAQHMTFSRPENFITSSGLGTMGFGVPAAVGAQVARPDDMVICISGDGSFMMNVQELGTIKRKRLPLKIVLLDNQRLGMVRQWQQLFFDERYSETDLSDNPDFLTLASAFDIPGQRITRKDQIDVALDALFNSEGPYLLHVSIDEYENVWPLVPPGAGNETMLDKTK

SEQ ID NO: 28127 - protein, 811 aa, Pectobacterium atrosepticum SCRI1043
MSALGVAPSVTGRQLHKFGGSSLADVKCYLRVAGIMAEYSHPGDLMVVSAAGSTTNQLISWLKLSQSDRLSAHQVQQALRRYQSELIAGLLPAQDAEALTAQFIRDLERLAALLDGKITDAVYAEVVGHGEIWSARLMCAVLNHRDMNAAWLDARDFLCAERAAQPQVDEGRSWPLLQQYLTQHSGQRLVVTGFICRNDAGETVLLGRNGSDYSATQIGALAGVERVTIWSDVAGVYSADPRKVKDACLLPLLRLDEASELARLAAPVLHTRTLQPVSGSDIDLQLRCSYQPEQGSTRIERVLASGTGAKIVTSHDDVCLIEVQVPSEHDFVLLQKEVEQILNRAQLKPLAIGVHQDRSLLQLCYTSEVVESALQLLTQAALPVELSERDGLAMVAMVGAGVGKNPLHSHRFYQQLKDQPIEFVRQADDGISLVAVLRVGPTEHLIRGLHHSLFRAEKRIGLVLFGKGNIGSRWLELFAREQSNLSARTGFEFVLAGVVDSTRSLLNYDGLDASRALAFFESEAQERDGEDLFLWMRAHPFDDLVVLDVTASESVADLYLDFASYGFHVISANKLAGASGGNNYRQIRDAFAKTDRHWLYNATVGAGLPVNFAVRDLRESGDSILSISGIFSGTLSWLFLQFDGTVPFTELVDQACQQGLTEPDPRVDLSGQDVMRKLVILAREAGYDIEPSQVRVESLVPPSCEQGSVDYFFENGDSLNEQMLQRLEAAQEMGLVLRHVARFDSNGKARVGVEAVRPDHPLASLLPGDNVFAIESRWYRDNPLVIRGPGAGRDVTAGALQSDLSRLVQLL

SEQ ID NO: 28128 - protein, 424 aa, Pectobacterium atrosepticum SCRI1043
MKQLNLLNALVSAFMLLVLASFLMGMQLSLDGTKLVVHGAGEVRWYWIGAGCIVVFFFQLIRPFFQQSIKKFSAPSLVLPSFDGSTARQKIVAAALIIAAIAWPFLVSRGTVDIATLTLIYVMLGLGLNVVVGLSGLLVLGYGGFYAIGAYTYALLNHYYGLGFWESLPLAGMAAALSGFLLGFPVLRLRGDYLAIVTLGFGEIVRILLLNNTEITGGPNGISQIPKPTFFGLEFGRNARDGGWDTFHNFFGLQYDPSDRIIFLYLVALLLVILTLFVINRLLRMPLGRAWEALRDDEIACRSLGLSPTRIKLTAFTISAAFAGFAGTLFAARQGFVSPESFTFAESAFVLAIVVLGGMGSQFAVILAAILLVVSRELMRDLNEYSMLLLGALMVLMMIWRPQGLLPMKRPEMKLKVAKKEDQA

SEQ ID NO: 28129 - protein, 453 aa, Pectobacterium atrosepticum SCRI1043
MTSKLKPTLGALHLWGIAVGLVISGEYFGWSYGWGVAGTLGFLVTTLFIAAMYTCFIFSFTELTTAIPHAGGPFAYSRLAFGDLGGLIAGMATLIEFVFAPPAISMAIGAYLNVQYPELNPKLAAVGAYLIFMSLNILGVKLAAMFELVVTLLAVMELLVFMGVVAPGFSLSNFVAHGWAGQNEFSPSAISGMFAAIPFAIWFFLAIEGAAMAAEEAKDPKRTIPRAYVSGILTLVVLAIGVMVMAGGVGDWRQLSDLNDPLPQAMKLIVGENSNWMHMLVWIGLFGLIASFHGIILGYSRQFFALARAGYLPPGLAKLSRFHTPHRAILAGGAIGIAAIFCDGINLQGMNLTAAMITMAVFGAIVMYIMSMLSLFRLRRSAPNMARSYRAPGYPIVPAFALVCAIICLIAMLWFNPVVGGLFCTFMLLGYLYFLTTKARREHLLEPLVADAN

SEQ ID NO: 28130 - protein, 544 aa, Pectobacterium atrosepticum SCRI1043
MDSQRNLLLIALLFVTFMLWQAWETDKNPPATTQTIQQATNAVTGDATNQGVPASGQGKLITVKTDVLSLTINTRGGDVEQAHLLAYPDILGSDKPFHLLETTSAFVYQAQSGLTGKNGPDNPANGSRPLFVTTQDSFELADGQSELRIPMTYTAADGVTYTKTFVLKRGDYALNVDYSVNNTSAQPLELTLFGQLKQSIDLPKHRDTGSNNFALHTYRGAAFSSSEDKYKKYSFSDMDEGLNITTNSGWVAMLQQYFATAWIPTTAGANTFYTSKLGNGQAAIGFKAAPVIIAAGSQQNLNATLWVGPEIQDKMAAVAPHLDLTVDYGWLWFISQPLFKLLKFLHGFIGNWGFSIIAITFIVRGVMYPLTKAQYTSMAKMRLLQPKLQAMRERIGDDKQRMSQEMMALYKSEKVNPLGGCLPLVIQMPIFLALYYMLMGSVELRHAPFALWIHDLSAQDPYYILPILMGVTMFFIQKMSPTTVTDPMQQKIMTYMPVIFTVFFLWFPSGLVMYYIVSNLVTILQQQLIYRGLEKRGLHSREKK

SEQ ID NO: 28131 - protein, 278 aa, Pectobacterium atrosepticum SCRI1043
MKKQILTVTLLAGLASVSGAAQADKLDDIQKAGVVKIAVFDSNPPFGYVDPQSKKLVGYDVDIAEAIGKALGVKVELRATNPANRIPLLSSQKVDLIAANFTITDERAKQVNFSLPYFATGQKFIARKGVLKTPDDIKTLRIGADKGTVQEITLREHYPTAKVISYDDTPLAFVALRNGNVQAITQDDAKLVGLLANVPDAQKAEFEISPFSITKEYQGVGIPKGEERLTAKINDTLINLEKQGEAKTIYDRWFGPSTKSSQPRGDFTFAPLDQQPKS

SEQ ID NO: 28132 - protein, 400 aa, Pectobacterium atrosepticum SCRI1043
MPDIADRLNNIAISASVAMTQKARDLAAQGIDVVGLSTGEPDFPTPVHAIEAAYAAALAGDTRYPPTDGTPTLRAAIQRKFKRDNHLNYDISQIITSGGARQIIFNAMMATINPGDEVVIPTPSWISYADIVKFAGGTPVPVACREEHGFKPLSQDIAHAITPKTKWLLLNYPSNPTGSVASRSELQAIADVMLDNPHVWVMTDDIYEHLIYDDCEFLTMAQVEPRLFDRVLTVNGVSKAYSMTGWRLGFCGGPVALIKAMSNVNTQNAGGIATLAQAAAIAVLDGPQDLLKERAAIYRQRRDFVLEKLAAIDGLRCHKPQGAFYLFVNIAHFIGKTSAGGRRIESDADFVMALIEEQHVVTVQGAAYGMSPYIRLSYATSMERLETGCARLGAFCNGCH

SEQ ID NO: 28133 - protein, 377 aa, Bacillus anthracis str. 'Ames Ancestor'
MYLDYAATTPMSVEALQTYTKAASQYFGNEQSLHDIGGTASSLLQVCRKTFADMIGGKEQGVFFTSGGSESNYLAIQSLLNAQNKKHIITTPMEHASIRSYFQSLKSQGYTITEIPVDKSGLIRLVDLETAITEDTVLASIQHGNSEIGTVQNIAEIGALLKKYNVLFHSDCVQTFGKLPIHVFEMGIDSLSVSAHKIYGPKGVGACYINPQVRWTQVFPETSHEKGFRPGTVNVPGIASFLTAAENILKNQQEESLRFKELRSYFLEQIQTLPLEIEVEGHSTSCLPHIIGVTIKGIEGQYTMLECNRRGIAISTGSACQVGKQEPSKTMLAIGKTYEEAKQYVRFSFGQQTTKDQIDTTIHALHTIGNQFYRGVK

SEQ ID NO: 28134 - protein, 772 aa, Schizosaccharomyces pombe
MKFYIDDLPILFPYPRIYPEQYQYMCDLKHSLDAGGIALLEMPSGTGKTISLLSLIVSYQQHYPEHRKLIYCSRTMSEIDKALAELKRLMAYRTSQLGYEEPFLGLGLTSRKNLCLHPSVRREKNGNVVDARCRSLTAGFVREQRLAGMDVPTCEFHDNLEDLEPHSLISNGVWTLDDITEYGEKTTRCPYFTVRRMLPFCNVIIYSYHYLLDPKIAERVSRELSKDCIVVFDEAHNIDNVCIESLSIDLTESSLRKASKSILSLEQKVNEVKQSDSKKLQDEYQKLVRGLQDANAANDEDQFMANPVLPEDVLKEAVPGNIRRAEHFIAFLKRFVEYLKTRMKVLHVIAETPTSFLQHVKDITFIDKKPLRFCAERLTSLVRALQISLVEDFHSLQQVVAFATLVATYERGFILILEPFETENATVPNPILRFSCLDASIAIKPVFERFRSVIITSGTLSPLDMYPKMLQFNTVMQESYGMSLARNCFLPMVVTRGSDQVAISSKFEARNDPSVVRNYGNILVEFSKITPDGLVAFFPSYLYLESIVSSWQSMGILDEVWKYKLILVETPDPHETTLALETYRAACTNGRGAVLLSVARGKVSEGVDFDHHYGRAVIMFGIPYQYTESRVLKARLEFLRDTYQIREADFLTFDAMRHAAQCLGRVLRGKDDHGIMVLADKRYGRSDKRTKLPKWIQQYITEGATNLSTDMSLALAKKFLRTMAQPFTASDQEGISWWSLDDLLIHQKKALKSAAIEQSKHEDEMDIDVVET

SEQ ID NO: 28135 - protein, 456 aa, Pseudomonas fluorescens
MSSSPPAPESALKPTLSVFDVVAITVSGVTPASSVFVIAPFAIHQAGSGVFLAFVMAGLLALMFAFCYAELGRAHNSAGGEYVYAKRVFGGMAGYATFLTVLVMLLFIPPVLATGAATYLNNALGTNFYSQTVALVIVVCNYLLGILNIKLNAWITGTCLLLEVAALLVIVWLGFSNASQPVSILLQHADSSNHGALQLAPWALVIGAVGIGLFSYNGYGPAVLLAEDMKCKGRGVHKAVLWSLVLVVIIELVPLTALLIGAPSLSAMLASPDPIGYLLTSHGNETLARVVSGGIFLSVFNAIVAIVIQIGRVVFSSGRDALWTPTINRLFTRIHPRWDSPWLATLFLAIPSAVLSFSSNLADLTSFSVLLIMLVYLIVALSALMSRVLLRDRQHPYRMPLWPLPALLAVLGAGYLLVNLFLEASLRDIMVIIGLLALSVILYGTNGRYSPAFHKL

SEQ ID NO: 28136 - protein, 327 aa, Oryza sativa Japonica Group
MASRSSWHCCLLAFFLLSSAAGAAYGQQLSTTFYAASCPTLQVVVRATVLGALLAERRMGASLVRLFFHDCFVQGCDASILLDDVPATSFVGEKTAFPNVNSVRGYDVIDQIKRNVELLCPGVVSCADIVALAARDSTALLGGPSWAVPLGRRDSTTASLSAANSDLPAPSSDLATLIAGFGNKGLSPRDMTALSGAHTIGFSQCANFRDRVYNDTNIDPAFAALRRRGCPAAPGSGDSSLAPLDAQTQNVFDNAYYRNLLAQRGLLHSDQELFNGGSQDALVQQYSSNPALFAADFAAAMIKMGNIKPLTGAAGQIRRSCRAVNSS

SEQ ID NO: 28137 - protein, 338 aa, Oryza sativa Japonica Group
MAAMSASGRRVFLLGALLLVAVSCHGGFGGVGVAEGLSTRYYAKTCPAVESVVRSVMARAVAADRRMGASVLRLFFHDCFVNGCDGSVLLDDAPPGFTGEKGAGANAGSARGFEVVDAAKARVEAACRATVSCADVLALAARDAVALLGGTTWPVRLGRKDARTASQAAANGNLPGPVSSLTSLLATFAAKGLSARDMTALSGAHTVGRARCATFRGRVNGGDANVNATFAAQLRRLCPAGTGGDGNLAPLDAETPDVFDNGYFRELTKQRGLLHSDQELFAAGGGGRSSSQDALVRKYAGNGAKFARDFAKAMVKMGNLAPAAGTPVEVRLNCRKPN

SEQ ID NO: 28138 - protein, 553 aa, Lolium perenne
KFASKFVHSSINKNRCSINCVVWTPTGRRLITGSQSGEFTLWNGQSFNFEMILQAHDQAVRSMIWSHNENWMVTGDDGGAIKYWQSNMNNVKVNKTAHRESVRDLSFCRTDLKFCSCSDDTTVKVWDFARCQEERSLTGHGWDVKSVDWHPTKSLLVSGGKDYLVELWDAKSGRELRSFHGHKNIVQCVKWNQNGNWVLTASKDQVIKLYDIRSMKELESFRGHNKDVTALAWHPFHEEYFVSGSYDGGIFHWLVGHETPQIEISGAHDNSVWDLAWHPVGYLLSSGGNDHATRFWCRNRPGDTSRDKFNGGQFQGNDQRSGFVVHGPGGFQMPEPTPGPFGGAIPGIDAQSIPGLPGLPPGPPPLPPGPHPSLLSTGQQQHYQQMPQQQHQFRPPPPNMPQLQPPAHMLPHQQGPRPSLPQLPSMPGQSPVNPPLPPMPHPMAMQGSSNQMMPQMPQHLIGMNQTHPGSGPPNNMPPMGGFPNGMGNIQGAPDSSGMQNFPMGGMYNRPQGQMAPQGQMSIPGLGSYQPGMGNVGLPPPPPQHPPPRGAAPQ

SEQ ID NO: 28139 - protein, 801 aa, Candida glabrata CBS 138
MKYSGIAVLRGVRVTPLALPRAGSRYLSLLARPPTRQIIHNTGAGYGVWVSHKVLTSSTIRRPFTAHRALNNEYNTTAGNASVKSQSATKEKNEEDRKYSKKEKEEQSETKENHSEFRDIVRLMLLVRRDWKLLLTAVGLLTISCSIGMTIPKVIGLILDQLKNALAANSVDGQPVSIDKLPPIVFGLSFYEFLGGFALALLVGIAANYGRIILLRVLSERLVARLRATVIKKTIHQDAEFFDTHKVGDLISRLGSDAYVVSRSMTQKVSDGFKALICGSVGIGMMLALSPQLSCLLLVFTPPVILSASVFGKQISTTSRELQEATGHLTKVAEEQLSGIKTVQSFVAEQREINRYNFAIRDIFNIGKKAAVINAKFFSSTSAMGDLSFLTVLGFGSYLVLQNSLTIGDLTAFMMYTEYTGNSIFGLSTFYSEIMQGAGAASRLFELTDRVPSISTTKGVKYKPGNGEIEFKNVSFAYPTRPSNMIFKNLNFKIEAGSNVCIVGPSGRGKSTVALLLEKYYKPSSGEILIDGQNINDLNSKSLRRHIGLVQQEPILMSGTIRDNIVYGLTEMPTKDEIRQVAKQCFCHNFITRFQSSYDTVIGPHGTLLSGGQKQRIAIARALIKKPRILILDEATSALDVESEGAINYTFGQLMKKKEMTIVSIAHRLSTIRRSENVIVLGHDGSVVEMGKFKELWDDPTSELSQLLNEKSTPHQTTNITVTPPPTTMAEKVVEEVVENAEPETVIEDPGSPPMYISTVSEVSAEGHELINEQIEDTIENVMKDVTSERKPLKLQKDENL

SEQ ID NO: 28140 - protein, 649 aa, Candida glabrata CBS 138
MAPVTLDPKVTADTSRYSGVQSNSGFAYGEITFGEYVFRRLLSCGTKSVFGVPGDFNLALLEHLYDDSVADALRWVGNCNELNAAYAADGYSRYTNKIGCLITTYGVGELSALNGVAGSFAEDVKVLHIVGVASSQTSCKNTDNKNVHHLIPALNDSNFVSPNHKTYYEMVKDRVCCAAEYLEDIDVACDMLDKVIEDMYRYSKPGYLFIPADFADMMVSTRNLVARPTITLEQAIAPLVGCGESQLEAIVAKVAQLIYNSSNPCILGDVLTDRYGVSQQLNSLISHCQMWNFSTVMGKSVIDESNPYYKGLYNGRECSSSVIEDFSKCDLILHFGIERNEINNGHYTIDYNEHIGANVVEFHSDYIRFFNSKTKEEDMIRGVNFVHVLNRLQPAIQADKLSFNYQECSTTSNADSKIDSQSSNEITQEFLQDIMPQYLNPGDVLVCETGSVQFGVRDYRFPSNVKYVSQGFYLSIGMALPASLGVGIGMQDYPMSHIPNPEEIEYEPKLILFEGDGSAQMTIQELSTMLHNNVKMEIFLWNNDGYTIERAIKGPTRSYNDIAPWNWTKMFEAFGDGLGSKHKTRNQVYSTREEFLTRLREKKDTKHNDPACQIELLEVKMGVLDFPEQLKCMVSAAMYNKKKEQSMSN

SEQ ID NO: 28141 - protein, 605 aa, Candida glabrata CBS 138
MASNKPILITITKNNARVFVGTWIEGSNGAHSSSDSPRLKHFGIKKKFKKIIVSSQVVWNCIVRHSKWPHVGNLPNNKWYKDMVTNAHAMEKMALNKSQLLSFNQDYLHLYSHFAGISASPRTTSRCSSIIKYDDNDTCSIGEDVIVKGGISNFKAYILLLKSFVGTGVLLLPNAFKNGGMLFSIILFIFIGIYSFWCYYILSVVKVSTKLSCFGEIGKRIYGTPMKVVILFSLILTQLGFASTGIIFVANNMKPSLEALFHWKDIKYFYLIFCQLILYIPLGLITDIKKFSITTMVSNVLMLSGLSIVFISCCSTLSIQPSEHFVENINYKFNPRNWSLFVGTAIFAFEGIGLIIPVQDSMRHPESFPLVLALVITSSAVIFLAIAIIGYMAFGNGVEVIILQSLSSGNILINLLQLLYSFAIMIATPLQNLPVVTILEDLLFAKIDIDNNNNETLDDCSIEEVSKSNNLMPLTEKKDITTQKEISSTDISEGALLPVLDCFRIVKDVLTNSQVPKVCLRLGITNLVVFLAYFGSGHLEKFVAVIGSLFCIPLVYMIPPALHLKDYSIKKDSGKILKPNIYLDVGLIMIGAISMVYTTYLSIIL

SEQ ID NO: 28142 - protein, 396 aa, Candida glabrata CBS 138
MKVVSIDKGKSERGRTVLTIVPEDKEDLFAMYQIIDIGDVVIFKKLYTNKSEDTNKKTVTDLARIKLKILNREFDIKDEYLRYKGISCPDESGTENIDSEVPIGKYISFSIVYNHPITIYKSHFNKYAEQLLAEACEPESQADTAAVVLQEGISHICLLTASSTILKQKVEFSMPKKKNAKDVEKFEAKMEKFYRATYDAIVKQLDFDQIRMVIICSPGFYAKTLLTNIMKYASQDQNDLILKNEAIFVVAHCSTGYLQGISEVLKNPEYASLLEDTKFVKEALIFDDFLEHIETEDDKAWYGKTEIYKAAEMEAIDTLLITSNTLRSDDIAEREKNMDLIEQIKAQNGKVIVFSNFRDSGVELQHIGGFACLLKYPVPDLDDLANDAPPDTLITA

SEQ ID NO: 28143 - protein, 895 aa, Candida glabrata CBS 138
MEQQGVLAPPSINERNRSLSFSKLLSRSWRKNSTSAVASDNSTDTENNAANPNMIALQKKILSSKTDSWSEAVDDEPVPSGGSQSRFTKLKNIFNNNNSNHNTSNSTRSGSSCASTVSGKSSFEKLPKDISQVRSNSIPSPQKSPYSDKKGHNATSDVEIGLVSPVSDKMNIDLPQVPTSVHASTLTGEHLKELHEYEIAKPKQEAYALNSGKNANRRRSPSTPIKPSPSLVSSQSANGQFSSTNPFNTGTGYANYKERGTVQTTNSYFNYQGLPPHARNENDSNLNAFQNGSKYAAVQEMLSLPTTPSSMNTSLTTHNKEGRNLSNVSLNEIKENEEVSEFYGMDEVPNLDSMGNKKMASSSPLRARSGSPKASNVMDSAQPFPSIVVGYDDADAETDEQSANPSRGSHISSEQKGKPELNPPKNAKFPLRRAASETDAIDLNILKSVKAASGDLSDTTDQHTKLEEIKEPRRSSRLRNKSFSNKFQDITVGPQSFEKIRLLGQGDVGKVYLVKEKRTNRLYALKIFSKSEMIKRKKIKRILAEQEILATSNHPFVVTLYHSFQSEDYLYLCMEYCMGGEFFRALQTRKSKCISEEDAKFYASEVTAALEYLHLLGFIYRDLKPENILLHQSGHIMLSDFDLSIQAKDAKVPVVKGNAQSTVVDTKICSDGFRTNSFVGTEEYIAPEVIRGNGHTAAVDWWTLGILIYEMLFGFTPFKGENTNETFSNILKKDVTFPNNNEVSRNCKDLIKKLLIKNESKRLGSKMGAADIKKHPFFKKVNWTLLRNQEPPLIPVLTENGYDFTKLSSNKNKNRANGTEKDSIDEQERIMFEERVEYDDEVSEDDPFHDFNSMSLMKQDNNSLIYGDNNSYGKIAYTPNANRSRSNSHRAFFKR

SEQ ID NO: 28144 - protein, 481 aa, Candida glabrata CBS 138
MSNIVIFGGDSHPDLVKRICENLDIEPAKVTLGKFSNGETSVQLGSSVREKDVYVIQSGCGHVNDTFLQLLILISACKSSSASRVTAVMPYFCYSRQPDIPYTVKGAPIISNPKESNPTDSRPGTPGFKLMTQKPGSESPFKSLDTAIRSTIHMENPQPMRKPAPPTPQMSQSRIPVIPGGKAQPPSGSSNDAGEMFNAQNAGYKLWVVQAGTLIANLLTAAGADHVITMDLHDPQFPGFFDIPVDNLYCKPIVQGYIKHEIPDYKDAVIVSPDAGGAKRATAIADALELSFALIHKERRSQLLKGPPDASLSSGGGVPLSPKPLVANLNNASIAGPSSTEMRRSSSSASIHSNASQSSASKYIQTTMLVGDVRDKVCIIIDDLVDTSYTINRAAKLLKDQGAKKVYAIITHGIFSGDALTRIRSSKIDKLVISNSVPQDRTVSILGKDRVDVIDVSKVFGEAIRRIHNGESISMLFEHGW

SEQ ID NO: 28145 - protein, 429 aa, Candida glabrata CBS 138
MRKCKVFVGNSHPELGNLVCQRLGIEPAPCTLKKFANGETSVQIGVSVRDEDVYVIQSGSPNINDHIMELLILVSACRGGSAKKITAVIPQFPYSKQCKMKKHRGAITARMLANLLVMAGADHVVSMDLHASQMQGFFTKPVDNLYGGPSLANWIRENVENYEEAVVVSKNPGGTKRVTALADVLKINFAMIHTDRRRAKDLYSQHRDMKQLRQRKQSLLRKNKPIIRQGDDPDEEENIILTNGIQTARIRNGHVIGDDEEDFIPESADEVAMESDAEDASVTDTYGLGGTYDAVDSEDEEEVSEAVKEKLITLVGNVNNRSAIILDDMIDRPGSLISAAEHLVKNCGAKKVYVVATHGLFTGNCLEELEESEVIDKIVVTNTYPISNDRIEKSEKLVVIDVSAIFAECIRRDHYGESISVLFDSLSTL

SEQ ID NO: 28146 - protein, 452 aa, Candida glabrata CBS 138
MLARRGVQYVWDSGIAVSSTAFLVVASALVFFMVPGIGFLYSGLARRKSALSLLWVTLMASLVGMLQWYFWGYSLALSRTATNNKFIGNLDSFGFRNVYGLNAVWTENLEVAYASFQMMFLCVTLSLVAGSTAGRGRFFPHMVYLFLFATLVYCPIVYWIWAPGGWANKWGVLDWAGGGPVEIVSAISGFVYSYFLGCRNERFLVNFRAHNVSYVTLGTTVLWFGWLLFNAASALSPNLRSVYAFLNTNISAVTGGMTWCILDYRLEKKWSTVGLCSGIICGLVAATPSSGCITLYGSLIQGIVAGICCNFATKIKHFFQVDDAMDLLAEHGVAGMIGLLFNGFFAADWVIGMDGHTTHGGGWITQNYKQMYKQIAYIGAVTGYCAAVSALLCFIIDKIPGLQLRVSADGEEKGTDDDQIGEFAYDFVEIRREFDIWGKEEDEDENEQSTDE

SEQ ID NO: 28147 - protein, 608 aa, Candida glabrata CBS 138
MFARGSRLFLYRPVIHRNSSTKTDLKKTQTWTQVKQLLRLAKPERKYIAGAVGLIAVSSAVSMSLPSVIGTLIDHASTPDAPIYGLTRNQFLLALGSVFVVGAIANSGRIIILKITGEKLVARLRTKTMKSMLSQDATFLDKHRVGDLISRLSSDASIVSKSVTSNLSDGCRATLQGVVGIGMMTYISLKLTTVMTMMVPPLGILAMLYGGKIKKISRQLQDKVGQLSKTSEEQLNSLKTVQAYAGERKELQRYSNEVRSVFNIGVKEAVASALFFGSTGLIGNIAMIGLLLVGTADSSITLGELSSFMMYGVYTGSSVFGLTGFYSELMKGCGAAERVLELQNMKTKISPTKGISPPKTLKGLPITFNNVSFAYSNGKSVLSEMNFQIHPGEHVCFVGGSGCGKSTISSLLLRYYRTGSGNISIGNYDISAFNLRKYRRMLGVVQQEPLLFNGTILDNITYGLHDKSLTDLNMALKAANCDQFIKESHMGLDTLVGPRGAQLSGGQRQRIALARVFLQNPDILILDEATSALDTKSEDIINKELQRRQEAGMTTISIAHRLSTIRHSSRVIVIEDGRVVESGSFDQLRSTRDSELNKLLKEGLEHHK

SEQ ID NO: 28148 - protein, 527 aa, Candida glabrata CBS 138
MSKDHEVVPLLYDNDLEVGSYESLPREEKYLDEHEVPQGRHLGIFSTTVLFISRMVGSGIFSTPSNIFVSCGGNSFIFFTVWLLTALFAYAGLYIFLEFGYHLPRSGGRKVFLEHSFTHPKLLMSVTVACYSIFSGVALSGSVVFGKYFLAAIGYGSETYNAGNTSKYISIGFVVLATAIHGISVRSGIYIQNALGVVKLMLILMMCLTGFYAIMIYDAPTVTQWDSPFFSFQDKSAFSLNSLASAFISAFFCFAGWDSVHSVTSEVKNPARTLKISGLCSLAICALCYTLMNVAYTKVLSYEEIANAGPLVGSVLFKKLFGAQVGGALMTGSVAVSAASNVIVVIYGISRVNQEIFREGYLPFSKVLARNWPWDAPLFSLLTCALLTCTWIIILPSEGSSFNYLISVEGYGNQVFLLLVAVGLLLFRRQKTYQEHDNSIKASTLGVYSMILLCTYLVVGPFFGDQSANKIAFLPPYEVASVAILLSCVLFWFVKFIMLPFLFNYRLVSKTTTLSDGLRITEWKAYY

SEQ ID NO: 28149 - protein, 358 aa, Candida glabrata CBS 138
MENKATLARNIGEKRVSPRSKVNGTGKSWRISYSPQRMDGVSSGRNVSKIPSPVRERLFLKNQERKPLGVSPLSNLSPNSLGRNSLEKSTYNNKLSLKDFEVGRKLGKGKFGKVYCVRHKKSGFICALKAIEKNEILQFNLLKQLKREVDIQLGMDHPNIIKLYAHFHDEKRVYLLMEHSINGELYKSLKNNGPFNDVLASHYIYQIADALHYMHKKRIIHRDVKPENVLIGFDNVVKLADFGWSILNPEGSKRKTLCGTIDYLSPEMITPREYDEQVDVWALGVLAYELVVGVPPFEENSKELTYKRILKCDLNFPESISKDAKDLISKLLVTDTTQRLSLTGVKTHPWILKNKPFW

SEQ ID NO: 28150 - protein, 681 aa, Candida glabrata CBS 138
MTSSNECGSNSPTRTADINKRIIRKHSGSQKKSPSIEASFSRDDFASRRSSTTAALLKDPSENYGTKGIPPVSIDIDIRNPAPKVIDAVTRHLSSTPNHLQMQGADMTRDLYKWAKEHPSSPPPASSENMLASSGNQFTNISTPNEFTNPNAFKRKRSMSFSAVSAHSSAMNSISNYNTNNDFRQVRNELPEIMMSHEDIRAPGGFRRSYLIQKHIEENGEEPPNNFITRNFIEFLTLYGHFAGEDLSESEEESDIEGEYDEEALETESTRLLSTHRSRKHRPAVHGHKSSTTKAVLLLLKSFVGTGVLFLPRAFHNGGWGFSSSVLLICALISYWCFVLLIDTKNHVGLDGYGDMGNHLYGSSMKLAILWSIALSQIGFSSAYTVFTATNLQVFTNNVFKQEYGITIFIIIQVLFFLPLALTRNIAKLSGTALIADLFILLGLVYVYWFSISHVSTHGVASETMLMFNKADWSLFIGTAIFTFEGIGLLIPIQESMKKPEHFHASLSGVMCVVTVVFISCGLICYCAFGADVETVVLLNFPQESIYTRAVQLLYALAILLSTPLQLFPAIKILENWTFSPHSSGKHNPKVKWLKNYFRAAIVCFSALIAWAGANDLDKFVSLVGSFACIPLIYIYPPMLHFKAFKKDKSKLFMASDIFLLFFGIIVMIYTSLQTIGMWLN

SEQ ID NO: 28151 - protein, 306 aa, Candida glabrata CBS 138
MSETKKPQSNFAIDFLMGGVSAAVAKTAASPIERVKLLIQNQDEMIKQGSLDHRYKGIVDCFQRTARQEGIISFWRGNTANVIRYFPTQALNFAFKDQIKAMFGFKKEEGYAKWFAGNLASGGIAGGLSLMFVYSLDYARTRLAADAKSSKKGGERQFNGLVDVYKKTIASDGVAGLYRGFLPSVIGIVVYRGLYFGLYDSCKPLLLTGSLEGSFIASFLLGWVVTTGASTASYPLDTVRRRMMMTSGQAVKYKGAMDCLQKIVAAEGVSSLFKGCGANILRGVAGAGVISLYDQLQMILFGKKFK

SEQ ID NO: 28152 - protein, 442 aa, Candida glabrata CBS 138
MVDNKDENKDKPAVRKPEQVEGHTVTKFFNKLNGQPESYVSKSNYVFGKTLGAGTFGVVRQARYSPTNEDVAVKILLKKALKGNDVQLQMLYDELSILQMLKHPNIVEFKDWFESKDKFYIVTQLAVGGELFDRILAKGKFTERDAVSITMQILSAVDYMHSKNVVHRDLKPENVLYIDKSDDSQLVIADFGIAKQLQDNDDLIFKAAGSLGYVAPEVLTNNGHGKPCDIWSIGVIVYTLLCGYSAFVAETVDGFLEECTQNKYPVTFHKPYWDNISDEAKNFILRALTLDPAERPTAAELMKDPWITNTRPETANIYPEIRKGFDLRKKLRDAIEIVKLNNRIKKLRSLYMVETDTDIEENVASVAFNTLASSLNDLRLHSQKRVGQLTAEQRRLKSALTQDTFAQIVRAATKNKERIWGEKTASPTPSQSSTSSTSTNKK

SEQ ID NO: 28153 - protein, 564 aa, Candida glabrata CBS 138
MTEITLGRYLFERLHQIHIDTIFGLPGDFNLTLLDKIYEVEGLRWAGNANELNAAYAADGYARLKGMACLLTTFGVGELSALNGIAGSYAEHVGVLHVVGVPSTVSRAKQLLLHHTLGNGDFDAFHRMSSVISETTFIVSDPQTAPAEIDRCIRVCYLTQRPVYLGIPANMFDSKVSSKLLDTPIDLALRPNLPDAEREVLDEIITMIKASKRPIILADACTSRHDVKKETKRLIEVTQFPSFTTPMGKGSIDEDTPRFGGVYVGNLSDPEVKTFVEESDLVLSVGALLSDFNTGSFSYSLNTRNVIEFHSDHMKIRNATFPGVQMKFVLEKLLEELPAVVKGRTDNRVVPRQKEPSTTLNGKDAIKQEWMWKHVGKFLQEGDVVVTETGTSGFGIVESKFPRNTVGISQVLWGSIGYALGSTVGAAFAAQEIDPKKRVILFIGDGSLQLTVQELSTAARWGLTPYIFVLNNNGYTIERLIHGETQGYNDIQSWDHSLILPAFGAKNYENKRVATYGEWNDMVNDKQFNKNDKLRMIEVMLPTMDGPENLKKQAKLTASINAKN

SEQ ID NO: 28154 - protein, 908 aa, Candida glabrata CBS 138
MNDETQFTERALHILTVAQKLATDHQHPQLQPIHLLAAFIETPEDGSVAYLQNLIEKGRYDYDLFKKTVNKALVRVPQQHPAPAEVTPSYALGKVIQDAVKIQKQQKDSFIAQDHLLFALFNDASIKQVFKDAGVDTEAVKQQALELRGSQRIDSRGADTNTPLEYLGKYAIDMTEQARQGKLDPVIGREEEIRSTIRVLARRIKSNPCLIGEPGIGKTAIIEGVAQRIIDDDVPTILQGSKLFSLDLAALTAGAKYKGDFEERLKGVLKEVEESKTLIVLFIDEIHMLMGNGKDDAANILKPALSRGHLKVIGATTNNEYRSIVEKDGAFERRFQKIDVQEPTIRQTVAILRGLQPKYEIHHGVRILDSALVTASQLAKRYLPYRRLPDSAIDLVDISCAGVAVARDSKPEELDSKERQLQLLQVEIKALERDKDADCTTKDRLKQAKKREASLIEELEPLRQRYNEERKGHEELTKLKKKLDELENKALDAERRYDTATAADLRYFAIPDIKKKIDDLENQVAEEEQRAGANSMIQNVVDSDTISETAARLTGIPVKKLSESENEKLIHMERDLSSEVVGQMEAVKAVSNAVRLSRSGLANPRQPASFMFLGLSGSGKTELAKKIAGFLFNDENMMIRVDCSELSEKYSVSKLLGTTAGYVGYEEGGFLTNQLQYKPYSVLLFDEIEKAHPDVLTILLQMLDDGRITSGQGKTIDCSNCIVIMTSNLGAQYINLQKGSKIMDETKTLVMEAVKQHFRPEFLNRISSIVVFNKLSRKAIHKIVDIRLKEIEDRFEMNDKHYKLELTPEAKDFLAKYGYSEDMGARPLNRLIQTEILNKMALRILKGEIQDKETVKVVLKVGKERGSASTEDEEESLDVLPNHEATIAIDNDTMDIDDDDDDDAVDVD

SEQ ID NO: 28155 - protein, 439 aa, Candida glabrata CBS 138
MSSDEDEVVRKPRNDDMRKRALRNGNAGKKKKVVKKKKKLANENLQGASGGYAWEDEIKRSWDLVAVEDEGDMATLVASIVEARKKRAAKSDVTPYQRGIIRTLILTIDSSEAMLEKDLRPNRHAMIIQQAIDFVHEFFDQNPISQMGIVTMRNGLAQLVSQVSGNPQDHIDALKSIRKQEPKGNPSLQNALEMARGLLLPVPAHCTREVLIVFGSLSSNDPGDIHQTIASLVQEQIRVKVLGLSAEVAICKELCKQTNMGDTSFYQVLLDETHLKKLFDEAVTPLPVNKINRGFTLVKMGFPTRIFEEQPTFCACHAKLIYGGYFCPNCNSKVCSLPTVCPCCDLMLILSTHLARSFHHLMPLKTFVEVPAAESFPTENCYSCQMKFPIIKSQKSNQMLTSSRYRCEECKNDYCIDCDVFIHESLHTCPGCESKATII

SEQ ID NO: 28156 - protein, 890 aa, Candida glabrata CBS 138
MTVPATKKQRIINCVSQLPYKIQLGETNDDWKITHVTGNSALYSSLDYLNYDLQGEVEHHVVGWTGEVTREASVPNFTKEDKDKHDASEEDPMYLTKEQISGLTSTLQDQMKVEDSNSTVHPVWLLRRDQSRWRSYAEKVIWPTFHYILNPSSANIQQENNWWYDYVKFNEAYANKIAEIYQKGDIIWIHDYYLLLLPQLLRMRYDQDVAIGYFHHAPWPSHEYFRCLPRRKQILDGLLGANKICFQNESFSRHFVSSCKRLLDSSAKKTKNADGFEQYQISAYGGDLIVDSLPIGVNTKQLLKDAFTKDIDSKVLAIKQAYQNKKIIIGRDRLDPVRGVLQKMRAFETFLEMYPYWRDQVVLIQVSSPTANRNSPQTIKLEQQVNELVNSINSKYGSLNFSPVQHYYMRIPKDVYLSLLRVADLCLITSVRDGMNTTALEYVTLKSNKSSANALSYGNPLVLSEFSGSSTLLKDAILVNPWDSVAVAKSINMALNMTKDEKSALEDKLWSEVPTIQDWTDKYLKSLKEIIHDSSLGTPSADKRITPALNRPILLENYKQAKRRLFLFDYDGTLTPIVQDPAAAIPTARLYSILQKLAADPKNQIWIISGRDQKFLNKWLGSKLPQLGLSAEHGCFMKDIGNEDWVNLTEKVDMSWQARVNDVMEDFTRRTPGSFIERKKVALTWHYRRAVPELGEFHASELQKELLKFTDDSDLEVMEGKANIEVRPRFVNKGEIVKRLVWHEHGKSQDMLKGINDTLPITEMPDFILCLGDDFTDEDMFRQLNTIESVWDKKFPDDRNNFGHFGFYPVTVGSASKKTVAKAHLTDPQQVLETLGLLVGDVSLFQSAGTVELDARGHVKNSESSLKSEQATAQYVLKRTASSQNVKKDK

SEQ ID NO: 28157 - protein, 733 aa, Candida glabrata CBS 138
MGSSEEHKGLLHPEYTTVGPREIRQSQRRDNDSTSNYSGSFRRGSMSMALTPTAAKNINIPVSSSMDNRHVMVDIGSPDFKTLHPQKEKQIVNSLRKNYLNTYMTGSISSSYTERRRPSSVSQAGRLGNVNTGPSVRPKDDSELRTGTPDLSYDPNLSTAGGDITRDIYKVATKAMPTPVKRMQSTDDVMSVASSQRRQSTASSLNVPGGFRREFIVTKKRKEKLLNKSNDNVDSSTTPNNSSPSINEALTDDEEDDKMPFLTKNFLEFLYMYGHFAGESFEDDFYSVDGMPYALDESSHLLSQTTKAKGPPKGTTSTRKVFFLLLKSFIGTGVLFLPNAFNNGGLFFSIFMLAFFGLYSYLCYYLLISSKIAAQVRSFGGIGLKLYGPTMKYLILFSLVITQLGFSSVYVIFTARNLKAIGEHVFKLPNVSITFLMISQLLLFIPLSFVRKISKLSLPSLFANVFILVGLVIVVFFSMKHLFYDLSGSPADGVIFGINNSRWTLFIGTAIFSFEGIGLVIPVQDSMRKPEKFPLVLGLVIICTTVVFIIVATIGYLAYGSEVDTVILLNLPQKNILVSLIQLLYSIAIMLSTPLQMFPAIRIIESGLFKQYDRWVNRSDREGHATEHNTSSGKSSWKVKWMKNAVRSSIVILVVAIACVGADNLDKFLSIIGSFACIPLVYMYPPMLHLKSTSLPRSNGKIMSRRVIIDIVLIIFGGISMVYTSYQSIFVTD

SEQ ID NO: 28158 - protein, 260 aa, Candida glabrata CBS 138
MEGGRREIEGRRHFLKRNMVAEITNQDQFTELTTQNVQDKLIAIYFHTSWAEPCKAISELYRAISEDESNKDVSFLAVDADEQAEIAELFEISAVPYFVLIRNGTILKELSGANPKEFLAALEECRRAGTESKSKESNGAVEDDEDSEDSEEETEEEMNMRLTKLVNAAPVMLFMKGNPSEPKCGFSRQIVGILREHQIRFGFFDILRDDTVRTNLKKFSDWPTFPQLYINGEFQGGLDIIKESLEEDPDFFQHTIRVNN

SEQ ID NO: 28159 - protein, 1114 aa, Candida glabrata CBS 138
MTLIVASLFLPHRPQFEVTASAGETQELIENNLVKLNPLASNEASPQARPNLDNYIRNTRSALNVPFAQGRNVSQESLLSLNNAGNTSGNIDDLVSSEQFLVNLTANATASGTPNPSYHTKGNMGRPNLGAGGSAEEFFSTSNPPSNRGASPVLSIASAPQVQNNLDSTLNNRGSPPPQQLDSQMADPTAHLLKNVSKSLLTQSLHDSTKEASAPMPSSSANSMGQSRYNHANTSIGTAVTPKSRPLPGHSNSSSIIDFSLSRNKQHAPALPALRRIQKNKVGSPTKPSPLNTQPQSSNLKYSKTLHQMHGDSAYNSDWTTGDDSDHLEEHEEPDNDDDLRQEYLVPQFGGFSTTSKVRETLLKSSRELFAQLPWTIVNSDKGNGSLKNAVNTAVNEKTTKENVKWVGTMGIPTDEIPDEIVENIAKVMEEQYNCGAVVTDDITFKGAYKNYCKQILWPTLQYQIPDNPKSKAFEDHSWQYYHRLNQQFAEKIINVYKDGDIIWIHDYHLMLVPGMVREVFPDAKIGFFLHVSFPSSEVFRCLAHREEILEGLIGANSLGFQTKEYARHFLQTSNRLLAADVSDDELKYDGRIVSVKQVPVGIDYFTLREKLKDENVLQWRHLIKERWHGKKLIVCRDQFDRIRGLYKKMLAYERFLKDNPQYIENVVLVQVCIGKSTDLELERQIMVVVDRINSMSPNISLIQPVVFLHQELDFPQYLALNSEADLFMVNALREGMNLTCHEFIGCSSDKNAPLILSEFTGSSSVLSEGAMLVNPWDIKQVAACIKEGLEMSREEKKRNWKKMVKSVITHDSDSWFVSCLQNLNNSWEFTKERSTVFNLRFETFSDDYNDTSKRLFIFKISEPPNSRMISVLNELSSKNRVYIMNSFSKVVNESLYSRVNNIGLIAENGAFVRLNGDWYNIVEDVNWRAEVVKILEDKVERLPGSYYKIADSMIRFHTENAEDQERVSGVIGEAITHINTLFDDAGIHAYLHKNIVFVQQTGLSLNAVKFLLRYYNTAASGDNVTPMINSEQSPRSRSDSISVSQKPIDFLCISGSSSPVIEPLFKLVKDQRNSGMLRHGHSIVYGDTTSSYAREHVNGSNGLFNVLNRLMRS

SEQ ID NO: 28160 - protein, 484 aa, Candida glabrata CBS 138
MMSAAGRHVRRYTPGATLGAAAAAAKAIKMTDNVSLETHTDIQAAAKEQADVRASAQGQSGDEVLKSGETVLHHAYKEDSGYGTRPIYMDMQATTPTDPRVLDVMLKFYTGLYGNPHSNTHAYGWETNKEVETARDHVAKVIRADPKEIIFTSGATESNNLAIKGVGRFYKKTKKHIITTRTEHKCALEAARGMINEGFDVTFLSVDNQGLIDMKELEEAIRPDTCLVSVMAVNNEIGVMQPLKEIGALCRKNKIYFHTDAAQAYGKVPIDVNEMNIDLLSVSSHKIYGPKGIGALYVRRRPRVRLEPLLSGGGQERGLRSGTLAPPLVAGFGEAARLMHEEYNADIAHIDKLSSKLVNGLLSLEHTSLNGSAEKRYPGCVNVSFAYVEGESLLMALRDIALSSGSACTSASLEPSYVLHALGKDDALAHSSIRFGIGRFTTEEEVDYVLKAITERVKFLRELSPLWEMVQEGIDLNSIQWSGH

SEQ ID NO: 28161 - protein, 396 aa, Candida glabrata CBS 138
MKIISITKDSANKEGATIVLLPEDKEDLFTVHQIIDKDDEVIFKKKFTTNLDEAGKKKSTDLVKLRLKIVSSEFEMRDEYLRYKGVTVADDNGNSNVDIPVGKFLSFTVNYSFPFTIIKQNFDSFMEKTLQNAANPESRSDTAAIVLQEGIAHVCLLTASSTILKQKIEYSMPKKKRATDVMKFDEKTEKFYKAIYESIKKYYDFSKIKLILLCSPGFYAKTLLEKITQYAQEERNKSIIDHQSLFLVAHCSTGYLQGISEVLKNPLYSTKLSDTKYAKDAAIMDEFMEHLNNDDFKAWYGEAEVEKAAEMGAIKYLLITDTMLHNDDIKKRKKFLALYENVESSGGKGVVFSTLHSLGEELDRMTGVACILNYPLPDLDEDLEDEESENDNEFEI

SEQ ID NO: 28162 - protein, 525 aa, Candida glabrata CBS 138
MDLKTFGGRRNFVFRNWAGIYSSRPEWYFQPSSVDEVVEIVKAAKLKNKTIVTVGSGHSPSNMCVTDEWMMNLDKMNKLLDFVENEDKTYADVTIQGGTRLYKIHKILREKGYAMQSLGSISEQSIGGIISTGTHGSSPFHGLVSSTIVNLTVVNGKGEVLFLDEKSNPEVFRAATLSLGKIGIIVGATVRVVPAFNIKSTQEVIKFETLLEKWDSLWTSSEFIRIWWYPYTRKCILWRGVKTNEPQTKSRYSWWGSTLGRFFYQTLLFISTKIYPPLTPYVERFVFRRQYGEVETLGKGDVAIEDSVTGFNMDCLFSQFVDEWGCPMDNGLEVLRSLDHSIAQAAANKDFYVHVPVEVRCANTTLPKEQPETSFRSNTSRGPVYGNLLRPYLDNTPSQCSYAPIHSVTNSQLTLYINATIYRPFHTNAPIHKWFTLFEDTMSAAGGKPHWAKNFLGSTSFAQGQVKAEGQYQDYEMRGMATRVKEWYGSDLETFKKVRREQDPDNIFLANKQWALINGIIDENE

SEQ ID NO: 28163 - protein, 409 aa, Candida glabrata CBS 138
MAERLKNIGSHLLGGSQGPSVKEQHPDDVVIVAANRSAIAKGFKGSFKDVNTDYLLTVFLKEFIDTFPPQLRDNLDLIGEVTCGNVLNPGAGATEHRGAMLAAGLPYTTPFMALNRQCSSGLTAVNDIANKIKAGQIDVGLAAGVESMTQNYASSNPLGRISDELKSDKNARKCLIPMGITNENIAKGFEITREMQDEFAAASYQKASNAVQSGVFKDEILPITLPDGKVVDVDEGPRANVTAKSLGGLKPAFIKETGTTTAGNASQVSDGVAGVLLARRSVANKLKLPILGRYVAFQSVGVPPEIMGVGPAYAIPRVLQDVGITVDDVDVFEINEAFAAQALYCINKLGINLKKVNPRGGAIALGHPLGCTGARQIATILRELEKGQVGVVSMCIGTGMGAAAVFVKE

SEQ ID NO: 28164 - protein, 296 aa, Candida glabrata CBS 138
MSRREVIYSETMNLQNVHPPSSIVGGTSNASPAGTDLYTSNPDDNESQAPTNEELYLYNELKRVSENVDSDNLEGKQQEDTGVPQNIITKQYVQTIPRTALDNESNNGNIKMESEPPINSTTRVPDNKNTHINGKEKNYKFDGPQRSSTNDNVRKSVPKNYENPSNKFSTEIPESNLPKEESTSEQPYYVNAKQYYRILKRRYARAKLEESLRICRERKPYLHESRHKHALRRPRGEGGRFLTAAEIKELKEKGELKDTEKTKSQSDAEKSIDTNADIVNSQKSGASTGDLDTKKD

SEQ ID NO: 28165 - protein, 157 aa, Candida glabrata CBS 138
MAEEEHTFETADAGSSTTYPMQCSALRKNGFVVIKGRPCKIVDMSTSKTGKHGHAKVHLVAIDIFTGKKLEDLSPSTHNMEVPVVKRTEFQLLDIDDGFLSLMNMDGDTKDDVRHPEGELGDQMQAAFDEGKDLMVTIIAAMGEEAAISFKEAPRSD

SEQ ID NO: 28166 - protein, 543 aa, Candida glabrata CBS 138
MSIIVRPRNLIKNKSVASRLSKFYSDLPDNAPTLGENEQWLNSLSSNNRIGNLKRDYDNFARFPSNESFPWTFERDSTNPKKCIVNTPLSWLTDTKYLRQFNKNKHLQSNFVDVRIVKCTSGKGGDGCVSFFRDAGRSIGPPDGGDGGHGGSIYVQAESGLDSLAKMRATYVASDGGSGQSGQLDGARGKDILITVPTGTVIKWCLQPKLIKELMEERVNNGHYTDKIKNLLENEYYDLECFNDNRYMGELPSHIQMKRSSNTSSSWLFKEKDEQYHRDKEWFVQLDKKMRLYDYGVLKSELEADKFPLFGIDLSTPTKKPICLLKGGKGGLGNMHFLTNLIRNPRFAKHGRPGLDQYFLFELKMIADLGLVGLPNAGKSTLLTKISNAKPRIGHWEFTTLEPSVGTISLGIQGPQFTVADIPGIIKGASQDKGMGIEFLRHIERSNGWVFVISLENPDPLNDLNILINELGGQEIIKQKRVLVVANKADINHTSTESRDKYMRLKEFCDSKGWDSIPISALHSHNIDKLLVKMAKCSGRLSS

SEQ ID NO: 28167 - protein, 459 aa, Candida glabrata CBS 138
MGQILSNPVIDKEHHSGADLLTAFGLCAMQGWRMSMEDAHIVEPNVLPETDDEHIAFYSIFDGHGGSAVAQFCGSKMVSILTSQESFKEKKLKQALIDTYLKTDEELLKDPEMRNDHSGCTATSILVSKLQQTLVCGNSGDSRTVLSINGVAKALSFDHKPTLTSERSRIVAADGFVEMDRVNGNLALSRAIGDFEFKSNDKLGPHEQIVTCVPDIVEHRLNYDNDEFVILACDGIWDCLSSQECVDLVHHGIMKGDMSLNDISSRIIDVCCSPTTEGTGIGCDNVSIVVVALLKENETINAWFERMRNKGYKPPHSFEEQRRSIFSYYQFPEDDEKVFDVTTKKPQDRFNQDSEISTGDEDERNKMEIDEDDNDRSGAQKKTGASIPVDLLSLEALLNGAGNIQLNQGPDNVSYISGSSLTDMINSLSRAAAMANNTRDSDSEEEDTKIIEDVSDKQE

SEQ ID NO: 28168 - protein, 319 aa, Candida glabrata CBS 138
MSTNSIKLLAGNSHPELAELLSRRLGIPLSKVGVYQYSNTETSVTIGESIRDEDVYIIQTGIGAQEVNDFLMELLILIHACKTASVRRITAVIPNFPYARQDKKDKSRAPITAKLIAKMLETAGCDHVITMDLHASQIQGFFHIPVDNLYAEPSVLNYIRTKTDLKNTILVSPDAGGAKRVASLADKLDLNFALIHKERQKANEVSRMVLVGDVQGKSCLLIDDMADTCGTLVKACDTLLEHGAKEVIAIVTHGIFSGSAREKLANSKLSKIVCTNTVPVDIDLPIVDQVDISPTLAEAIKRLHNGESVSYLFTHAPPA

SEQ ID NO: 28169 - protein, 432 aa, Candida glabrata CBS 138
MSTGDFLSKGIDLVQKAIEYDTATQYEEAYTAYYNGLDYLMLALKYEKNPKSKELIRAKFTEYLQRAEQLKQHLDEEQEAKKKESTSVGAGSGSGSGSGKDDEDTEDGKKLRGALSGAILSEKPNVKWEDVAGLEGAKEALKEAVILPVKFPHLFKGNRKPTSGILLYGPPGTGKSYLAKAVATEANSTFFSVSSSDLVSKWMGESEKLVKQLFTMARENKPSIIFIDEVDALTGQRGEGESEASRRIKTELLVQMNGVGNDSHGVLVLGATNIPWQLDSAIRRRFERRIYIPLPDVAARTKMFEINVGETPCSLTKEDYRNLGQMTDGYSGSDIAVAVKDALMEPIRKIQGATHFRDISDDPDHRKLTPCSPGDEGAIEMSWTDIEADELEEPVLTIKDFLKAIKNTRPTVNEEDLKKQEDFTKDFGQEGN

SEQ ID NO: 28170 - protein, 574 aa, Candida glabrata CBS 138
MCGIFAAYKHQDVHAFKPKALQLSKRIRHRGPDWSGNVVKNSTIMVHERLAIVGLDSGAQPITSEDGDYTLCVNGEIYNHIQLREQFPDYKFKTLSDCEPIIPAYLEHDIDAPKYLDGMFAWCLYDAKQDRIVAARDPVGITTLYMGRCSSSPKTVFFASELKCLTDDCDEITAFPPGHVYDSKTDQITRYFTPDWIDESRIPTTPVNFKDIRESLEKAVRKRLMAEVPYGVLLSGGLDSSLIASIAARETEKANEENDAADNDASASKQLAGIDNQGHLHTAGWSRLHSFAIGLPNAPDLQAARKVAKFIGSIHHEHTFTLQEGLDALDDVIYHLETYDVTTIRASTPMFLLSRKIKAQGVKMVLSGEGSDEIFGGYLYFAQAPSATEFHIESVKRVKNLHLADCLRANKSTMAWGLEARVPFLDKEFLQLCMNIDPKDKMIDQSAGRIEKYILRKAFDTSDEPDVKPYLPEEILWRQKEQFSDGVGYSWIDGLKDTAERVISDTMFSNPKIEWGEDIPTTKEAYWYRLKFDALFPQKTAASTVMRWIPKADWGCAEDPSGRYAKIHEQHVTA

SEQ ID NO: 28171 - protein, 478 aa, Candida glabrata CBS 138
MARGDGYVWTETYDPATVAFIILGAALVFFMVPGLGFLYSGLARRKSALALIWAVLMATLVGMLQWYFWGYSLAFSKTAPNNKFIGNLDSFGFRNVYGKTSEDSTYPEIAFASFQMMFLCVTVSIIAGATAERGKLLPHMVFLFIFATLVYCPITYWIWAPGGWCYKWGVLDWAGGGPVEIVSAVAGFVYSYFLGRRRENLLINFRPHNVSMVTLGTSILWFGWLLFNAATSLTPNLRSAYAFMNTNISAVTGGMTWCLLDYRSEKKWSTVGLCSGIICGLVAATPSSGCITLYGSLIQGIISGVVCNFATKIKYYLKVDDAMDLLAEHGVAGIVGLIFNALFAADWVIGMDGATKHRGGWITHNYRQMYKQIAYIGAVAGYTAVVTALICIVIDNIPGLRLRASEEAEALGMDEDQIGEFAYDYVEVRRDYYLWGVDNDNNSADNTDGNADDQSVTGSSTAATNEGHDIEKVPAGPQ

SEQ ID NO: 28172 - protein, 237 aa, Candida glabrata CBS 138
MAKSKYEYVKQFESHDTLLPQCYIVVRIDGKKFHEFSKYYDFKKPNDERALKLMNACAKNVVLQYRHEMILAYGESDEYSFVLKKDTELYKRRRDKLSTLIVSLFTSNYVALWSKFFPGTNLHPKHLPFFDSRCVIYPNLETIRDYVTWRYVDTHINNLYNTAFWQLIQKCGMNPQEAEKRLSGTVSSEKNEILFKECGINYNNEPEMYKKGSLITNKGEILHINVIDSLDSLFEGY

SEQ ID NO: 28173 - protein, 530 aa, Candida glabrata CBS 138
MAYSTSATSNWVVQKFGGTSVGKFPVQIVDEIVKYYSSSKQDGGFDNDVAVVCSARSSYTKQEGTTSRLLKCCDLASQDQEYSDIIETIRQDHVSNAERFLEDSPLVAKLIDDTNKELALVDKYLSASKVLGEVSNRTIDLVMSCGEKLSCLFITALCNDRGCKAKYVDLSNVVPSDYQTTTLDTSFYTFLVQALKEKLEPFVNSKERIVPVFTGFFGFIPMGLLNGVGRGYTDLCAALIAVALNADELQVWKEVDGIFTADPRKVPQARLLDSVTPEEASELTYYGSEVIHPFTMEQVIRAKIPIRIKNVQNPKGNGTIIYPDNVAKKGESTPPHPPEALSSTFFEKKRRGATAITTKNDIVVLNVHSNKKTLSHGFLAQIFTVLDKYKLVVDLISTSEVHVSMALPIPDSDSMKALRSAVEKLKPLGSVDIIKKMSIVSLVGKQMKQFIGIAGTMFTTLAEQGINIEMISQGANEINISCVIDEMDSIKALQSIHKKLLDELPENGSGSEQFEKAVDERLEQIKRLNL

SEQ ID NO: 28174 - protein, 433 aa, Candida glabrata CBS 138
MKRTLNRMTKITPNKYFQKNTSKDVWTLTNEFAASAVGKSEGRELINLGQGFFSYSPPQFAINAAKSALDVPLVNQYSPTRGRPSLIKSLVELYKPVFGDFIDNQNVLVTTGANEGILSCLMGILNAGDEVIVFEPFFDQYIPNIELCGGVVRYVPIHPPKEMKTRNTTGDEWQIDWDALEKTFNNKTKAVIINTPHNPIGKVFTEQELTKLAQLCVEHNTVVISDEVYEHLYFTESFPRIANINEDIANLTLTVGSAGKSFAATGWRIGWIISKNDQLLNYVSKAHTRICFASPSPLQEACAGSIEHALKIDYFPKMREEYRKKFEILTTAFDKLGLNYTQPEGTYFILVDFSKVKIPEDYVYPEELLEKAKDFRISYWLINEIGIVAIPPTEFYIKEHEKDAETLLRFAVCKEDEYLAKAAERFQLLKDYL

SEQ ID NO: 28175 - protein, 477 aa, Candida glabrata CBS 138
MVKRSASDEAPTAKRVSTKKVLNQLDDYTHRYISVRPLDVFVWGTGSMCELGLGPLAKNKEVKRPRLNPFLPQDKVGIVSIAVGGMHTLALDKDNNIWSWGCNDYGALGRDTSGAKEKLKDANDSSDDEDGDLNELESTPTKLPFKFEGTSEKDAKIVQLVATDNLSSVLLSDGTIYAWGTFRCNEGILGFYQDEIEVQREPWVVPKFAKGKIVQMAGGKDHILFLDEAGIVYAWGNGQQYQLGRKILDRFRLKTLYPLPFGLKKVKYIASGENHCFALTETGKVVSWGLNQFGQCGIGESIEDGGIVAVPSQVMNLPLDNDSIRTISAGEHHSLFLMESGALYTCGRIDMNEIGLLKKELPTYAYKDEHERVRAVPLPTKVVKTLEELDPEDDEDDREYKEMKFKNIAAGSHHSIAISQDGKLYTWGFGETYAVGQGPAGDDIEVPVKITNTATKEVDMVLAGSGGQFSVSAGYKQ

SEQ ID NO: 28176 - protein, 504 aa, Candida glabrata CBS 138
MSYNFTGTPTGHGTGGDSLTTDLNTQFDLVNMTWLGVCTSGVWLMVPGIGLLYSGLSRKKHALSLLWASLMAACLVIFQWFFWGYSLSFSHETRGNGFLGTLEFFGFRNVLGAPSVVTSVPDIVFAIFQGMFAAVTGALMLGGACERARLMPMMIFLFLWMTIVYCPIACWTWNAEGWLAKLGALDYAGSGPVHTASGHGALVYALILGKRNDPVAKKGMPKYKPHSVTSVVLGTVFLWFGWQFFNPGSAGNASIRAWYSAMNTNLAAASGGLTWLFIDYFRTGGKWTTVGMCSGIISGLVGITPGAGFVPIWSSFIIGVLSAAGCNLAVDLKNVLHIDDGLDVYALHGVGGCIGSVLTGIFAADYVNATAGSYIAPIAGGWLNHHWKQVGYQLAAICATIAWTVTITAILLLAMDQIPFLRLRLRPEEEEQGTDEAEIGEFTYQEEQEYIPEPVRSRSPGMQPKMSSIDDKITGPQQVIDSKLSESESGSNEAGSNMGEKQTV

SEQ ID NO: 28177 - protein, 1065 aa, Candida glabrata CBS 138
MTIIVASLFLPFQPQFEVNADQEQTAELVDSKLVKISGEQEAHANKNLPDVRVQETDAYATAATQPFLNSRTPLALSSAASQLNVKQGPLSSEQFLENLTANATTAGTPVNPNLGVHGHASAEDFFTTNNSTAINNNASSPPFSVSSIAPEINANVDGTDTMDVTADLLDNVNKSLLLHSVLNSGQGVSSPNAVEGHTATHLTNPNTTVITPKSRAVPESNPGVVNFDNYKERRDSQSNSAFPSMKRVASGSHGPSHLKYSQNAIDAALESDVIDDADDRQNSEAESDYETDRKVHYNVPGFGGYSSTSKRLKNSLEIFSRVPWKIVPSRKGNGALKNAINTSILEKDIKDGVKWVGTLGIPTDEIPVETTKKIVKDLNENYQSSAVIADDVTFKGAYKNFCKQILWPTLHYQIPDNPNSKAFEDHSWNYFQRLNQYFAEKIVSIYEDGDIVWVHDYHLMLVPGMVRQKLPNAKIGFFLHVSFPSSEVFRCFAQRENMLEGILGANFVGFQTAEYARHFLTTANLLLTADVSGDHLRYKGKVVSVKSTPIGIDAFDLANQLLTDPVTKWRQLIRQRWAGKKLIVCRDQFDKIRGLHKKLLAYERFLRENPDYIEKVVLIQICIGKSSDPELERKVMVVVDRINSLSISISVSQPVVFLHQDLDFAQYLALSSEADLFLINTFREGMNLTCHEFIVCSREKNSPLLISEFTGSAELLKDGAILINPWDTRHLAKCIKMGLEMPLDERKRRWKIMMKSLINNDSTNWIMSNLQAIEHCWEFSKESSTLFSLSSEELASEYQSASNKLFILKISEPPSPRMLAILRELSSRCTVYIMNTFSKTTLENLYGRVGNLGLIAEGGAYVRLNGTWYSIVDHVDWLEEVTKILDTKIERLPGSYYKLADSMVRFHTENAEDQDRVASVIGEAMTHINTLFADRGIHAYVHKNILFVQQKELSLETTKFILKFHNSGKVYNTGHSTPSKHNNEMSAMFSGQSDTIDFICVAGSTSPTIEPIFKLVKDATLAGNLRYGHTIVYGDAPSTYAREHTSGWNELFNIFQDLAKSNERQ

SEQ ID NO: 28178 - protein, 350 aa, Candida glabrata CBS 138
MAKPIILRLGSLTFAQPQWKEVEEIADVITVDDSMTREQFLKELKNPESKLSKVSVITRTVGSASQTGLFDEEIAKALPDSVIAICHTGAGYDQIQVQYFKERHIQVANVPEIVSNATADTHVFLLLGALRNFAYGHHNILAGKWQEVTSAAETPFGYDPDGKTVAILGLGRIGRAIVDRLKPFGFGKFIYHNRHRLPEDEENGCEYVASIDDFYQQADVISINIPLNTHTKHLVNKEAFDKMKEGVVIVNTARGPVVDEKALIAALKSGKVRGAGLDVFEDEPHIPKELLELPQVLTTPHMGTHSVQTRWRMEKLVLDNAISALKTGKVITPVPEIQNDNWIEEIQPVI

SEQ ID NO: 28179 - protein, 557 aa, Candida glabrata CBS 138
MSSLSRIVNLKKSSKLAKGALRVGSRGLHMRPMARLGSSTLLLRELNLALVSGGLMYLTYSYFSEKRNPLEVFKAFKEYSTIHNDGGKLISSSGGSQNSNADFKILSQEEVDRRLRAREQSFFVKRNKGLVRYDVAQLPSNNPIEDNHVEKLITFPSPDGSKPLKDREDEAFDNDLYFFGIFDGHSGAFTSAKLSTDLVPYVAHQIADVYQQHNKALTSDYTHNMNFDVALEKGFVQLDNDIVYHSLGKLLKEPTNDNMLAALPAISGSCALLAVYNSYESTVKVAVTGDSRALIGGLDSNGEWYVKSLSTDQTGDNLEEVQRIRSEHPGEDNVVRNGRVLGSLQPSRAFGDYRYKVKEIDGKKLSDLPDHLKLYFRKEPRDFKTPPYVTAKPVVTTAKVNDNTKFMVLASDGLFELLSNTEIAALVVKWMEKHSDDTKVKSLSFKKQLPKVKDLSTDSESQRPAFRYRKDQSLENMSYFLEDANVATHLIRNALSAGGQNEYVSTLVSIPAPMSRKYRDDLTVTVAFFGENNSSVVPDTQTILPNLDATTPVQSKL

SEQ ID NO: 28180 - protein, 491 aa, Candida glabrata CBS 138
MTQIDKKEVSGNIIVVSNRLPVTISKDDTGKYQYKMSSGGLVTALQGLKKTATFKWYGWPGLEIPDDEKEQVKQDLLEQFNAVPVFLSDEVADLHYNGFSNSILWPLFHYHPGEINFDENAWLAYNEANRAFAEVIFETMQDDDLIWVHDYHLMLLPQMLQEEITKRKLRNVKLGWFLHTPFPSSEIYRILPVRQEILRGVLSCDLLGFHTYDYARHFLSSVQRVLNVNTLPNGVEYQGRFVNVGAFPIGIDVSTFQDGLLKQQVKDRISQLKETFKGQKIIIGVDRLDYIKGVPQKLHAMEVFLSEHPEWRGKVVLVQVAVPSRGDVEEYQYLRSVVNELVGRINGQFGTAEFVPIHFMHKSVPFEELISLYAVSDVCLVSSTRDGMNLVSYEYIACQEETKGSLILSEFAGAAQSLNGAIIVNPWNIDEMSDAINEALTLPEVKREVNWEKLFKYISKYTSAFWGENFVHELYNTSSSSGSIKSSEEKH

SEQ ID NO: 28181 - protein, 774 aa, Candida glabrata CBS 138
MGNPYHSESDQIWRISSQDSDDGEIGNPPKLSNFGSELISDAIENINPNRSDKKLISEETRIHESHSQQLNTDINQSTRVTHSASSPLYFEDTSPSTMFVQSQASAQPSATTYDISSQDYSDSSKSFIKLKSKQDTLKQELTTRYSERRTRRFLHATNRTTKLGPALRNLTSPALAINDNNSIDNKMNETSKVNSSFDTNNAYVDFHQTKQDIYTSGEEHNNTKDNGKIGATQQNDYSDINIHECNPIQYMKMHNLPTSELSKISKAYFEKQKEENRKKALKNVNMKQSLNYDLKHYSNSFPSIESGKENNLIHNTEIEDFNGRGHSTNNHSSSYLSNSHSHPVSTQFVESANIELEKPTLKKSLSNADSYRHTQREALQNIDVNSNVRDGAIDYKRQKIALKDSEFDGILDKKKYRGIKRVEIVEPPTSTRPPSRKNVVSVNGTEYERVELLGRGGSSNVYKVRGLKNRVYALKKVSFDEFDESSVEGFKGEISLLKQLQNQNRVVQLYDFEMGSGVLYLLMECGDYDLSQVLHQRANQPFDMEFIRYHAREMVTCVKVVHDAGIVHSDLKPANFVFVKGILKIIDFGIANAVPDHTVNIYRDMQIGTPNYMAPEALVANNYTADNDGKYDQKTNKWKIGKPADIWSCGCIIYQMIYGKPPYAKYQGQERLLSIMDPNVKIEYKEVLPDKTVIPSLALELMQYCLMRNPEERWSALQILDSPFLNPLMVSQDFIKNLITTAVSYGAREGDVSPSRLEALTDSVLARLADFRMH

SEQ ID NO: 28182 - protein, 321 aa, Candida glabrata CBS 138
MPTNSIKLLAPDVHRGLAKLVAKRLGIELTDCKLKRDPSNEVSFSIGESVRDQDIFIITQIGSGTVNDRVLELLIMINASKTASARRITAIIPNFPYARQDRKDKSRAPITAKLMADMLTTAGCDHVITMDLHASQIQGFFDIPVDNLYAEPSVVRYIKENVKYEDAIIISPDAGGAKRAATLADRLDLNFALIHKERARANEVSRMVLVGDVTDKICIIVDDMADTCGTLAKAAEVLLDNGHAKSVIAIVTHGVLSGNAIANINNSRLDRVVCTNTVPFEDKMPQCPKLDVIDISSVLAEAIRRLHNGESISYLFKNYPL

SEQ ID NO: 28183 - protein, 627 aa, Candida glabrata CBS 138
MVDDTYYITPHEAALALVATAMKKARITFDALVLNSILGGVVFCSGSLLYLAIHCESPELWDKNPGVVNFLGGIVISIGLFYVVILGADLYNSNILYFSVAFLRRAVSIWDVLISWSVSWLGNLAGNLFVSYVIIYLSGIGHSEEWKAGTIKIAEQKASFSFIQTFLKAIGGNFYVALAIYLQLLAKPLHVKFLAILIPIFTLVCIGLTHVVADEAMLFLGMYNGANVSVGKYIWKLLIPATIGNFIGGFVFAAYIPFYLHLVVVERDKEKLSLPEYDERDEQPELNVDSRVVRVPRKEAESEKIDDDTEDEDDSTDKDNNEYLSEKGPLNDNSSTATDNEVQPYLEQIGPTMSRPASDISINSSESSVQRRYDYEGYRTRSHPNVPVTGGYTTSRSLREVKTTPNLKRRRTLRSPPGVFPVRGMGEPLLREKTIENPYYTKKHKGKILRETAKHIKDAHDIGDTHEDNPHTVSNENYLKLVKTIETEEEKDYRSSSGYNVLNNKPGAHLERFMTGMIKKTTSRSRGEESNDIDSRMDLSEATTQAVFPHNNISAADSYSSVGEARKTASENLGSLFKAVSRPFENPHKRPKNINDIEQQLEEAGISKRAADAANTVGGMENYSDID

SEQ ID NO: 28184 - protein, 372 aa, Candida glabrata CBS 138
MHEHSVEKTQILQKYLELPQNGKVIAEYVWVDGTGNLRSKARTLNKVITSIEQLPEWNFDGSSTNQAPGYDSDIYLKPVAFYPDPFRRGDNITVLAECFNSDGTPNKFNHRHEANKLFQAHKDEEIWFGIEQEYTLFDMYDNVYAWPKGGYPAPQGPYYCGVGAGKVYARDVIEAHYRACLYAGINISGINAEVMPSQWEFQVGPCEGISMGDQLWMARYFLHRVAEEFGVKISFHPKPLKGDWNGAGCHTNVSTKDMRVPGGMKYIEQAIEKLSKRHNEHIKLYGADNEQRLTGRHETASMTSFSSGVANRGASIRIPRPVAKEGFGYFEDRRPASNIDPYLVTGIMCETVCGAIENANMSKEYERETNEQ

SEQ ID NO: 28185 - protein, 1103 aa, Candida glabrata CBS 138
MSAISSNTVSVIKNNQIGPWKLGETLGSGSTGKVLLASNETTKQQAAVKVISKAVFEAMNNSESNGDATNALPYNIEQEIIIMKLLNHPNVLRLFDVWETNSDLYLVLEYAEKGELFNMLVERGPLPENEAVRAFRQIIIGISYCHSLGVVHRDLKPENLLLDNKLNIKIADFGMAALESEDKLLETSCGSPHYAAPEIISGLPYEGFSSDVWSCGVILFALLTGRLPFDEEDGNIRNLLLKVQKGEFEMPDDDEITKEAQDLLARLLTVDPSKRITIREILKHPLLQKYPSIKDSRSIRNLPREDTYLSPLADTNSKIDDAILQNLVILWHGKDAREIAAKLREPGANTEKTLYALLYRFKCDTQREANRARRQSKIVQRNSTIRSTAPESPSKKKTYTPQKKNKRASIIASSSKRPVSVTKTATNITVNSSITGTPKSAKRMSMNNSARKRMSALYGTRDSPTKTSRSRRSSIITKDFLGNRPRDSVISMSHNKRASKSSKRISLVPNLKRQSVTTKLMATYAKLSEDDDWEYIERETKRTSSDFATLIDEIFEYEKYEQIRKEKAELERKVRETKEREERERKERQEKELQERLERERIEKQKEDIARQMDEEISNLKKELVGDQDNEDKFRSVSEPLESKSKKIEDIEEDIDGILRNRKYSLQTRPVSRLDPGIGFIDKPRQSEQHVPETVNLEPELEETEQKILETIRRSKFLGSSFDIKKELENVKRHRQTSQPIEKEMAPPALPETLPKAVEKKNVSMDPSLRKISDIKVPQFTRKSRHFSTSNRRLSVLSMYSTKESYSNLADILKNGPGEKEMIQTAPTPKSADDSDQLFDTIDEADTPASVSREERLYEVAEESENELANKKIDIADLLNSEGSNLKSVEEQEDSMKLPKLPPLFEDGSTKETKEQSKSMIPENMQSSESQKQIEKNNSDEGGSLNPFMTKHRDVSDKGVTKEKPTVTMKTTSEQVSADKKRNMSFLRKLSKGSSSSKDNVDVTLSTSVSSKQLFSGLVNLLKGWTKYGLKGIAIDSTSQTITGKLANDNILSFRSTAFSILIFSQEKGSAVTFRKVSGSGKAVRRLSDEVKKVLSKEGVLRD

SEQ ID NO: 28186 - protein, 108 aa, Candida glabrata CBS 138
MSDTNENNASETPDVKPDLQGQGDAPKSETHINLKVSDGSSEIFFKIKKTTPLRRLMEAFAKRQGKEMDSLRFLYDGLRIQADQTPEDLDMEDNDLIEAHREQIGGAY

SEQ ID NO: 28187 - protein, 1489 aa, Candida glabrata CBS 138
MSVLIPHQQQRLRASSAAKKAAWNAMNKTVNIVSPHNNVNYVKKPSPKTNSNHLDRVIKSVNDATKRLSEAESINSNNTKSSKRKSRDTVGPWKLGKTLGKGSSGRVRLAKNIENGTLAAIKIVPKRTYNRRMRDQKMKTAGGVSSGTDSKDSSNREDPIKNGTDSALNPYGIEREIVIMKLISHPNVMGLLEVWENKSELYLVLEYVDGGELFDYLVSKGKLSEPEAVHYFTQIIQGVSYCHSFNICHRDLKPENLLLDKKNKVIKIADFGMAALELPNKLLETSCGSPHYASPEIVMGKPYHGGPSDVWSCGIILFALLTGHLPFNDDNIKKLLLKVQAGRFQLPPYLTNDAKDLITRILVTNPEKRLTINEILNHPLIKKYRNPPAHIRKLNLLGRGKSNSDLHVLEYNTPATVCLNSEEDIDQSILKSLQILWHGTPRQRLVERLLVEGATEEKLFYSLLFQYKLKHSKPISATKLQKKIEDVVLENESTKTESKDSSNEPGIDNNNDTSDFTQDGNSSEMVNELHTSAPMLEQKSQFSQHSLKSKETVPISDLPPLPPVIPTFAASSSKAFRRSKSNLSSYLKRPKLENARSRTSLFNSSSNTSITSSSISELNTRPRGNIPLSPSNITLTSLVSSRSLHNSASKKSLKNLQKRTLQNSESKRSLYSQTSISKRSLNLNDYLIGGPSNSAELPPLPKLDSNNEFEMLCDKILNTSALDNILEEEEEDITPSKNTTQTNDVHNEDTIIRKEMHDFEINVNNHQPEFKRQPSDFSVNGPDTSIFSIEPMPEGLGISKKPVRVQPTFNFIIDEDKVDDSIKVKQVSGTGPSNNVLKDISNQINNGKGIENSKLHPTSNNNYKNIRNVTAPEGNFTSKTFSLDPRRNVSQPPKESLFHSLLNNKSSKNAEENTQFESKSKQYNFMNKTAHSEFEKERLNAHRDADRSNDQNVYNETSVLAQSSTIHESPLLSIPSTLLNTSMTFKNLVDMLQENKLDDINETVAKESSAPLRKKSTKLSLAPHSNLVSDLNKRTSGYNTLASVDRSSSDLSYAIDLPTNTNIAEIVYLSGNNKQSSEKNIFMLSNDNNETELFHTDENKTSIKSAVNIFEDPPSDSTSLQTSSSESDSIPKVQRKAVSIETLNASNIITPAADVRVSLYGNNVSNSNTMPRETTEELISRFKLTPEKPQHQVQKRFSSLTQTGRNTDSIALSQSMISMFKDAEENGNNKSVKVLDQVEEENASKLTPTSPKNRVTMLFDDYEAQQNITSDQSNKSSKVIEIPNDSPIKVKVQKASTIFEKEIISAAEADENDHLRIPYESKSKKEIAQVHQQEQKEQQVRKPTESQEKAVQKTTKPSWFSKLIHGFKTTGGSGHTKLIREHSTKMTFEEVHMITVKEFGNNGIDYQLRTLDKKGDREKVEYDCKFVKGNFEFKIKIFNSGFPHQNTIITVKKKGKINSKETTDLFQRFNANIENLIKSAERNIESNPK

SEQ ID NO: 28188 - protein, 446 aa, Candida glabrata CBS 138
MEELCDIPNESLEALKIEACTTTTTRVCDLEVEENKFNVVVEDEEKIICESEEVVQDMDHKKAGYLFQRTLGAGSFGVVKRAKQLHSDEDVAVKILLKRALEKNGGLEPIYDELNIIQHLDHPNIVKFKDWFETESKFYIVTQLASGGELFDRIMHDGKYTEEDAVNIVVQILKAVEYLHSQNIIHRDLKPENLLYLDKSKDSRIVLADFGIARQLENDDDVIYRPAGSLGYVAPEVFTSDGHGKPSDIWSVGVITYTLLCGYSPFKAESVDGFLDEVTSDENPVKFQRPYWDGISELAKNFILRILDLDPACRPSATELLNDPWIQSKCSLRTDLYHNMRKNLSAKKKLQKAVELIKLNQRIKKLRQLYLLANETDSDLEEEERSSSASLSSLPSSQSSLSLSNEYGSKSKREQDEFISSLRQQTLAQIIKVATVNKDTVRKFEK

SEQ ID NO: 28189 - protein, 327 aa, Candida glabrata CBS 138
MLKSSLLLENIRKFNRFRSPYRLQDVWPLGRRSAVLVLLFIGNQGELRVLLTKRSRSLRSFSGHVSFPGGKADDAKETPEQVARRETCEEIGLPQDAAQLKRDYGMEIENLLTEMPCYISRTLLSVKPVVCLLKNTHKSDLDILEASKFAAKLNPGETSSLFSVPLRDLAPRHLRRGMATEYVDHREESLEWGGLPWLVDHFYYPVENPQEAPWLTDVQDLSSEENEVEVLRDASSHRVQCRDLWGLTAKIISDLAAIATGLITTDTSRQATVGHEDLIYGLYTNGQMQPERSQWESDMIRAKRDTNYTDVIPEAYMSDLHSRGVTF

SEQ ID NO: 28190 - protein, 535 aa, Candida glabrata CBS 138
MSITSEELNYLIWRYLQETGNELSALALQEETRVLEFEKNYKENIPVGTLVNLVQRGILYTESELLVHPNGKVKPIDENHFSENFNLVQALQIDKEKYPALVSKGRFELEKLGREDSNELESTESAGVSADHTENDVRMDQDHDEEEVFAKTLNEIFKLGKAVCLQWNPVSSNILAIGEHDSTAKLIELETTTTDDQIKLIEKTIHELRHPFATSATTGKITNQLTCLSWAHDGDSIATGVENGELRLWNKEGKLQNVFNFHKSPIIAIHWNSSNTHFISTDADNITILWDVNSGVVLQHFESKANQINGNNNNNSNQMFGVDTVWVDTDKFVIPGPGGNLLVYTMSDSRPIGKLVGHRGTISQLEFNSETKLLASAADDNTIRVWHGGNGNSIHCFYGHTQTIVSLKWVNNDMLISASMDGSVKLWDCGKKLQEITGNLIAETIVDGVPIFAGAISDDRERYAAGFMDGQVTVFNLAALLKRYSKGKKHKNHVMSIPICGDFQSAHSDDSVFDLSWKEDRLAIAYSINEGAIVQ

SEQ ID NO: 28191 - protein, 2152 aa, Candida glabrata CBS 138
MLSSDPYDPMEDAYETSGNIPDYAHDELYHNSENKSWGQVVPGKVGLYDPDYEHDACGVGFVANVNGLQSHKIVSDARSLLCNMTHRGAVSSDGNGDGAGILVGIPHGFIKREFKLDLGIEVPERGQYAVGNVFFKKDDSDDETLSEKSKAEIRVMQQKFEDTARNFNLNVVGWRNVPHDSSILGDVALSREPVILQTLVVPLDSNELVEFNETVFKTNLYLFRKFITKQFKPEDCFYVCSLSNSTIVYKGQLTPNQVYNYYHDLTNAHFESHMALVHSRFSTNTFPSWDRAQPLRWVAHNGEINTLRGNKNWMRSREGVMVSETFKDKLDSLYPIIEEGGSDSAALDNVLELLTINGTLSLPEAIMMMVPEAYHSDMDSDLKAWYDWAACLMEPWDGPALLTFTDGRYCGAILDRNGLRPCRYYVTSDDRVICASEVGVIPIDNSLVLQKGKLKPGDVFLVDTQQGQIVDTKKLKSDFSKREDFKSWLSKVIKLEDLLQKTENCEPEDFVLNAPSLKVQSDPRLLAHGYTFEQFSMLLTPMALTGKEALGSMGNDAPLACLNQDPVLLYEYFRQLFAQVTNPPIDPIREANVMSLDCYVGPQGNLLEMHPSQCERLLLKSPILKWNEFKAIQNIEKVNPSWSVANIDITFEKSEGIEGYINAVERITKDASIAIEEGKKILIISDRRMGEHRVALSSLLAVSSIHHHLIRNKQRTEVALILETGEAREIHHFCVLLGYGCDGIFPYLAMETLIRMNREGLVRNVNNDDHDLTDQELVENYKHAIDSGILKVMSKMGISTLASYKGAQIFEALGIDSSVIDLCFTGTSSRIKGVTFEYIAQDAFSFHEKGYPSRMTITRSVNLPETGEYHWRDGGYKHVNDPTAIAALQDSVRHKNDDAWSLYVKKEMEAIKDCTLRGLLELDFENSTPIPIEQVEPWTEIARRFASGAMSYGSISMEAHSTLAIAMNRLGAKSNCGEGGEDAERSLVHPNGDTMRSAIKQVASARFGVTSHYLSDADEIQIKIAQGAKPGEGGELPAHKVSKSIAKTRHSTPNVGLISPPPHHDIYSIEDLKQLVYDLKCANPRAGVSVKLVSEVGVGIVASGVAKAKADHILISGHDGGTGASRWTSIKYAGLPWELGLAETHQTLVLNDLRRNVVVQTDGQLRTGFDIAVAVLLGAESFTLATIPLIVMGCVMLRRCHTNTCAVGIATQDPYLRSKFKGQPEHVINFFYYLIQDLRQIMARLGFRTIDEMVGHSEKLRRRADANPKVINIDLTPILTPAHTIRPGVATRFTKKQDHKLHTRLDNKLIDEAEVTLDKGLPVNIDANIVNTDRALGSTLSYRVSKRFGENGLPRDTIVANINGSAGQSFGAFLASGITFILDGDANDYVGKGLSGGIIVVRPPKNSKFKSDENVIVGNTCFYGATSGTAFIAGSAGERFAVRNSGATIVVERVKGNNAFEYMTGGRALVLSQLESINAFSGATGGIAYCLTSDYDAFLSKINKETIELEHLEDPVEIAYVKNLIQEHYNFTKSELASNILGNFNHYLKKFVKVIPSDYKKVLLKEAEEKAKEKENATAEYLKKLGSPAEPGLDATNGEVAKMQAAKRQAISRAVISNKSTLHEPKVLDLEEAVPDAKQMEKNAEKVVKMNGFMKYNVRHEGHRDPATRTKDWKEFTKPVSKRDAKYQTARCMDCGTPFCQSDTGCPLSNIIPKFNELVFKNQWKLALDKLLETNNFPEFTGRVCPAPCEGACTLGIIEDPVGIKSIERIIIDNGFKEGWIIPTPPSTRTGRRVAIIGSGPAGMACADMLNRAGHSVTVFERADRCGGLLMYGIPNMKLDKSIVQRRLDLLSAEGIEFVTNTEIGKDITVDELKSNYDSVVYAIGSTIPRDLPIKGRELKNIDYAMNLLTENTKALLSNDLETIRKQIEGKRVLVIGGGDTGNDCLGTSVRHGAKSVVNFELLPQPPNERAKDNPWPQWPRIMRVDYGHAEVKEHYGRDPREYCILSKEFIGDEEGNVTGIKTARVEWKKSQSGVWQMVEVPNSEELYEADIVLLSMGFVGPELLNNDTNIKKTRRGTIETLSHSSYNIDGGKMFAAGDCRRGQSLIVWAIQEGRKCAAAVDEFLMGDTYLPGSGGIVKRDYRLLEELAATV

SEQ ID NO: 28192 - protein, 795 aa, Candida glabrata CBS 138
MSLEKFGYEEAKIKEITKNQKILSELEKLLGEVQVGELDKTQRAILHQFATLLAKRKDAGEVSTALVVENVVNGGIKTNLQIDAAFKYVVAHPDVDQETLAAEAGIGVHVGEEDVRRKVVEYIESNKSKIEEQRYKLVPGIMADVKKMPELKWAEPRLFKPIIDEEILKAIGPKDERDVVKKQPKAKKNAKKDDSGDKSSDSKGEKRTMFTEGFLGDLHKVGENPQAYPELMAEHLKATGGKVHTRFPPEPNGYLHIGHSKAIMVNFGYAKYHDGVCYLRFDDTNPEAEAPEYFESIKRMVSWLGFKPWKVTYSSDYFDKLYELAEVLIKNGKGYVCHCTAEEIKRGRGIKEDGTPGGERHACKHRDQSVEKNLEEFRAMRDGKYKPGEAILRMKQNLESPSPQMWDLIAYRVLNAPHPRTGTKWKIYPTYDFTHCLVDSFENITHSLCTTEFYLSRESYEWLCDQVHVFRPAQREYGRLNITGTVLSKRKIAKLVDEHFVRGWDDPRLFTLEAIRRRGVPPGAILSFINTLGVTTSTTNIQVVRFESAIRKYLEDSTPRLMMILDPIEVVVENLPEDYEELVTIPYRAGTKEFGDRNVPFTNKFYIERADFSENTEDKEFFRLTPNQPVGLIKVPYTVSFKSVEKDADGKITRIHVKYDNEDKPVKPRTYIQWVPISKKYNSPVRVSETRVYNQLFKSENPSAHPDGYLKDINPESEVIYDKSVIEHNFDHVIKNSPWVVDSVKNSEFYVKEDKSGKEICRFQAMRVGYFTLDKESTDDKIILNRIVSLKDNTK

SEQ ID NO: 28193 - protein, 231 aa, Candida glabrata CBS 138
MEFPLHKACLNNEPRKVQELLESSDPFKAVVQRDDDGRVPLHWAVSIQSDAIIKLLLPYMKSVDIDTLTDEAGWTPFHISCSIGHLDIVDQLYNNNPDARPNLDLQTSQGVTALHLAVAKKHLEVCKYLIKLGASVRIKDKKGQIALHRAAAVGSIGVVEFLCSTAKSPVNWKDASGWTPLFHAIAEGHADIAVLLVNKFSADYEVEDSDGKKPIDVAPSESVKEYFSKNI

SEQ ID NO: 28194 - protein, 398 aa, Candida glabrata CBS 138
MLSEQTRTIIKATVPVLEKQGTQITKCFYGHMLTEHEELLNIFNRTNQKIGAQPTALATTVLAAAKHIDNLAALLPHVEQIGHKHRALQILPEHYPIVGKYLLIAIKEVLGDVATPEIITAWGEAYQEIADVFISVEAKMYKEAAWPGWKQFEVVGKDKVAEDIYEFTVKPTGDSGVDLAKLPIIPGQYITVNSHPVRQDNKYDALRHYSICSADTTNGLKFAVKLQTSTNNPDGLVSEFLHKDVKVGDVLKLSAPAGDFAVNKDLINQNDIPLVLLSSGVGVTPIVSMLEAQVKENPSRPIVWIQSAYNEPHVAFKNHVDNLLKQAKDAKKVVVLTDSQPRIDDKFLKENVPAHADVYICGSLNFMQSMIDHFQVLEHKNDMIHYEPFGPKMSTVKV

SEQ ID NO: 28195 - protein, 638 aa, Candida glabrata CBS 138
MNYTEEYGLPSQISISEYLFHRLNQLKIWTIFGLPGDFNMPLLDKLYSIPTMRWAGNTNELNAAYAADGYSRLKHLGCLITTFGVGELSAINGVAGSYAEHVGILHIVGMPPTSAQTKQLLLHHTLGNGDYSVFYRIANDIACHTAIINDTDLCADEVDNCIRAAWGYQKPVYLGVPVNQVDIPVDSSRLNNPIDLSILKKTKETDAQVIDLLLKQMYSASKPIIVVDACVRRHDALKETHALCELTNFPVFVTPMGKGTIDESYKNFGGVYSGSLSSPEVREVTDFADFVLFIGAILPEFSTSTFHFGFKKKNCCILFPTSVKIKKATFPDMLLKGTLQSLVDTIEPSKITYKHQAKVDIIAPKMEPSDSNLLRQEWVWNEISHWFKENDIIITETGSSAFGINQTRFPTNTIGINQALWGSVGFALCSCLGALFAVEEKTVVKHNLEIKLRNYNRNIFTENRTILFVGDGAFQLTVQELSTIIRWKLKPYIFIMNNNGYSVDRFLHHRSDASYYDVQPWNYLYLLELFGCTSFETRKIVTVSDFKELLADESFAKPDKIRMIEIMLPQSDVPKTLIARWQAEKELSNKRAGDFSENSSENSSPTIDPHWVKKQYLGPVTPTSSLSTELHSRSQMYL

SEQ ID NO: 28196 - protein, 725 aa, Candida glabrata CBS 138
MSKQQRLKPADDFSYGSIDINIQQMDPRTGRMSSPTPRKYNKDLSPNNGIRVRKVDLNTIDQRPKYQELLPYYLPCMSWIPHYSWEIFFGDLVAGISLASFQIPLALSYATSIAHVEPLCGLYSLAITPLIYAIFGSVPQMIVGPESAISLVVGQATEKFSAHDSEISTVTITMMITFISGVVLFFLGSVRLGFLGNILSKALLRGFISSVGLVMIINSLIIELKLNHKLADVAGHYHTPVGKIMFLFRYASEYYHKPTAILSLICFLVLISTRIAKKKLMNRYRFLIFVPEILLVVSVTILLSLKYDFKHSYGISTIGEFNADGFGSIGNPLSNENRALYSSLWNEGLAVAMLGFFESTTASKSLGSDYNLTYSSNRELIALGFMNIVGSLFGALPSFGGYGRSKVNVFSGGKTVMSGAMVGLITLLTAKLLLPMIHYTPTCVLSVITTVIGISLLEEVPSDIKFHIHCSGYSELTVFTLTFIATLSQSVELGVTVGCIYSLILIVKHSALSRIQILAKLEGSDEFVNVDDYIKNYNGRDFENITLEQFEHCYIVKIPEPLTFTNGEDLRSRLSRLERFGSTNVHPGSTSIVSQDDMEYIIFDLEGMTSMDSGSAQILLEIIRSYVHRDVRVYLTRVSLDREIRIRLKSAGILDLVETVQVNNAVTARYHMNDMIEKTPFFTCIEEALLIIERRAIDGDTNGNDLMHVRSGSVISNTLFNSNLV

SEQ ID NO: 28197 - protein, 775 aa, Candida glabrata CBS 138
MKFFIDDLPVLFPYPKIYPEQYQYMRDIKRTLDAGGNSILEMPSGTGKTVSLLSLTIAYQMHYPEHRKIIYCSRTMSEIEKALVELENLMDYRAKELGFKEEFRGLGLTSRKNLCLHPEVSKERSGTIVDEKCRRMTNGQAKKKLEEDPEANVELCDYHENLYQLDVENYLPNGVFSFEKLIKYCEQKVLCPYFIVRRMISMCNIIIYSYHYLLDPKIAERVSHEVSKDSIVIFDEAHNIDNVCIESLSLDLTNDVLRKATKGANTLNERIAEARQVDARKLQDEYEKLVQGLHAEDIMTQTEEPFVETPVLPQDLLKEAIPGNIRRAEHFISFLKRLIEYLKTRMKVLHVISETPRSFLQHLKQLTFIDRKPLRFCSERLSLLVRTLEIEDVEEFAALKDIATFATLVSTYEDGFTLIIEPYEIENAAVPNPIMRFTCLDASIAIKPVFERFSSVIITSGTISPLDMYPRMLNFETVLQKSYSMSLAKKSFLPMIVTKGSDQVAISSRFEIRNDPSIVRNYGSMLVEFAKITPDGMVVFFPSYLYMESIVSMWQTMGILDEVWKHKLILVETPDAQETSLALETYRKACSNGRGAILLSVARGKVSEGIDFDHQYGRTVLMIGIPFQYTESRILKARLEFMRENYRIRENDFLSFDAMRHAAQCLGRVLRGKDDYGVMILADRRFSRKRNQLPKWIAQGLSEADLNLSTDMAISNAKQFLRTMAQPTDPKDQQGVSVWSYNDLIKYQNDHEKKNNASAGMLHDDEDINMIADEE

SEQ ID NO: 28198 - protein, 242 aa, Candida glabrata CBS 138
MSVVDIDNVEQFLDLARTKAGNKLVVLFFYMPWMKSCRVLKEVVLALSRSVGKKHSTFLQINIEGNRDIVSLLGITQVPAFFLVRKGVVIKALSGVDPREFLAAYHECVDNSNCYDHDLDEDSQDIKSDDTLQEPEDFYSEDTESLDKLVNAAPVMVFIKGSPSDPKCGFSRQMVNILRSHQIRFGFFDILKDKITRQQLKDYSDWPTFPQLYINGEFEGGLDIVKESLLEDPDFFNKKLSL

SEQ ID NO: 28199 - protein, 574 aa, Candida glabrata CBS 138
MLRSTTSKSLSKMPHAIPPQCRRSHSSSIFQTKKRLAHLESDRPYLTHLPRSMNSSPNLRFHSSASSSSLRSSFLNTEIHHHSHNNLPFLPAEQATLKDVNECVLNAKYAVRGAIPMRAEELKTQLMENPHSLPFNDIINANIGNPQQLKQKPLSFYRQVLSLLQYPELIPTLENNPQTMIKQDAIDRAKRLLDDIGGSVGAYSSSQGVLGIRKTVADFITNRDDGIIAYPEDIFLTAGASSAVDYLLSIFCRGEETGVLIPIPQYPLYTATLALQNSHALPYYLNEETGWSTDPEELESIILDSIENNIKPSVLVVINPGNPTGAVLSEEAIEQIFTLAAKYGIIVIADEVYQENVFEDVKFHSMKKVLRQLQMKQPGLYDNVQLASLHSTSKGVSGECGQRGGYMELVGFTHDIRQVVLKLASISLCPVVTGQALVDLMVCPPQKGEESYEQDQEERRNIHKELHKRATLLHDAFVKLDGISCQKPQGAMYLFPKLELPYKAIQEALHQDMSPDEFYCKSLLEKTGICTVPGSGFGQEPGTYHLRTTFLAPGTKWIEDWVDFHQEFYNKFKN

SEQ ID NO: 28200 - protein, 891 aa, Candida glabrata CBS 138
MEELDNLELEYNQFKNNERPSNTNAGADIEKGLDTKKYFERSITDNSTYGKKSYSIPSYEEDTITLKDYYDTNLRDYFTWASVVDYIRSLFPVVNWLPFYNPKWFLSDLIAGITVGTVLVPQSMSYAQIATLPPEYGLYSSFIGALVYSFFATSKDVCIGPVAVMSLQTAKVIARVKEKHPDLDPSITGPIIATVLAFICGIIATGVGLLRLGFLVELISLNAVAGFMTGSAFNIIWGQIPGLMGYSKKVNTRRSTYHVVIDSLKHLPDTKLDAAFGLIPLFTLFFWKWWCNSMGPKLTDRYFPANSRPRANKYWKAFYFYLQASRNGIIIILFTAVSYGITKGVAKDKRRISVLGTVPKGLRHTGVMKLPHGILNNIAAEIPSSIIVLLLEHIAISKSFGRVNDYKINPNQEIIAIGVSNLLGTFFNAYPATGSFSRSALKAKCNVMTPLSGIFSAACVLLAIYCLTGAFFYIPKATLSAVIIHAVFDLIASYHTTWSLWKMNVFDFIGFITTVFITVFSSIENGIYFAVCWSCAILLYNNAFPAGKFLGRIEIAEVVNPKIVDDDDFSFENSNESFDDEGIYFDNSVAEDKLGTSSNDLKKFNAGVKTRSINGELVNGQTSSDIRYYTKWVPFDHAYSKELNPSVRITPPPPGVIVYRLSDSYTYINCSRHYDLIFDEIKRVTRRGQLIQHRHKWDRPWNDPGEWEAPDLKKFFNVKKFVSVFKRKVTDVDTFENENEIEHIHDGEHYKKNDKDERPLLRVVCLDFSQVANTDATALQSLADLRKAVNKYADRQVEFHFVGIYSPWIKRGLRNLGFGTTNEEYSDESIIAGHSSYHLSRFRESEQDGFNELDSLESQRNIGSKTKVLAASGTNLPFFHVDIPDFSKWDI

SEQ ID NO: 28201 - protein, 398 aa, Candida glabrata CBS 138
MSDTVYIVSAARTPIGSFQGALASKTAVDLGVIAVKGAMQKVPQLNPESDYDEVFFGNVISANLGQNAARQVALGAGLKNGIVATSVNKVCASAMKSIILGAQAIKCGTADVVIAGGCESMTNAPYYMPAARAGARFGETKMVDGIQRDGLNDAYDHQPMGVHAEKCARNWEITREQQDDFAIASYQKAQKAQQEGKFDNEIVPVTIKGFRGKPDTQVTKDEEPTKLNVDKLRSARTVFQKENGTVTAPNASPINDGAAAVILVSEKKLKELNLTPLATLKGWGEAAHDPADFTWAPSLAIPKALKHAGVADISQVDYIELNEAFSVVGCANTKILKVDPAKVNVYGGAVAIGHPLGCSGARVVVTLLSVLQQEGGKIGVAGICNGGGGASSVVIERV

SEQ ID NO: 28202 - protein, 362 aa, Candida glabrata CBS 138
MSNKSVNVAIIGTGVVGSSFLDQIVAMKSNITYNIIYVAELSKALISEDYSPLALGSDWAKAVNGANQGPLALEKLVDFLKKSPIPVILVDNTSSAAIASFYPTFVENGISIATPNKKAFSSDLATWDSLFSGKPTNGLVYHEATVGAGLPILGFLREIIQTGDEIEKIEGIFSGTLSYIFNEFSTTTTNDVKFSDVVKVAKQLGYTEPDPRDDLNGLDVARKVTIVARISGVKVESPTSFPVQSLIPKPLESVESVDEFLQKLPEYDDELTQLKKEAAEENKVLRFIGKVDVATGKPSVGIEKYDHSHPFASLKGSDNVISIKTKRYTNPVVIQGAGAGAAVTAAGILGDVIKAAQRLVGA

SEQ ID NO: 28203 - protein, 756 aa, Candida glabrata CBS 138
MTASKRHTYYGGGSISYERTNNSEHDKTQRPQDHQGPKHRKHVTFGPYVIGATLGEGEFGKVKLAWSKSAYQQCDNTEGNAGNKPMTFKVPKQVAIKLIKRDFITKDPSKETKIYREINALKHLSHPNIVKLEEVLQNSKYIGIVLEYAAGGEFYKFIQRKRRLKENHACRLFSQLISAVHYIHSKGLVHRDLKLENLLLDNEENLIITDFGFVNEFLRQNGMMKTSCGSPCYAAPELVVSNRPYDARKADTWSCGIILFAMLAGYLPWDDDPKNPDGHDISRLYNYILNTPLKFPEYINPVPRDLLRKILVIDPKKRINIRSIEKHPWLESHSTFLSITPDEWDRLSNTKNIYRKSKPQFYPNKRPGSTYSNYSSGSKDNKRDSLIIDSALVSLPVPPKEFQSHILARPSSLVVESRYSPLGKRNGHNRSNSAASAALQAVFDASERESLKSVDSKPRSRSNDHKDIIEGIQPQKHAFVKPSRKVRPTSMQAPGSSYIHHGNFEGLHELMKRDNSTASSHQTSISSEARIFDASPTLIPDLTKSPSSSTGNSPKLLPRKSFTVSKPLLDLKFASADIIKANESTDSLSKRIHDQIYEVEHPRQRRHSYRYSGIISDLIFGTLSEEGEINTFENKDHKSDAEESEMTISESKLDSVSICSQQSNIHRNISKQASSVSLLRTTSNHSTNNLNVGSRTYGRAELYDKRHLRQIPSNTLNQINAPGNTHRNSAIYSEDDKRKSTAKRVFEFFKRRSMRV

SEQ ID NO: 28204 - protein, 149 aa, Candida glabrata CBS 138
MFATRLLGKSALLGTTSTRMVFRSQMARYMSTETKKAIEGAIASAPVVLFMKGTPEFPQCGFSRATISMLGQQGVDPEKFAAYNVLEDPELREGIKEFSNWPTIPQLYVNKEFIGGCDVITSMARSGELADVLEEANALVPEEKEEGTD

SEQ ID NO: 28205 - protein, 564 aa, Candida glabrata CBS 138
MSEITLGRYLFERLNQVDVKTIFGLPGDFNLSLLDKIYEVEGMRWAGNANELNAAYAADGYARIKGMSCIITTFGVGELSALNGIAGSYAEHVGVLHVVGVPSISSQAKQLLLHHTLGNGDFTVFHRMSANISETTAMVTDIATAPAEIDRCIRTTYITQRPVYLGLPANLVDLKVPAKLLETPIDLSLKPNDPEAETEVVDTVLELIKAAKNPVILADACASRHDVKAETKKLIDATQFPSFVTPMGKGSIDEQHPRFGGVYVGTLSRPEVKEAVESADLILSVGALLSDFNTGSFSYSYKTKNIVEFHSDYIKIRNATFPGVQMKFALQKLLNAVPEAIKGYKPVPVPARVPENKSCDPATPLKQEWMWNQVSKFLQEGDVVITETGTSAFGINQTPFPNNAYGISQVLWGSIGFTTGACLGAAFAAEEIDPKKRVILFIGDGSLQLTVQEISTMIRWGLKPYLFVLNNDGYTIERLIHGEKAGYNDIQNWDHLALLPTFGAKDYENHRVATTGEWDKLTQDKEFNKNSKIRMIEVMLPVMDAPTSLIEQAKLTASINAKQE

SEQ ID NO: 28206 - protein, 787 aa, Candida glabrata CBS 138
MLSRVCRSSLRNSVARVSRYAGPRALALSMVVSGRQVSGSWQTCAYGVRYIHSSRPRYVQMRMNPNQGEPEKPPLEQFGTNLTKLARDGKLDPVIGRDEEISRAIQILSRRTKNNPVLIGRAGVGKTALIDGLAQRIVAGEVPESLKDKELVALDLGALIAGAKYRGEFEERLKKVLEDIDKADGKVIVFIDEVHMLLGLGKTDGSMDASNILKPKLARGLRCISATTIDEFKIIEKDPALTRRFQPILLNEPSVQDTISILRGLKERYEVHHGVRITDTALVSAAVLSNRYINDRFLPDKAIDLVDEACAVLRLQHESKPDEIQRLDRAIMKIQIELESLKKETDPVSIERKEDLEKELERKNEELQRLTKIWEEEKAEIESIKNSKADLEKARIELDRCQREGDYAKASELRYAKIPALEEKVKLSETKDSNKENLLHDAVTSDDISKVIAKMTGIPMETVLKGDKDRLLYMENSLRERVVGQDEAIEAVSDAVRLQRAGLTSEKRPIASFMFLGPTGTGKTELTKALAEFLFDDESNVIRFDMSEFQEKHTVSKLIGAPPGYVLSESGGQLTEAVRRKPYAVVLFDEFEKAHPDVCKILLQVLDEGKLTDSLGHHVDFRNTIIVMTSNIGQDILLSDTKLDDEGKIDPSTRNEVIEAMKRSYPPEFINRIDDILVFNRLSKKVLRSIVDIRAKEIQERLNDKRMTIEISDTAKEWLTEHGYDQLYGARPLNRLIHRRILNPMATYLLKGQIRNGETVQVDVENKELVVKSNHAEGEIVDEEPEK

SEQ ID NO: 28207 - protein, 612 aa, Candida glabrata CBS 138
MENKEHHHHHHHHHHHHSNGSYVSNKVSSLADGSRVGNYQIVKTLGEGSFGKVKLAYHVTTGQKVALKIINKKVLAKSDMQGRIEREISYLRLLRHPHIIKLYDVIKSKDEIIMVIEYAGNELFDYIVQRNKMSEQEARRFFQQIISAVEYCHRHKIVHRDLKPENLLLDEHLNVKIADFGLSNIMTDGNFLKTSCGSPNYAAPEVISGKLYAGPEVDVWSCGVILYVMLCRRLPFDDESIPVLFKNISNGVYTLPKFLSPGASDLIKRMLIVNPLNRISIHEIMQDEWFKVDLAEYLVPQDLKQQEQFNKKSGNEENVEEIDDEMVVTLSKTMGYDKDEIYEALESSEDTPAYNEIRNAYILIKDNKSLIKDMKQDNNVTQELDTFLSQSPPTFQQNGDGMKASEDQKKKHSGRRLASSVTQQRTFHQPPFMDQSKEEDSTISILPTSLPQIHRANMLAQGLPAASKISPLVTKKSKTRWHFGIRSRSYPLDVMGEIYIALKNLGAEWAKPSEEDLWTIRVRWKYDSDESRLIEDGVKKIPNLMKIVIQLFQIETNNYLVDFKFDGWESTYGDSTISTNMSEDEMSTFSAYPFLHLTTKLIMELAVNSQGN

SEQ ID NO: 28208 - protein, 196 aa, Candida glabrata CBS 138
MDARNLSDEELKRKVEELKENNEVIGLALQRSRLSVKRLKLEYGVLLERLEARADMDPDVGTFNPLPSLENFQKELMSTPLKKPKTRKQKLKERDPNMPKRPTNAYLLFCEMNKEKIKEGGSVDVTKDLTESWKNLSEQERKPYYRLYNEDRERYQAEMEAYNKKSKTEDAGKEDSMSKNSSKQEDSDQTSNEVEN

SEQ ID NO: 28209 - protein, 300 aa, Kluyveromyces lactis NRRL Y-1140
MPTELITYEQNFSSGVDAENDYPPLDSGMGSFQVSELERQGDSHKRSNDEISELRDETLNGREKKLRQSESISRNSTGNAQVEAIPHHSINVDQSDNLLSEQENPTKVYLYDDPHLENDPQQRQEESDANGIMEKLTDDNSMKQVSNAKTSLETAQFLETSNSMELQRTKPHDMNIISPSEPLEQPFYVNAKQYYRILKRRYARAKLEENLKISRERRPYLHESRHKHAMRRPRGQGGRFLTAAEMAEMKRKEEEGTDNDSFLQEHVPKMNVLPQQLPGPVKDNNNEKSDEKPVAKEASN

SEQ ID NO: 28210 - protein, 602 aa, Kluyveromyces lactis NRRL Y-1140
MSHDPNQQQPHGGSGQGHHQRQLTNHAQGQHIGKYQIIKTLGEGSFGKVKLAYHISTGQKVALKIINKKVLAKSDMQGRIEREISYLRLLRHPHIIKLYDVIKSKDEIIMVIEYAGNELFDYIVQRDKMPEQEARRFFQQIISAVDYCHRHKIVHRDLKPENLLLDEHLNVKIADFGLSNIMTDGNFLKTSCGSPNYAAPEVISGKLYAGPEVDVWSSGVILYVMLCRRLPFDDESIPVLFKNISNGVYTIPNFLSQGAASLIKKMLIVNPVNRITVHEIMQDEWFKVDLPDYLVPAESTHQENSESKTEDGGPSVPLELIDDSLVQTLSNTMGYDVDEIYEALESDEDHPSLNEIRDAYQLIKENRNLINDIKVNKQQSNDLDTFLSQSPPTFEQSLHAPPGSKNRHSHRHSKRTQQRTYQYHYGNGSQDGDSTIAILPSSLPQIHRANMVAQGSQAAAKISPLSVKKSKTRWHFGIRSRSYPLDVMGEIYIALKNLGAEWAKPSEEDLWTIRVRWRYNIDMPDDEMKNKQIPDLMKMVIQLFQIETNNYLVDFKFDGWESSNGVVYSSRNDDEMSTFSAYPFLHLATRLIMELAVNSQGS

SEQ ID NO: 28211 - protein, 562 aa, Kluyveromyces lactis NRRL Y-1140
MDTRRKSIRTGAIVMLGRPIFRRISRVNRCRFFSDVPDNAPGAIDNEIWLQELASSRSKQKAPTAAVESTQNLSIKEEKKTSVQPMKGLRNKITFNIISTPPDTQYIEIKSPLSNFTKLSYLQKNKNIRVQQSNFVDLRIIKCASGNGGDGCISFFRDRGRAIGPPDGGDGGGGGSVYVQAIEGINSLSKLQTTYIADNGSNGTSAQADGSKGKDVMITVPVGTVVTWCLDPKVVREHVDQKIKEQGGGSLRTILDTSNIILNCTGRFYMDQKPNRIQMFRESYEPGKGWIFKGKDEEYHLSKDWFQDLSKNVTEYDHNLLQTELESDRFPLYGLDLSKPTEKPICLLKGGKGGLGNMHFLTSLIRNPRFCKEGRSGLQQHFMFELKSIADLGLVGLPNAGKSTILNQISNATPRVGHWEFTTLHPTIGTISLGIDKPKFTVADIPGIIKDASQDKGMGLEFLRHIERSKGWVFVISLEKDDPSQDLQILIEEVGGKEVVSLKNILVVCNKADIDEKSTFKKYQKIQAQCQENNWDVVPISALKGENIDVLLHKMAQCAGKL

SEQ ID NO: 28212 - protein, 587 aa, Kluyveromyces lactis NRRL Y-1140
MTEEKKLDYSIVQETQLEPGEFDELNSYVSQSDTSRVGGTRWERFKDSFREAETVDLDPSLTPAEKMAILTANAPLKRTLKSRHLQMIGIGGAIGTGLFVGSGKSLATAGPAGILIGWALTGTMIYCMVMAMGELAVTFPVAGGYTTYASRFVDESFGFAFNTVYAMGWLITLPLEIVAASITVNYWGTPAKYRDAFVALFYVVIVGINLFGVKGYGEAEFIFSFIKVIAVIGFIILGVILVCGGGPQGGYIGGRLWHNPGAFANGFKGVCSVFVTAAFSFAGSELVGLAAAETANPRKSIPSAAKQVFWRITLFYILALLMVGLLVPYTSDRLIGQSSVDAAASPFVISIQNAGIKGLPSVINVVILIAVLSVGNCAVFGCSRSMAALANQGSLPKIFGYIDRTGRPLVGIVVTCVFGLLSFIAASPKEGEVFDWLLALSGLSSLFTWGGILLCHIRVRRALAAQNRTTAELSFTAPTDVWGSVYSLILIILILIAQFWIALFPIGGKPSAAAFFEAYLSFPIYIVFYIGHKIWKKNWKLFIKASDIDIDSGRRETDIEALKQEIAEEKAFIASKPFYYRMYKFWC

SEQ ID NO: 28213 - protein, 388 aa, Kluyveromyces lactis NRRL Y-1140
MRLINKVTGSHSGERAILTLQPQDKEDLFTLYNIINTDDEIIFKKKVTSKTEEGGKKKATQLEKLRIKVVSSEFEPQHEFLRYKGVTTEDDYSNANQDLPVGKFFSFTIDFSYPFTLIKDDYNSYVDNLVKQACNIEGRSDMAAVVLQEGISHICLINSFSTVLKHKIEYSIPKKKRGTDIMKFDDKVEKFYRATYASMVRHFDFDTLKCIIICSPGFYAKTLYDKVMQYAQEDQNKKILANTGKFLVAHCSTGYLQGIDEVLKDPAYKHKLEDAKNSKEALVMDDFLDHLNKDDFKAWYGEHEITKAAELAAIDTLLISDSWMRSDDVNVRKKSLNLINEVEQTGGKAYIFSSLHNIGEELDRLTGLACILKYPVPDLDEDIDEEEE

SEQ ID NO: 28214 - protein, 535 aa, Kluyveromyces lactis NRRL Y-1140
MRTASVLCALAGCASALSVQNKLPGRTALDKAIDALGLSSSDVLSSLPNHLKTAWNEMGMLFPQEAGQLEFLSKPRGKITKHDKWDYVVKPESFVSTANVNNDNVGNYQLRVKKIKDPKVLGVDPDVKQYSGYLDVEDEDKHFFYWFFESRNDPKNDPIILWLNGGPGCSSLTGLFFELGPSSVGEEIKPIYNPHSWNSNASVIFLDQPVNVGYSYSSSEGVSNTVAAGKDVYAFLQLFFQQFPEYASGQDFHIAGESYAGHYIPVFATEILSHPTEERSFNLTSVLIGNGLTDPLSQYPYYEPMACGEGGEPSVLEPEQCDNMLETLPRCLNLIQSCYEYESVWSCVPASIYCNNAQMGPYQSTGKNVYDIRKECQGELCYDEMKYMDEYLNLDFVKEAVGAEVDNYESCNFDINRNFLFAGDWMKPYHKHVTELLEQDLPVLIYAGDKDFICNWLGNQAWTNLLPYKDAEEFAKQPVKNWVTSVGKKAGKVKNFDKFTFLRVYGAGHMVPFDQPENALDMVNDWVNGKFDFEH

SEQ ID NO: 28215 - protein, 361 aa, Kluyveromyces lactis NRRL Y-1140
MRPSLSRDASDTGRRHSLLQQSKLLSIRLSNAGKRPSLSRGHAHEKDSITSSHHRLSTGPVNNNPRRSLMVKKPNTAHGTRVPILNDHNDKFENMTLQDFEIGKILGKGKFGKVYCVKHRETGLICALKAMEKKEIVQYTIQKQFRREVEIQGSFKHKNLTQLYGFFYDEKRVYLLMEYVYYGELYKFLKNNGPLNETLASYFVYQMANALDYMHSKNILHRDIKPENILIGFNNTIKLTDFGWSVYNEDGQKRKTLCGTIDYLSPELIKSREYNNKVDVWALGVLTYELLVGSPPFEEDTKEMTYRRILRCDLKFPLNVSPQARDLIVRLLQFEPSKRIPLSEVKSHAWIANNRGSWTDL

SEQ ID NO: 28216 - protein, 417 aa, Kluyveromyces lactis NRRL Y-1140
MRKCKVFVGNSHPELGHLVCERLGIEAAPCTLKKFANGETSVQIGVSVRDEDVYVIQSGSPEINDHIMELLILVSACRGGSAKKITAVIPQFPYSKQCKMKKHRGAITARMLANLLIMAGADHVVSMDLHASQMQGFFTKPVDNLYGGPSLGKWIREHVEDYREAVVVSKNPGGTKRVTALADSLKINFAMIHTDRRRSKDLYSQNKDKLQLKQRKQSMLRKNKPIIRPGDFENEEENIILTNGIQTARVIKGHVVDDEYVDDADAIQSDGEGSIGTIGSFDAVDSEDDEEDDEQPEKLITLVGNVQGRTAIILDDMIDRPGSFISAAEHMVKNCGAKEVYVIATHGIFTGDCLEQLEMSDDIHKVVVTNTYPISEERIRKSKKLVIIDVSSIFAECIRRDHYGESISVLFDSLASL

SEQ ID NO: 28217 - protein, 201 aa, Kluyveromyces lactis NRRL Y-1140
MIQTGDKVVKIEGIFSGTLSYIFNEFSTSTPNDVGFSSVVKVAKELGYTEPDPRDDLNGLDVARKVTILARIAGFKVESPTSFPVQSLIPSALESVKSSDEFLQKLPDYDHELKQLKEEAAKENKVLRFVGKVDFPSNVVSVGIEKYDYSHPFASLKGSDNVISIQTERYTNPLVVQGAGAGADVTAAGVLADVIKIAERL

SEQ ID NO: 28218 - protein, 237 aa, Kluyveromyces lactis NRRL Y-1140
MAKSRFEYVRQFEVHDALLPDTYIVVRVDGKKFHEFSKYYNFAKPNDERALKLMNAAAKNVFMQYKQEMICAYGESDEYSFILKRDTKLFNRRRDKISTLFVSLFTANYVSLWNLFFPDVVLHHKHLPYFDSRCVCYPNLTVVKDYLSWRFVDTHINNLYNTVFWYLIIKCGLTPQESEQKLCGTLSSDKQEILFSECGINYNNEPEMYKKGSLVNSKGEIVHIDVVKQIDEIFNGF

SEQ ID NO: 28219 - protein, 488 aa, Kluyveromyces lactis NRRL Y-1140
MVNQDISKLSLNECPGSVIVISNRLPVTIKKDEKTGEYEYSMSSGGLVTALQGLKKSTTFQWYGWPGLEVPDEDKAKVKRELLEKFNAIPIFLSDEVADLHYNGFSNSILWPLFHYHPGEITFDDTAWLAYNEANMAFADEIEGNINDNDVVWVHDYHLMLLPEMIRQRVIAKKLKNIKIGWFLHTPFPSSEIYRILPVRQEILKGVLSCDLIGFHTYDYARHFLSAVQRILNVNTLPNGVEFDGRFVNVGAFPIGIDVETFTEGLKQDAVIKRIKELKESFKGCKIIIGVDRLDYIKGVPQKLHALEVFLGAHPEWIGKVVLVQVAVPSRGDVEEYQYLRSVVNELVGRINGQFGTAEFVPIHFMHRSIPFQELISLYAVSDVCLVSSTRDGMNLVSYEYISCQEEKKGTLILSEFTGAAQSLNGALIVNPWNTDDLAESINEALTVPEEKRAANWEKLYKYISKYTSAFWGENFVHELYRLGSSNN

SEQ ID NO: 28220 - protein, 142 aa, Kluyveromyces lactis NRRL Y-1140
MFSRFLATKSPLLRPAFRSHLSFQRFISQETKKAIEDAIESAPVVLFMKGTPEFPQCGFSRATINMLGQQGVDPVKFAAYNVLEDPELREGIKEISEWPTIPQLYVNKEFVGGCDIVMNMAQTGELAKLLEESDALVPEEED

SEQ ID NO: 28221 - protein, 430 aa, Kluyveromyces lactis NRRL Y-1140
MSTGDFLTKGIDLIQKAIDLDTATQYDEAYTAYYNGLDYLMLALKYEKNPKSKDLIRAKFTEYLNRAEQLKEHLETEQQKKQEKPKKAATASGSGGNSNTEDDADDKKLRGALSGAILTEKPNVKWEDIAGLEGAKEALKEAVILPVKFPHLFKGKRKPTTGILLYGPPGTGKSYLAKAVATEANSTFFSISSSDLVSKWMGESERLVKQLFAMARENKPSIIFIDEVDALTGQRGEGESEASRRIKTELLVQMNGVGNDSSGVLVLGATNIPWQLDSAIRRRFERRIYIPLPDLASRTKMFELNVGDTPCKLTKEDYRSLGEMTDGYSGSDIAVVVKDALMEPVRKIQMATHFKNSSDDPDVRKLTPCSPGDPEAIEMSWTDIDADELQEPDLTVKDFLKAIQTSRPTVNEEDIHKQEEFTKDFGQEGN

SEQ ID NO: 28222 - protein, 574 aa, Kluyveromyces lactis NRRL Y-1140
MCGIFASFRNPDVQAYKPKALQLSKRIRHRGPDWSGNIVKNSTILVHERLAIVGLDSGAQPITSEDGSYTLAVNGEIYNHIMLREECASYPFKTLSDCEPIIPLYEKYDIDAPKHLDGMFAWCLYDSKKDRIIAARDPIGITTLYMGRSSASPKSVWFSSELKCLTDDCDEIIAFPPGHVYDSETDKLTRYFTPDWLDESRIPTTPVDFKAVRESLEKAVRKRLMAEVPYGVLLSGGLDSSLIAAIAARETEKTNAELDPVVYDSDPHQLAGLDEQGHLHAAGWSRLHSFAVGLPNAPDLQAARKVATFIGSIHHEHTFTLQEGLDALDDVIYHLETYDVTTIRASTPMFLLSRKIKAQGVKMVLSGEGSDEIFGGYLYFAQAPSAAEFHVESVKRVKNLHLADCLRANKSTMAWGLEARVPFLDRDFLQLCMNIDPNDKMIKPAEGKIEKYILRKAFDTTDEPDLKPYLPEEILWRQKEQFSDGVGYSWIDGLKDAAESTISDEQFAQPKAEWGDDIPTTKEAYWYRLKFDALFPQKTAASTVMRWIPKADWGCAEDPSGRYAKIHEQHVDKK

SEQ ID NO: 28223 - protein, 453 aa, Kluyveromyces lactis NRRL Y-1140
MTSVWHETYDGSTIAFIFMGCALVFIMVPGLGFLYSGLARRKSALSLIWAVIMATLVGMVQWYFWGYSLAFSKTAINHKFIGDLNSFGFRNVYGYADPEDPTTYPELAWAAFQGMFLCVTLSIIAGATAERGRLLPHMVFLFCFATIVYCPVTFWVWCPDGWAARWGVLDWAGGGPVEILSAVGGFVYSAFLGKRHESQLINFRPHNVSMVTLGTSLLWFGWLGFNGCTSLDPNMKSVFALLNTNLSAAFGGMTWCLLDYRLEKKWSTVGLCSGIICGLVAATPSAGCITLYASVIQGITAGVVCNFSTKIKYVLKVDDAMDILAEHGIAGVVGLIFNAFFAADWIIGSDGATEHGGGWLSHNWKQMYMQIAYIAAVTGYAAVVTAIICFVLNKIPGLQLRADEEAEDRGMDEDQIGEFAYDYVEVRRDYYSWGVPNDTDSGNEKITGPQTPI

SEQ ID NO: 28224 - protein, 93 aa, Kluyveromyces lactis NRRL Y-1140
MAAPRKKTQRKKKDPNAPKRALSAYMFFANENRDIVRAENPGITFGQVGRILGEKWKALNEDEKAPYEAKAEADKKRYESEKELYIATKAQSE

SEQ ID NO: 28225 - protein, 691 aa, Kluyveromyces lactis NRRL Y-1140
MLSQRFVTRALARRAFGKTCLKLGSASASASNAASAAAGEASSRPQPAPSFNADIAGGSSGGARRNQIPLSKRSRIADKNTGVNIQNQMDDSFIGMTGGEIFHEMMQRHNVDTVFGYPGGAILPVYDAIYNSDKFTFVLPKHEQGAGHMAEGYARASGKPGVVLVTSGPGATNVVTPMADALADGVPLVVFTGQVATSAIGTDAFQEADVVGISRSCTKWNVMVKTIEELPRRINEAFEIATSGRPGPVLVDLPKDVTAAVLRNPIPMKSILPSDTLNQLTQRVVDEFTLENISRAADLINRAKKPLLYVGAGILGSEMGPQYLKQLSDRAQIPVTTTLQGLGAFNQEDHKSLDMVGMHGNAAANLAIQNADLIIALGARFDDRVTLNISKFAPEARKAALEKRGGIVHFEISPKNINKVVEAEVAVEGDVTRNLEKLLPLVESVPERPEWSAQVAKWKQEYPYAYQKETPGSKIKPQTVISKLSDLVLKSGRPAIVTTGVGQHQMWAAQHWTWKSPRSFITSGGLGTMGYGLPAAIGAQVARPDAIVIDIDGDASFNMTLMELSSAVQARTPVKVLLLNNEEQGMVTQWQSLFYEHRYSHTHQLNPDFVKLAEAMGLKALRLSKQEDTDAILKEFVDYEGPILLEVQIEKKVPVLPMVPTGKGLHEFINFDPEVEKEQNELRHKRTSGKY

SEQ ID NO: 28226 - protein, 395 aa, Kluyveromyces lactis NRRL Y-1140
MLSVNTKNIVKATVPVLEQHGVTITKIFYNNMLSENPVLLNTFNRVNQKKGRQPTALAMTVLAAAKNIDDLSVLLPAVNEIGQKHRALQVEPAQYDIVGKYLLLAIKEVLGSAATPEIIQAWGEAYKVIADIFISVEKEMYKKAAWPSWKPFVVTEKTHVADEIIEFVVKTAPGCDVDLSKLKIVPGQYLTVKTHPTTHDNEYDALRHYSICSESTEDGLKFAVKYEHGEEQDGLVSEYMHKFINVGDQIELSAPAGDFEMNKELIKQEEVPLVLISAGVGATPLVAMLEFQQKHNPKRPVLWIQSSNDEMSQPFKDHVTDLLSKFDNARSEIVHTASMPRIDGTFLEKHIPGHSDVYICGSIEFMETLMGVLKDLGHHDQMIHYEPFGPKMSLV

SEQ ID NO: 28227 - protein, 107 aa, Kluyveromyces lactis NRRL Y-1140
MPSAATIARVQGLINSSKIFVASKTYCPYCQATLKTLFEEKKVDKKLATVLQLNQLEDGSDIQDALAEITGQKTVPNIFINGKHIGGNSDLQELNNSGDLDKLLASL

SEQ ID NO: 28228 - protein, 93 aa, Kluyveromyces lactis NRRL Y-1140
MSEEQEQKVDVKPETHINLKVSDGSSEIFFKIKKTTPLKRLMEAFAKRQGKEIESLRFLYDGVRVLPDQTPEDLDMEDNDIIEAHREQIGGSL

SEQ ID NO: 28229 - protein, 1112 aa, Kluyveromyces lactis NRRL Y-1140
MNGNGITTLKGDTIGPWKLGSTLGVGSTGKVVMAYNETKGQQAAVKIISKSIFNAQGSTMIGGNDPDVLPYGIEREIIIMKLLNHPNVLRLYDVWETSKDLYMVLEYVEKGELFNLLVERGPLPENEAVRFFRQIIIGISYCHALGIVHRDLKPENLLLDHKFNVKLADFGMAALESKDKLLETSCGSPHYAAPEIVSGLPYHGFESDVWSCGVILYALLTGRLPFDEEDGNIRNLLLKVQSGKFEMPGDDEISSEAQDLIARILTVDPEQRIKTREILKHPLLRKYPSIKDSKSIRNLPREDTYLNPLSLEGGNQCVDETILQNLVVLWHGRNKEDIITKLMEPGANLEKTFYALLHRFKHDNYQDQLKQQELQKKQSVSSNSLMYVGSLPSPNKSDSPVTTPKKKRTSIIVASSSHKRPVSMQKLSSQHSSPVKNGSIGKRLSKTFPSNKRISQLVSNSSSPTPAAHKRVSRINDSAAPPVPKEMLRDYKRQSKRQSKRFSLLPNMKRGSITTKLIATYAKLSEDSEWEYIEKETKRTSQDFATLMDQIFEHEKYEQIRKEKEELERKVNEAREKEEAERKERERIEREEQERLEREERKRAERQKELQDQMEDEIAKLKAEYEAVQGSSDERNTANGRSVSAPIETDRTANKRDSTFGIKNDINELINTRNFSLQTRPVSRLDPGIIAAESRLSANLEDDQASKEKTILETIRRSKFLGSQFNLNVELEKAQKDLVSKERQEQLRKYSEQTAKYEVQKLPKNAKAVATLRDDEVEPRKLSEVKVPQFTRRSKHFSSSNKRFSVLSLYSTKTSFTNLVDHLKNDNYLEPLPGQPEYSSSKVAQEPEFMFETVEELDENSKLFEVPETEEGKLASAARKESTDARKQSTNDKDINLPSLPPLQVSHDVADENGALGLGIYQPNDQTQKPHKTMLIDESIDENISSTSDVSRTEVVKKPPLNDVVRKNNNERKPLEEITPKVENKRKISFFRKFSQGSEKKLGPESFDSQLKAGVSAPKMYKALDRLLNEWTNYGLKHVESSPNDFVISGKLTSDNILSLRSTGFKITVLPGEGNGSIIQFTKKSGSTKTFNRLVKEIEKILEKEKVLVFSF

SEQ ID NO: 28230 - protein, 706 aa, Kluyveromyces lactis NRRL Y-1140
MFPTMLRLRYIVQNVPLRVNSPSTILRYPINLGKRSPLISFQSRSFARCSIALQAAKKQGKPSLTATVKGLRLSPHDSKASGWQDIKRLFLLAKPETRSMFIALILIILSSAVSMAVPTVIGKLLDIAREEHEQPETEKETMIFGLTSTQFYTALGGVFVVGALANVGRIVILKVTGERLVARLRTRTMKAALEQDATFLDHNRVGDLISRLSSDAGIVSKSVTQNLSDGTRAVIQGFVGFGMMSFISWKLTCVMMLLAPPLGVMALVYGKRIRNLSRQLQTSVGELTKVSEEQLSATKTIQAYCGEKKEIHRYADEVRKVFHVGLKEALTSGAFFGVTGFVGNVALLALLLTGTSMIKTGLMTVGDLSSFMMYAVYTGSSLFGLSSFYSELMKGAGAAARVFELNDRKPLIHPTIGKDPVTLENKSIHFNHVKFSYPTRPQHHIFEDLNFTVRPGEHVCIVGPSGGGKSTVASLLLRYYDIGSGEIKLGNDNIRDFNLRKYRRLLGVVQQEPMLFSGTILDNITYAVPQELVNDETRISRAIGQANCTKFLANFPDGLQTTVGPRGTQLSGGQKQRIALARAFLLDPSILILDEATSALDSQSEEVVAQSLQQRSARGKTTISIAHRVSTIQHSSRVIVLNRHGTVAETGSFDKLIAIPDSSLNKLLSKEQEVEEESHEPHDPQQQEEEEGINEEKEVQPKLITT

SEQ ID NO: 28231 - protein, 349 aa, Kluyveromyces lactis NRRL Y-1140
MSKPVVLRLGQVKYAQKAWEELSKIAQVIPIDPSLTRAQFLDQCQDPESPISKAQILTRTFPSVKNTGRFDAELAKALPESVVAICHNGAGYDQIDPTPFGQRHIQISNVPELVNNSTADTHVFLLLGALRNFEYGHRLMEEGKWPSGGAAAGAPVGHDPEGKVVGVLGLGGIGRAIIERLKPFGFKKFIYHNRNRLSSDLENGCEYVSFEELLSQSDVISINIPLNAATRHMIDKEAISKMKDGVVIVNTARGAVIDEPALISALKSGKVRSAGLDVYENEPQVPQELLDLPNFIGVPHMGTHTVETIQKMEEFVVENVKSVINTGKVLTVIPELKKEGWINEAKPLV

SEQ ID NO: 28232 - protein, 793 aa, Kluyveromyces lactis NRRL Y-1140
MLGSDGVVRLNQSSFPTAESQHEYSRYQDAKTGLEEPTHSNPLHFVRHFNGRNTTHTSNHTEDQSQSTVFTMVNKQFQPSMTTMNTVVKEDNDISNSNSNHDNKYNKLNEESLMKDDTHSHTSQKFKVLQQSMKEELYNSTTKSSNKRNRRFITSRLSSLGPAKRNLSTSFNVDSPSESRVDNSQINSSIINDTSNISQQDIENSHTSNSSNTGYRYHDHNIFLETHRQHSTPSHDENKDPSANLQPNINYENIDFGDLNPYQYLKKYNLPSGELPYISKVYFERQKEENRKTVLRKATSGTLALKREFTQYRRTQTARQPRRKHNFGTDKTSLQDPLSSPLQKNQLVFQEVDRELANKREALKPLDVNNPSSSQEAKRPKYENDHVPEDYRPPFFSHRKAPSPHDSKPFKKVEIVEPPKSTVEVIPLKSEGCDVSSKLNKGDNYLNYNGSFDTKKRTSYAVPTITVNGTAYEKVELLGKGGSGKVYKVKSSDHKVYALKRVSFDEFDESSIDGFKGEIELLKKLENKQRVVKLIDYHMGQGVLFLLMECGEHDLSQVLTQRSKIPFDTEFVRYHFQEMIKCVKVVHDADIVHSDLKPANFVFVKGMLKIIDFGIANAVPDHTVNIYRDNQIGTPNYMAPETLVAMNFTRNDGEQAKWKVGKPSDVWSCGCILYQMVYGKPPYGTFQGNNRLYAIMNPDVKIPYPEKDSFGTVIPRTVIDTIRSCLERNPISRVTIDQLLSGALINPVTVTKFFIHDLIKNAVNYGCDQKHVNNERVEELSEDVWNKLAEFKL

SEQ ID NO: 28233 - protein, 468 aa, Kluyveromyces lactis NRRL Y-1140
MNNIVVFAGSSHLDLVNKICENLGIERSQVKLGKFSNGETSISIEESVREKDVYVIQSGCGHVNDNFMELLILINACKTADASRVTAVMPYFSYSRQPDIPYTAKGAPLISKPKEKYTFESHPGTPIPQSMLTVEKPMSPNSSRLDAASSASSSGPQSLQSPTPLRPVELRPTSSTSSRIPMIPNGKAEHPSEQEQDSNADALFNASNSSYKLWVAQAGTLIANLLTTSGADHVITMDLHDSQFQGFFDIPVDNLYCKPITQAYIQHHIPNYQDCVVVSPDAGGAKRAAKIADVLELSFAMIHKERRSQLLKGPPGATLTSGGGVPVSTKPLIESLDIRTSLSNNGNNKYVNTTMLVGDVRNKECIIVDDLVDTSYTITRAAKLLKDQGATKIYALITHGIFSGDALNRIGQSVIDKIIVTNSIPQDETIKVLGADRVEVLDVSNIFAEAIRRIHNGESISILFEHGW

SEQ ID NO: 28234 - protein, 420 aa, Kluyveromyces lactis NRRL Y-1140
MSKGKVCLAYSGGLDTSVILAWLLEQGYEVVAFMANVGQEEDFEAAEKKALLIGATKFVLVDCREEFVKDVLFPAVQVNAVYEDVYLLGTSLARPVIAKAQIDVAKQEGCFAVSHGCTGKGNDQIRFELGFYALKPDVKVIAPWRDPTFFDRFAGRKDLLAYAAEKNIPVFQTASKPWSTDENLAHISYEAGILEDPNQTPPNDMWKLITGPEDAPDQPQDLDIVFEKGLPVKLTYKDAASGKETTATSPLDIFLTSAKLARANGVGRIDIVENRYINLKSRGCYEQAPLSVLRRAHVDLEGLTLDKEVRALRDQFVTPNYSRLLYNGSYFTPECEYIRSMIQPSQSTVNGTVRLRLYKGNIIVLGRYSETENLYNPDESSMDILTGFQPTDTTGFIAIQAIRVKKYGESKAAKGEELTL

SEQ ID NO: 28235 - protein, 721 aa, Kluyveromyces lactis NRRL Y-1140
MAGELDADSNSRASGITIPANGQRRRQSIMMLSESVKSRRSLKSHSRVIPAAATPPLGKSIESNALIDVGSPSFKSPNLEHEAEIIQSLKQNYLRDNINKSSSFSQLSKKSHSSTLQDSDAPSETAISIPEHDSNLNTEGGDILRDLYKLSSNLDNNVKKNRNKSADDLSISGAHRRKGSTASALNVPGGFRREYIVQKIRNELPRQNCTTDSESHHTTPSYGSVTSSNLEDQTNVADKVPFLTRNFLEFLYVYGHFAGETFNDDFAVDEDDEFNESEVPLLNASDRERLGHNKRVIARPSQVKTSTFKAFLLMLKSFIGTGVLFLPSAFANGGLIFSVLMLSFFGMYSYWCYYILIRSKVATGVSSFGDIGIKLYGPWMRYAILASLILTQLGFSAAYVVFTCKNLLAFFQNVFHLHSLRIEHLLILQTIIFIPLAFIRNVSKLSLTSLLANFFTMAGLIIIVFFVVKHLVIDLDLKPEAGIIYGFNSSKWSLFIGTAIFAFEGIGLIIPVQDSMRKPEKFPLVLGLVILTATVLFISIAALGYLAFGRYIETVILLNLPQDNIFVNLVQFFYSLAILLSTPLQLFPAIGIIESKLVPKFRKTVSPTNKNDVQLSPNSGKLDWKVKWTKNFLRSIIVIFVICLAYFGSSKLDVFVSFIGCFACIPLVYMYPPLLHLKSCSQPAYKQNQTLKNRLMITMDYGLVIFGGVSMLYTSYQCIMG

SEQ ID NO: 28236 - protein, 548 aa, Kluyveromyces lactis NRRL Y-1140
MPPPSLLQSRAARTLSRCLSKKDLSKMLFLSQRRQLSTSNQKRKSGLLRSNEWKYAVIGGALVLGYSYLTNYVSSDTINGIKHYSSGDGFKTGKSDPSSNTNSNTNTISLLNDRQVESILHKSEESYFVNRGKGILRYDVSQLPSNAPIEDNRVEQIITVPTESSESLEDLYFFGIFDGHGGPYTSAKLSQDLVPYVAHQLGQIYGKGVGFLTSESIDEAIMRGFLQLDNDIVYGSLGKLFEEPTKENLIESLPAVSGACSLLSMYDSNNCTLKVAVTGDSRAILVKQSDDGAWTVKSLSTDQTGDNVQEVERIQKEHPDEPNCVRQGRILGSLQPSRAFGDYRYKVKEINGKTVYDLPDHLKIYFRREPKDFLTPPYVTAKPEITTTNVDPKTKFMVLGSDGLFELLSNDEIAGLVVKWMESHPIKKNFKMLKEQSPQGKLPKLEDISPDKEAQRPAFRYQSSKKPDSKSEYLMQDENVATHLIRNALSGGGNKEYVSTLVSIPPTKSRRYRDDLTVTVVFFGEETEGIDGKLELNHKATKPEESKL

SEQ ID NO: 28237 - protein, 525 aa, Kluyveromyces lactis NRRL Y-1140
MSFDLVAGNARSNFVFKNWAGIYSCRPQLYFQPNSIDEVVQIVKAAIEQGKTIVTVGSGHSPSDMCVTDQWLMNLDNLNSVVEFKENKEELYADVTVEAGLRIYQLSEILAEKGYAIQNLGSISEQSVAGIISTGTHGSSPYHGLVSSQYVNLTIVNGKGEVVFLDSENSPEVFRAATLSLGKIGIIVKATIRVIPEFNIKSTQEVIHFETLLNNWETIWTSSEFIRCWWYPYTRKVVLWRGSKTEEPLTAPRKSWWGSTFGRFIYESLIWISVKIYPALTPYVESFVFHQQYGRVETYGSGDVSVQTSIAGLNMDCLFSQFVDEWGCPLNNGPEVLRSLDYSITQAAQNKEFFVHVPVEVRCSNTTLPAEIPDYSNRTKTSAGPVFGNTLRPYLDATPRHLRYAPLSDVTNSQLSLYINATIYRPFGSNSPIHKWFTLFEDTMGAAGGKPHWAKNFLGATSMAAGKVKDEKDYDDYEMRGMATKIKEWYGEDLLKFREIRSQQDPNNVFMANKEWAIRNGIIEP

SEQ ID NO: 28238 - protein, 778 aa, Kluyveromyces lactis NRRL Y-1140
MKFYIDDLPVLFPYPKIYPEQYQYMCDIKKTLDAGGNSILEMPSGTGKTVSLLSLTVAYQMHYPEHRKIIYCSRTMSEIEKALVELESLMDYRSKELGFVEDFRGLGLTSRKNLCLHPRVSKERKGNVVDEKCRRMTNGQARKKKEENPDANVELCDYHENMYNYDVADYLPPGVFSFERLIRFCEEKRMCPYFTVRRMISMCNIIIYSYHYLLDPKIAERVSKEVSKDAIVIFDEAHNIDNVCIESLSLDLTKDLLKKATKGANALDRKVEEMKKVDSQKLQDEYEKLVHGLRASDILEPEEEPLVETPVLSNDILKEAIPGNIRRATHFISFLKRFIEYLKTRMKVLHVISETPNSFLLHLKQLTFIERKPLRFCSERLSLLVRTLEVEEVEEFNALKDIATFATLISTYEDGFLLIIEPYEIENAAVPNPIVRFTCLDASIAIKPIFERFSSVIITSGTISPLDMYPKMLNFETVLQQSYSMTLAKKSFLPMILTKGSDQVAISSRFEIRNDPSIVRNYGSMLVEFAKITPDGLVVFFPSYLYMESIISMWQTMGILDEVWKYKLILVETPDAQETALALETYRKACSNGRGAILLSVARGKVSEGIDFDHQYGRTVLMIGIPFQYTESRILKARLEFLRENYQIRENDFLSFDAMRHAAQCLGRVLRGKDDYGVMVLADRRFARKKSQLPKWIAQGLSDADMNLSTDMAIANTKQFLRTMAQPTDPKDQEGVSVWSHAQLLAHQESVKKKQHNGFVDSDVTEVKDNDGDIEMKD

SEQ ID NO: 28239 - protein, 264 aa, Kluyveromyces lactis NRRL Y-1140
MGVIDITSQDQFTELTTTKAGDKLLVLYFYTSWAEPCVAVGKVVEALSEERCNKDVVFLSISAEEQVEISELFEVSSVPYFIFIKSGTILREMSGADPKEFVAILNQLNASGTDDNESGAANSSADNGAGSNVASSRTENVSNVGPGSPLGEDNEEQEETEEQLGERLKKLTQAAPVMLFMKGTPSEPKCGFSRQMVGILREHQIRFGFFDILKDENVRQGLKKFSDWPTFPQLYINGEFQGGLDIIKESLEEDPEFFQHTLSA

SEQ ID NO: 28240 - protein, 774 aa, Kluyveromyces lactis NRRL Y-1140
MDGVMLDKVELNQHEVGAARERSRSMASLSKFIPKSIWKPQQQQQQQQPSETSEGNTKASNSHPVMLHASLHEAPAIVLQEAKPVSRESIEQEGAPAEKAASGNSSKLSMRLKKVFGKKEPSQPPVDSELSPPASSEAAANHDANDTTNTLNRNRTNSDTDPEPKRNLYSDGSQIQGTPLTSPSKSISSYNSGTHKPNNLVTGNQASKLSPNFDIPEASSNGNGFVPSYNSMTNISTASLNLIDENEETQNFEGSLHQSGEIIHPAITTPLKSGSESPFLSSQSMKPFPASDEAENSHRRSESNGVSVKPQLRRTASQPTDVHVQVNGKTASTKEEFSPRRGTVGADASFIQPPKRSERLRNKSFSNKFQDILVGPQSFEKIRLLGQGDVGRVYLVREKQTNRLYALKIFSKPEMIKRKKIKRILTEQEILATSNHPFIVTLYHSFQTEDYLYLCMEYCMGGEFFRALQTRKTKCISEDDARFYSSEVTAALEYLHLMGFIYRDLKPENILLHQSGHIMLSDFDLSVQAKDTKNPQVKGNASHSLVDTKICSDGFRTNSFVGTEEYIAPEVIRGNGHTAAVDWWTLGILIYEMLFGFTPFKGDNTNQTFSNILKNEVVIPNNNETSRACKDLIRKLLIKNENKRLGSKLGASDIKKHPFFKNDQWSLLRNQEPPLIPVLAKNGCDFAKLSSNPKGSKDKKDSAEQQEKLMFEEKVELDDQVSDNDPFHDFNSMSLMKQDNDSLIYGDSTSYGKISYTPNQNRSRSNSHRSFFKR

SEQ ID NO: 28241 - protein, 789 aa, Kluyveromyces lactis NRRL Y-1140
MLKPVLGLRGSIGRGRGLLALSNPLLSITRRFDDRLSLPISSIRTLNYAVNRFGEMKGNQRFPSAGIRSFSITLRNRNEASDVGGNGKHQEGEDKTPDKKTNKPSSTVSGGLADVKRLFYLARHDWKMLVLAVSLLTVSCTIGMAVPKVIGLVLDATKNALSGSNTNNGNGGLEDSKSLTLDDLPPIVGDIQLYDFFLLFGGALLIGTMANFGRVVLLKILGERLVARLRSNVIKKTMHHDMEFYDRNKVGDLLSRLGADAYIVSRSMTQNISDGFKALICGGVGIGMMFHISSTLASVLFLFAPPLLVGATIYGNKIRAISRELQQASGNLTKVAEEQLSGIKTVQSFVAEGKEVHRYNNAVRQVFNVGKKEAFTNATFFSSTNVLGDFSFLLVLAYGSHLVLQGNLTIGDLTAFMLYTEYTGSAVFGLSTFYSELMKGAGAATRLFELLDYKPTIKSTTGKAFKPLNGKVEFQHVSFSYPTRKTNQIFKDLNFTIEPGSNVCIVGPSGRGKSTIASLLLRYYNPTSGKILVDGQDITKLSSKSLRRQLGVVQQEPILMSGTIRENITYGVSRQPSMEEIRSVAKKCFCHAFISKFPNGYETIIGPRGALLSGGQKQRIAIARALLNKPKILILDEATSALDVESEGAINYTLGRLMKSKELTIISIAHRLSTIRRSENVIVLGIDGSVVEMGKFKDLYANHDSALHKLLTEPSEQQHSQHQQYAPPAITQESEPQTEENGKDDSGEDQNSDHEENSQDQNEKRLQEEVIHQVLEDISHDQKTSTLRP

SEQ ID NO: 28242 - protein, 497 aa, Kluyveromyces lactis NRRL Y-1140
MTMTLLRGVSVFSRRVPVAGGFGYLKRADISNVVLQGRTYASAKVALAEDLTLETHTDNQAAAIEQANERAVSNPDVLDSGIHSLQHAYRESGEYGTRPIYLDMQATTPTDPRVLDTMLKFYTGLYGNPHSNTHSYGWETNKEIEQARKYIADVIKADPKEIIFTSGATESNNMALKGVSRFYKKTRNHIITTRTEHKCVLEAARAMKNEGYEITFLNVDEQGLINLEELEAAIRPETCLVSVMAVNNEIGVMQPLKEIGELCRKRKVFFHTDAAQAYGKIPIDVNEMKIDLMSISSHKIYGPKGIGAIYVRRKPRVRLDPLISGGGQERGLRSGTLAPPLVAGFGEAARLMMKEYENDSNHIKRLSDKLMNALLSIDHTILNGSADHRYPGCVNISFAYVEGESLLMALRDIALSSGSACTSASLEPSYVLHALGKDDALAHSSIRFGIGRFTTDEEIDYVIKAITERVDFLRELSPLWEMVKEGIDLNSIEWSGH

SEQ ID NO: 28243 - protein, 493 aa, Kluyveromyces lactis NRRL Y-1140
MSEFTGIPTDTGTGGNSLDTDLNTPYDKANMAWIMVAGSFVWLMVPGIGLLYSGLSRKKHALSLLWASIMTISVVTFQWYWWGYSLVFSHNTRGNGFIGTLSEFGFKNVLGAPSAAGTVPDILFAWFQGMFAMVTGILMVGGACERARLFPMMVFLFLFITIVYCPIACWTWNPEGWLATLGALDYAGGGPVHICSGHGALIYALILGRRNDPLTKSGVPKYKPHSVTSVVLGTVFTWIGWIGGFNPGSAGNATIRAWYSAYSTNLAAACGALTWMFIDYFRSGRKWTTVGLCSGAISGLVGITPAAGFVPLWASVIIGIVTAAGCNLAVDLKNLLKIDDGLDVYALHGVGGCIGSVLTGIFAADYINALAGVESSPIAGGWINHNYKQVGYQLAAVCATIAWTCVVTACLLLILDRIPFLRLRLRPEEEELGTDEAEIGEFTYEEDAVYIPEPIRSKSIAEAPPANIDDKIHTGNNSSSELQSEPKTTSANA

SEQ ID NO: 28244 - protein, 489 aa, Kluyveromyces lactis NRRL Y-1140
MSEFTGIPTDTGTGGNSLDTDLNAPYDKADMVWIFIAGSFVWLMVPGIGLLYSGLSRKKHALSLLWASIMTIAVVTFQWYWWGYSLVFSKTRGNGFIGTLSMFGFKDVLGAPSAVGVVPDIVFAWFQGMFAIATGILMVGGACERARLFPMMVFLFLFITIVYCPIACWTWNPEGWLAALGALDYAGGGPVHICSGHGALMYALILGKRNDPLTKSGVPKYKPHSVTSVVLGTVFTWLGWIGAFNPGSAGNTTIRAWYSAYSTNLAGSCGALTWMFIDYFRCGRKWTTVGLCSGAIAGLVGITPAAGFVPLWASVIVGIVTAAGCNFAVDLKHILRIDDGLDVYALHGVGGCIGSVLTGIFAADYINALAGVESSPIAGGWINHNYKQVGYQLAAMCASVAWTCVVTACLLLILDRIPFLRLRLRPEEEELGTDEVEIGEFTYEEDAVYIPEPIRSKSIAEAPAAIIDDKVQTGNSSSEELQSEPKTNA

SEQ ID NO: 28245 - protein, 515 aa, Kluyveromyces lactis NRRL Y-1140
MCGILAYFGKSFGSTLTDEFQELYEKDLTGPIQSCNSNTLFNELIPYIVRRGPNYASLRSLSEINAMLFSSVLSLRTPFTKQSVMVQDRYLLQYNGELYNDDTVENCEHSDTEYISSLLEKHSVEEVVRKCYGEFAYAITDLQERKVYFGRDSIGKRSLSYILLDDELYITSVSGRCDGFQNCLAGVIYIFDINTKQLTGSVKIHDEPYIVSDQIDNDFQLLEEYKIKLYECLRRSVYQRIVTIHPMHLENGNISILFSGGLDCSVITALLCEQLIKINRNSETIIELLNVGFENPRTGKMPSDSPDRILAIKSAQLLSELYPQVNIKLIEVDVPYTDYLSHKDTVIDLMYPKNTEMDLSIAIAFYFASRGRGKVTENGESKPYNRSGIVMFSGLGADELYGGYHKFSNKSNEELVIELQKQIAQIHDRNLNRDDKVISNHGIEVRYPFLDERVVQFSVDLPLNYKVNKHILRVMAKDILRLDFISEEPKRAIQFGARSAKMTKDSNKRGTDLLK

SEQ ID NO: 28246 - protein, 398 aa, Kluyveromyces lactis NRRL Y-1140
MSDNVYIVAAARTPIGSFQGSLSSKNCVDLGSAAVKGALAQVPEIDPSTVEEIIFGNVISANVGQAPARQVALAAGLGKHIVASTVNKVCASGMKAIILGAQAIKTGSADIIVAGGAESMSNAPYYLSSHRSGARFGESKVIDGIQRDGLNDAYDGQAMGVHAEKCASDYDFSREEQDDFAIQSYQKAQLAQSQGKFDKEIVPITIKGFRGKPDTQVTKDEEPSKLNVEKLRSARAVFAANGKGTVTAPNASPINDGGAAVILVSEKKLKELNLKPLALIKGWGEAAHEPADFTWAPSLAVPKALKHAGVPDISSVDFVELNEAFSVVGLVNTKKLGIDAAKVNVYGGAVALGHPLGCSGARVVVTLANILNQENGKIGVAGICNGGGGASSIVLERV

SEQ ID NO: 28247 - protein, 869 aa, Kluyveromyces lactis NRRL Y-1140
MQSDEASLKKDYQFNIQEKESSTDNGNLEEFEDYGVEFTNAIVEACGHDPESFPDGIYPKEVEYMITVTKRLSIEESLKILEKTLKEHEDDANLPEDLIERTRSLLDRDDYLKQGHSEFEWFEQCKIDAAMIHYHSPYPEVRTVTSPIDDETIPIETFRAYFLGFFWTILGAGVNEFFVHRKPKISLTAPVMQILLYPCGKLFERVMPNHTFKLGKISVNFNPGPWSFKEQMFSTIIFNVATSYTYVSHNIYVQRLEIFYNNKWLDFGYEVLLMLCSQLLGFGYAGILRKFVIYNEKCIWPTLFPTLALNGALLKPDSKENINGWRMTRYKFFLTFFVIMFIYNWIPTYLFEGLSTFSWLTWCSPKNFDLAVVTGSQYGLGLNPVPTFDWNIIDYNYALTIPFFSQLNQYIGTFIGFFAILGIYYSNYKWTAFLPLNSNDIFTNRGESYVVQDILDENSMLVESKYQEYSPPYYSAGNLLVYGGIFAQYPFAFLYVFFTEWASILQCFKQMYRQIKNFRNVSIKSSTYDGFDDPQTRLMKKYKDVPDWWFLVVLVVALVLGILCIKLYPTQTPVWGLFFILGINFVFLIPICFIFSMTGFNMTMGVITEIIIGYALPGNGLALMTLKSLGYTIDNQAESYIADQKLAHYAKIPQRAVFKGQLVGVLIQCFVSLGVISWQIVNVKDICTSKAENKFTCPKEVNFYSSSVFWGVIGPKRVFNGLYPILKYTFLIGFLLCLLCCAIKYFFPRQTRLFHPTILIGGMQQFAPYNLSYVTAGLYFSFGFMFYIKRYYTKWWEKYNYVLAAAFSSAVAFSAIIIFFSVKYKPKPIDWWGNNIVGVGVDGGEGRQTLKNITSAFDGYFGPRKGSYP

SEQ ID NO: 28248 - protein, 329 aa, Kluyveromyces lactis NRRL Y-1140
MIVQVSRMIGNLSKFSRLNLSLPTPCTWPASRRSAVLVLLFVGTRGELRVLLTKRSRKLRSFAGQVSLPGGKADNGFESFQEVALRETEEEIGLPRDPVVLRDEYGLQIDPVCETLPHYLSKTFLSVKPLVCFMYNSKFASENGRRFEEPLNISKIFAKLNAGETSSLFSIPLSDLICHEHKEWKGYKPEYIAREQHIYKWGGLKWPLRYYYYPMENIGESQWVKDVIDESSGDEQFNSILCKNVWGLTAKILYDVARIAHGIVTGENSDSQIGHEELIYGLHEFGSQMRDRSRSDWEIGMIENSRHFKYADVIPSFYLDHVKKSTANY

SEQ ID NO: 28249 - protein, 793 aa, Kluyveromyces lactis NRRL Y-1140
MSVIYRGTHSEESDGRASDSSSLSQIQLQITVKNENTISLEKDIKEEELVNESEFHDSESIDEDDGLVWKGDPTYLPNSPYPDVRFAVSIEDDPTIRLNHWRTWFLTTIFVVVFAGVNQFFSLRYPSLSIDFIVAQVICYPIGKVLAKLPDWKCRRVPFFDLNPGPFTKKEHAVVTIAVALTSSTAYAMYILNAQGSFYNMKLNVGYQFLLVWTSQMIGYGAAGLTRRWVVNPASAIWPQTLISVSLFDSLHSRKIERAVVNGWSMPRYKFFVIVFIASFVWYWVPGFLFTGLSYFNVILWGPKTRDNFVANTIFGVESGLGAFPISFDYTQISQAMSGSVFATPFYVSANTYASVLLFFVIILPCLYFSNTWYAKYMPVISGSTYDNTQSKYNVTKILNEDYSINLEKYKNYSPIFVPFSYLLSYALNFAAVIAVFVHCILYHGKDILAKLKDRRNGGTDIHARIYSKNYADCPDWWYLVLQVVMIGLGFVTVCAFDSKFPAWAFVIAILISLVNFIPQGILEAMTNQHVGLNIITELICGYMLPLRPMANLLFKLYGFIVMRQGLNLSRDLKLAMYMKVPPRLIFFIQIYATILSGMVNVGVQEWMTHNIEGICSTDQSNGFTCANGRTVFNASIIWSLPKYLFSPGRIYNPLMWFFLIGLVVPLIVYAIQRKFPKIQFAKYIHTPVFFTGPGNIPPSTPYNYSLFFSASFCLHIIRKRWGPWFKKYNYVMGAAVESGVAIAVVIIFLCVQFPGAELNWWGNNVWKNTYDHNYKKFYTLEEGQTFGHTKWW

SEQ ID NO: 28250 - protein, 794 aa, Kluyveromyces lactis NRRL Y-1140
MNHIKSVLSADAPVTEKVLLDVGQERSFINSSDDNLNLEDKKRGLEVNVFAARSDYLLGSQLSHEVIEDEYAGIVVEDDSAYPEVRAAVPSSDDPTLPQNTVRMWVIGMLMATVGSGLNLLFSLHSPSIVLSAFVTSILAWPIGKAWDKVMPDVKLFGRFGGPSLNPSPFNLKEHCLIQIMANVSFGGGEAYATDIFLAMNNYFEADFGWGFDIVTILATQCIGFALAGLVKDILITPASMIWPSNLVTCTFLTNLHINENHMANGWKISRLKFFFMVFIIGFVYYWFPGFIFQALSYFAWVTWIRPDNVIINQIFGASTGLGIIPLTFDWNQIAGYVGSPLVPPVSTIFSILLSMIMIFWVTVPAIHYSNVWFGKYLPISDSGSYDRFQQSYNVSKIVTPNLSFDIDAYKSYSPLYLPATFVISYGMSFASNTATLVHAGLFHGKEITGAFRNVKKEQEDIHNRLMKNYRDVPHWWYGIVFLVFFGLAIAGIRAWNTEMPVWALIFALVIAGVFLVPIGIICAVTSISVGLNVLTEFIIGYILPGKPIAMMFFKTFGYITNHQAVTYAQDMKLGHYMKIAPRLMFSAQFIATVWSSVVQVCVLKWAQGNITDVCDAHQKSHFTCPNARVFFNAAIIWGVIGPQRMFSSGQLYSKVLWFFLIGASLPLINWLVLKKWPKSPIKYLNWPVFFSGTGLIPPATPYNYGSYCMVGITFGYFIKRKWFHWWTKYNYSLSAALDISLAWSSLMIFFCLTLTNTNAPNWWGNTVIDTIDYEGTAIQSILNDGESFGLTKW

SEQ ID NO: 28251 - protein, 631 aa, Kluyveromyces lactis NRRL Y-1140
MSPVQLDEKSLRTKSPRSDSPVHGQSTVVKNIPFGHYVFERLLNSGAKSIFGVPGDFNLPLLEYLYDEDLVANGLQWIGTCNELNGAYAADGYSRYTNKLGCVITTYGVGELSALNGVAGAFAEDVKVLHIIGVSPSRFRENEQFRSHNVHHLVPAIDSQQPPNHQVYFDMVKDRVCCSSAFLDDINTAADRLDQVIVDICKNSKPGYVFIPVDFADKLVSNKNLIQNPIIDMDTVIESYKDENATKIAGDRLLQWIYESNAPSVFSDLLVDRFNLRKELRQFIETADVWNYNTAMGKSTLDERNPKYLGLYKGAETGKEMQATVDSSDLILHFGPAKNEINCGYYSFHFNENARIIELSNNIIQFIDIKDKNASTVEEANFVSVLKYVNDNLDKSKLSFSYPPVPKSNHSCEYDNNDSITQKSLKEIIPNYFNDGDVLIVETGSFQFGVPNMQFAREMKYITQSFYLSIGMALPAALGVGCGMRDYPRSHIVDQALVPKDYIPRLILCEGDGAAQMTIQEFASYIRYKIPMEILVWNNNGYTVERAINGPTRSYNDIAPFKWTALLNVFGDFENKFNESVTVEKNDELVQLLNKWKSCKERANIKLAEVMLPVMDIPQELNAMLVNGKPN

SEQ ID NO: 28252 - protein, 293 aa, Kluyveromyces lactis NRRL Y-1140
MEFTDLLYHHALAFEDAALFYYDKDELQNLHQTLNNMVNSLRNGGKLIFVGCGKSYKIICKTVAMLTSMGIPARDLHPIEAMHGDMGCCQPNDSLIFCSTSGETDEVLNLLRYLKAGGSYWEKCIRIAVTGNRNSTLATHCQHTIVVPQADRFKEPKFQRGLRAPTISTSLMVTVLDCICIEISKAWFGNDPVKREIFFNERHPGGGIGKITSSTNLTQLVRAPTDYQTPQYHSYMVKRNETLTETQFLSLLITFDYIQFSPKNVRVPTCLLREEHKRAVHSGTVPEWFRRYL

SEQ ID NO: 28253 - protein, 372 aa, Kluyveromyces lactis NRRL Y-1140
MAATSDIVEKTHILQKYLELDQRGAIIAEYVWIDSEGGLRSKGRTLNKKVTSVDSLPEWNFDGSSTGQAPGHDSDIYLKPVAFYPDPFRRGDNIVVLAECWNNDGTPNKFNHRHEAAKLFEAHKDAEMWFGLEQEYTLFDQYDQVYGWPKGGFPAPQGPYYCGVGAGKVFARDVIEAHYRACLYAGVNISGINAEVMPSQWEFQVGPCEGIAMADQLWIARYFLHRVAEEFGVKVSLHPKPLKGDWNGAGCHTNVSTKLMRAPGGMKYIEDAIEKLSKRHNEHIKLYGADNEQRLTGRHETASMSTFSSGVANRGASIRIPRSVNKEGYGYFEDRRPASNIDPYLVTGIMCETVCGAIENANMTKEYERESL

SEQ ID NO: 28254 - protein, 488 aa, Kluyveromyces lactis NRRL Y-1140
MPPIIDSESDDERIIGITNKRHRQDGQTKVLKNKVKKHVRTKETADSDGAGNGNSSDDEEDERVHSQLSKRSRDPRKMKKKKKKKLSNKNLQGVNGGYAWEDDIQRSWDLVKVDDEGNIAAIVASIVEARKKRAAEKTVTPYQRGIIRTLILVLDCSEAMMEKDLRPNRYAMTVQYAVDFIHEYFDQNPISQIGVVVMRDGLAQLISQVSGNPQEHIDALKMLRRQEPKGNASLQNALEMARGLLLHVPAHCTREVLIVFGALSTTDPGDIHQTIGSLVHENIRAKVIGLSAQVSVCKELCKQTNYGDNSYYGIILNDHHFKELFTSAVTPLPVSKVNKGFTLVKMGFPTRVFEDTPSFCACHSTLVHGGYVCPNCKTKVCSLPTVCPSCDLMLILSTHLARSYHHLMPLKTFQEVPVSDSFPTDYCFGCQKRFPTLRNNKTGELLTSSRYRCEECDQDFCIDCDVFIHETLHNCPGCESKPINVNIK

SEQ ID NO: 28255 - protein, 502 aa, Kluyveromyces lactis NRRL Y-1140
MPSPHGGVLQDLVARDASKKAELLEIAQSGDLTSWSLTARQICDLELILNGGFSPLDGFLNQQDYQSVVEKSRLQNGLVWTIPITLDVDAEFASQLSPDQRIVLLQDNEFPLAILTVSDVYQPDKAVEAKKVFRGDPEHPAVKYLFEQAGEFYVGGSLEAIQLPVHYDYPGWRKTPAQLRLEFESKQWDRVVAFQTRNPMHRAHRELTVRAARSNNSKILIHPVVGLTKPGDIDHHTRVRVYQEIIKRYPNGMAQLSLLPLAMRMGGDREAVWHAIIRKNYGASHFIVGRDHAGPGKNSKGVDFYGPYDAQELVESYKNELDIEVVPFRMVTYLPDEDRYAPIDEIDTDKTRTLNISGTELRNRLRDGGEIPAWFSYPEVVKILRESNPSRPKQGFALVLSETLPAQLKTALLSTFLQYGGGRHYKVLEHGNNEEILALVPDFVRSGTGLILQNASSLKGTNVFKIGEESGSDIPLETEDKNILHIVQRVVLFLEDQGFFQF

SEQ ID NO: 28256 - protein, 876 aa, Kluyveromyces lactis NRRL Y-1140
MTGEKKLSNKVINCITQLPYKIEKISDDDTEANDPSCWSIEPISGNSALQSSLKYLNESPNWEHHIVAWTGEILNSDENPDRSMYLTQAEKEVIATMLQGKEAEGCTHTVHPVWLLRKDQYRWRKFAENVIWPALHYILNAPDDGTLENVWWYDYVKFNEAYAMKVAQIYQPGDIIWVHDYYLMLLPQLLRMRFNNATIAYFHDTPWPSNEYFRCLSRRKPVLDGLLGSNRICFQNDGFARHFVSSCQRLLGCTATKSSNSNANNSDEYRITSYGGDVLVDSLPIGVDTEQIQRDAFSPDVDEKVNAIKKAYEGKKIIIGRDRLDTVKGVLQKLQAYQVFLAMYPEWRGKVVLIQVSGPTAKTDANIKLESQVNELVSSINGEYGNLNYSPVQHYYLRIPQDVYYSLLRVADVCLITSVRDGMNTTALEFVTVKSQLSKYNCYASPLILSEFSGTSTILTDAIIINPWDAVAVSKAINKALKLTPEQKETLELKLRKEVPTIQDWTDKFLGKVVDLVEHKIGNQKITPALNRPLLLKTYKKAKRRLFLFDYDGTLTPIVQDPAAAIPSARLYSIITKLAQDPKNKIWLISGRDQQFLNRYFGTKIPQVGLSAEHGCFMKDVSSEEWINLTSKFDMSWQKEVGQIMEEYTKKTPGSFIERKKVALTWHYRRSDPQLGEFNADALKTSLEKITDGLGVEVMEGKANIEVRPSFVNKGEIVKRLVWTPHGAKQLIEDNFSIDENVLRDELPEFVLCLGDDVTDEDMFKQLNHIEEQWDEKYPNFESSDGFGIYPVTVGSASKKTVAKAYLTDPQQVLDTLGLLVGDVSLFQSAGTVDLDDRGHLKDSESSLRSEQASAAYAMKRSTSSNNGLKKSSKNN

SEQ ID NO: 28257 - protein, 1148 aa, Kluyveromyces lactis NRRL Y-1140
MVVIIASLFLPFQPQFEIHSSSVETASLVDQPVKIRNAGSGVKSSANSLYSGNPFDLGTSLTRKRSSSSHSRSSFAPLDLTMSAASGGDGMESSPAPSGEFSNQHRLDEVTKPVGANPQISSESFMESLTGKAHSAAASSSKNALSNYPTGSVEEFFSSGNTQLGKNYDNNTGSPDSTYSIQSSPVISAVNPTHDSTSNLLKNVNKSLLYQIVLNESNSASALEGTSKHFWNSPGSTVITPRSRALPDVNSSLSGVAKGKGHLHIKSQAPAIRHVHPAAQGPGNVTGTTGGGGGGSSKLKYSVNANHDEDSQEEKYEQSEQEEGEEENDENENVVDDEDEDMYDIEELDSSGRYHYNVPKFGGYSNKAKLKNALLKKSENIFSTAPWTIVPCAKGNGGLKNAVATALLEKTIDEQVTWVGTVGIPTDCIPEKTLDNICHELYTNYHSRAVISDDLTFKGAYKNFCKQILWPTLHYQIPDNPNSKAFEDHSWNYYQHLNQLFANEIVKTYKEGDIVWVNDYHLMLVPEMVREKLPDAKIGFFLHISFPSSEVFRCFPQREKILNGILGANSVGFQTDEYARHFMQTATRLLMTDADDHQLKLQGRVVKVNNTPIGVDVFNLDEQIDTEQVIQWRKLIRERWSDKRLIVCRDQFDRIRGLKKKMLAYERFLKENPEYVDKVVMIQICLDTARDIDLERDIMSVVDRINALSKDISISQPVVFLHQDLEFSQYLALNCEADLFIVSSMREGMNLTCHEFVVCSRERNAPLLLSEFTGSTQILKSGALLINPWDIKKFARAIKIGLEMPPDEKRRRWKKMFKSVINHDSDNWIVHALNNIDSSWEFNHERSQVFNLSFKQMYAAYSQAKRHMFVLKISEPPTPRMLRILSELSANNIVYLMNSNSRGVLERLYSRVSNVGLIAENGAYVRLNGNWFNIVEDVSWKDDVIKVFEDKMERLPGSYCKIGDSMVRFHTENAEDRDRVQGVIGEAMTHINTLFSDKGIHAYVNKNIVFVQEVGLALKTLQFLVSYYNSVDDISCSSHSPVAQPTSAETSASPLLSPISPKNGAGFFHVAAKRENRDPIGFLTITGSTSPVIEPLFQYVNELTKEGKLQYGYSVVHGDTSSTYAKEHIQGLNELFSMLQKLSSPNSS

SEQ ID NO: 28258 - protein, 512 aa, Kluyveromyces lactis NRRL Y-1140
MSIASEELNYLIWRYLQEAGHEVSALALQEETRVLEFEERFKEHIPLGCLVQLVQKGILYTESEFLVPPNGEMVPVDQELYKRNFTLVQALEVDKQKFPEIAARGRFALENDVEAEMLEKKEQEQAAAMAADSPSGTQSASSRFIKTLSDHLTLSQSFTSQWNPKYGILLVWGGAQSQARIGSIDIVTDKESWSIKDPIDLVYPKRSEEEPIISVSWSPDGELVLTGTTSGELRLWNKQGKLKNILDSHRSPIVAMKWNQDCTHLLTTDVSNVVILWSTLTGTQLQHFSFKEGDIENEDSLGIDLEWVETDKFVIPGPGGSLLVYTIGNNKPLGRLLGHTSTITTLEFNKSNKSLLSASDDNTIKVWRGGNSSAANDFTDHTKTISSAHWINDDLIISTAYDGTVKVWSISKNSIVAEASLDSEPIFEASLSPDRNWLTVGTLQGSAIVFDVKTFLESYDQNSVQQQSVPISTYGEYQIDQDGLQVTNIAWNNESTAFAVSYINGNTRLLSL

SEQ ID NO: 28259 - protein, 305 aa, Kluyveromyces lactis NRRL Y-1140
MSTDKKQSNFAIDFLMGGVSAAVSKTAAAPIERVKLLIQNQDEMIKQGSLDRRYTGIVECFKRTAADEGVASFWRGNTANVIRYFPTQALNFAFKDKIKAMFGFKKEEGYAKWFAGNLASGGLAGGLSLLFVYSLDYARTRLAADSKSAKKGGERQFNGLVDVYKKTLASDGVAGLYRGFLPSVVGIVVYRGLYFGLYDSLKPLLLTGSLENSFLASFLLGWAVTTGASTASYPLDTVRRRMMMTSGQAVKYDGAFDAFRKIVAAEGIKSLFKGCGANILRGVAGAGVISMYDQLQVILFGKTFK

SEQ ID NO: 28260 - protein, 573 aa, Kluyveromyces lactis NRRL Y-1140
MNINIKKDSGGNGSDLPRWNDSPVGSLGSFNGRRRSMSFSESVNFARNTQNPLDMSAQEMRGLNGFRRSFIAHKSLKLHGKTPNFITRNFNEFLTLYGHFAGEDLSEDEETETEVETDEDEDEEAALLRHGIRGLRHQGADRYGEETSSMAIDDDEGSSENNDIQQQQQLKQQQQHLHKKKRNTSTTKAVLLLLKSFVGTGVLFLPRAFHNGGWLFSTLCLLFCATVSFYCFILLIDTKTAVGVDGYGELGSRLFGPKLKFTVLSSIVLSQIGFAAAYTVFTATNLQAFFKHVFSLEYSLIFWIMIQLAFYLPLSLTRNIARLSATALVADLFILLGLVYVYYYSSFYIWNHGIASDSMVSFNKSDWTLFIGTAIFTYEGIGLLIPIHESMEKPAHFKPALMYVILVVTIIFISCGLICYSAFGAKVETVILLNFPSNSIFTNAVQLIYALAILLSTPLQLFPAIKILENKIFHKNASGKFDAKVKWRKNYFRAFVVLIAVIIAWIGANDLDKFVSLIGSFACIPLIYIYPPLFHYKVFENNKKLQAIDLAILIFGALVMSYTSWQTIALWIH

SEQ ID NO: 28261 - protein, 706 aa, Kluyveromyces lactis NRRL Y-1140
MAFQDLNAVLLDKKGTPTDTSPSKKYGTGSCIGADTSFNDVQSTSTSTVGLKFSTVSFPENERVTLKDTIPYYLPCFSWIPTYSVKKCMGDFIAGLSLASFQIPLAMSYATSVAHVPPLCGLYSLVFSPAVYTVLGSVPQMIVGPESAISLILGQAIEARLSEDPKLKAINICLVITFISGLVLLTGGLLRLGFLENVLSRALLRGFISGVGVIMVITSLVVELKLNHVTPTRQEHYHSPFEKVLFIMKYGPENYHKPTAILSLVAFVILMSLRIFKKRYGKKFKWLVLLPDILVVVALSIFVSYKMHLKSRYGIEIINDIPKDSMKHLKNPFSNVNVATFKDLFSTGFMVAMLGFFESATASKSLGTSYNLAISSNRELIALGSMNVVGSMFAILPAFGGYGRSKINAYSGAQTTMSGFFMGLVTLFTIQFLLPIIRYIPVCILSVITTVVGLTLLEEAPHDLKFHWRCKGYSELTVFTVTLLATLFYSLEAGIYIGCACSIINVIKHSAKSRIQILGRVPGTETFINADDYQANAAGYFINPQIEEIEGFLIVKIAEPLTFTNADDLKMRLHRLEKHGSAVTHPAAPRSRRKEMTENVIFDMKGMTHIDSSAAQTLEEILSAYNRRDVHVFLTNVPLTEKVRERLVTSGVAELCERNTITNSSYFSTIEDALTAADVIAQRHNQQYHTPPPSIFSNTLLNSSMA

SEQ ID NO: 28262 - protein, 563 aa, Kluyveromyces lactis NRRL Y-1140
MSEITLGRYLFERLKQVEVQTIFGLPGDFNLSLLDNIYEVPGMRWAGNANELNAAYAADGYARLKGMSCIITTFGVGELSALNGIAGSYAEHVGVLHVVGVPSVSSQAKQLLLHHTLGNGDFTVFHRMSSNISETTAMITDINTAPAEIDRCIRTTYVSQRPVYLGLPANLVDLTVPASLLDTPIDLSLKPNDPEAEEEVIENVLQLIKEAKNPVILADACCSRHDAKAETKKLIDLTQFPAFVTPMGKGSIDEKHPRFGGVYVGTLSSPAVKEAVESADLVLSVGALLSDFNTGSFSYSYKTKNIVEFHSDYTKIRSATFPGVQMKFALQKLLTKVADAAKGYKPVPVPSEPEHNEAVADSTPLKQEWVWTQVGEFLREGDVVITETGTSAFGINQTHFPNNTYGISQVLWGSIGFTTGATLGAAFAAEEIDPKKRVILFIGDGSLQLTVQEISTMIRWGLKPYLFVLNNDGYTIERLIHGETAQYNCIQNWQHLELLPTFGAKDYEAVRVSTTGEWNKLTTDEKFQDNTRIRLIEVMLPTMDAPSNLVKQAQLTAATNAKN

SEQ ID NO: 28263 - protein, 825 aa, Kluyveromyces lactis NRRL Y-1140
MLRSAENLNRKLSRTSLLKNVKIYQPSISDVELGCTCRSFSSLVQKPNQTTVGISRGNKVISGLNIGARRPNISSIPPISTAFNVASVRSYAKNYNLNLNKDQEGGESALQQFGTNLTELAKQGKLDPVIGRDQEISRAIQILSRRTKNNPVLIGRAGVGKTALIDGLAQRIVANEVPESLKDKDLYALDLSSLVAGAKYRGEFEERLKNVLDEIDKSNGKIIVFIDEVHMLLGLGKTDGSMDASNILKPRLARGLRCISATTLDEFKIIEKDPALTRRFQPIILNEPSVHDTISILRGLKEKYEVHHGVRITDSALVSAAVLSNRYINDRFLPDKAIDLVDEACAVLRLQHESKPDSIQAIDRAVMTMQIELESLKKETDPVSVERREELEKDLEVKKKELERLTEIWETEKSELDSIKTAKEDLDKLRTELDICQREGDYAKASELRYAKIPELERKVALNSKKDTENNLLHDSVTSDDISKVIAKMTGIPMETVLKGDKDRLLYMQNSLRERVVGQDEAIDAISDAVRLQRAGLTSEKRPIASFMFLGPTGTGKTELTKALAEFLFDDESNVIRFDMSEFQEKHTVSRLIGAPPGYVLSESGGQLTEAVRRKPYAVVLFDEFEKAHPDVCKVLLQVLDEGKLTDSQGHQVDFRNTIVVMTSNIGQDILLHDTELGDDGKVSKKTKRSVIEAVKKNYPPEFVNRIDDLIVFNRLSKEVLRSIVDIRLKEIQERLNDKRMTLNLTDEAKDWLTERGYDPLYGARPLNRLIHKQILNPMAIQLLRGQLRHEETVNVVIEDSKLVVKPNHDPESSELGNDKQADVE

SEQ ID NO: 28264 - protein, 245 aa, Kluyveromyces lactis NRRL Y-1140
MAEPQMTDNETTRPEESELATTVKNLTEENEALSLALHRTRLSVKRLRLEYGVLLERLESRVHADQSLKYDSPLPDLESFRKSLLESMPARTRKKKGKSKDKRDPNLPKRPTNAYILFCEMNKDKVKEMNENTDMTRLMAEIWNGLDEEAKKPYYDLYNEGRQKYEQEMSTYSKKKASQDTENNESSNANENENENENENENENENENDNENDAMDLDSDVTQPEPDLATDQPDEDMESEPNSEL

SEQ ID NO: 28265 - protein, 2141 aa, Kluyveromyces lactis NRRL Y-1140
MISSGKYDPLEESYDGGCSLDERPLSKKAHVYKSWANVIPDKQGLYDPEFEKDACGVGFVANIKGVSSHKIVSDARFLLCNMTHRGAVSSDGNGDGAGILTGIPHEFMQREFKLDVGIDIPDQSQYAVGNVFFKKDSPEALVNSKRTFEQLADSLDLKVLGWRVVPHDSSILGAVALSREPEILQPLVVLKELFSESSSSSSISKDEFQSTCETKFKTSLYILRKQASTSIGLQNWFYVCSLDNKTIVYKGQLTPSQVYNYYHDLTNAHFKSHMALVHSRFSTNTFPSWDRAQPLRWLAHNGEINTLRGNKNWMRAREGVMASEVFGEQLDKLYPIVEEGGSDSAALDNVLELLMMNGVLSLPEAIILMVPEAYHKDMDSDLKAWFDWASCLMEPWDGPALLTFTDGRFTGATLDRNGLRPCRYYITSDDRVICGSEVGVIPVENSLVIQKGKLKPGDMLLVDTESGEMVDTKQLKHKFAKRKDFKSWLSKVIKVEDVLEKTSKFLPPSFISDYNLKAQTDPRLLALGYTYEQVSMILVPMALGGKEALGSMGNDAPLACLNEDPVLLYDYFRELFAQVTNPPIDPIREANVMSLECFVGPQGNLLEMHPSQCDRLVLKSPILHWDEFEALKNIEKAHPTWSTSNIDITFPKEEGLLGYTATIDRITQEASDAIDQGKKILFISDRLLSADRVSISSLIAIGAIHHHLVRNKQRSQVALILETGEAREVHHFCVLLGYGCDGIFPYLAMETLVRMNHEGLVRNVNNDDSSIDDKTLLDNYKHAVDGGIFKVMSKMGISTLASYKGAQIFEALGIDNSVVDLCFAGTASRIKGVTFEYLAQDSFSMHERGFPSRLTIQKSVNLPESGEYHWRDGGYKHINDPTAIAALQDSVRNKNEDAWEMYVKKEMEAIKDCTLRGLLELDYSDSESIPLEQVEPWTEIARRFATGAMSYGSISMEAHSTLAVAMNRLGAKSNCGEGGEDPERSIVNSNGDTMRSAIKQVASARFGVTSFYLSDADEIQIKIAQGAKPGEGGELPAHKVSKEIAKTRHSTPYVGLISPPPHHDIYSIEDLKQLIYDLKCSNPRAGISVKLVSEVGVGIVASGVAKAKADHILVSGHDGGTGASRWTGIKYAGLPWELGLAETHQTLVLNDLRGNVVVQTDGQLRTGFDIAVAILLGAESFTLATVPLIAMGCIMLRKCHLNACAVGIATQDPVLRDKFKGQPEHVINFFYYLIQDLRRIMAKLGFRTVDEMVGHSEKLRKRDNVKTKALNIDLSPILTPAHLIRPGVATKFTKKQDHKLHTRLDNKLIDEAEITLDKGLPVTIDANIINTDRALGSTLSYRVSKRFGENGLPQDTVVVNISGSAGQSFGAFLTAGLTFILDGDANDYVGKGLSGGRLVIRPPKDSRFKSDENVIVGNTCFYGATSGYAFISGCAGERFAVRNSGATVVVERIKGNNAFEYMTGGRAVVLSQMESLNAFSGATGGIAYCLTSDYDDFVGKINHDTVEMQSLVDPVEIAFVKNLIQEHYNYTKSDLAKKILNKFNHYLNNFVKVIPTDYKKVLENEAKEKVKAEKQSTADFLKKFNSSTDSAVDATNGEVDLLRSSVSHKSTLAEPKVLDLEDAVQDTNNLKKAEEKLEKIRGFMKYKMKHEKYRSPAARTKDWKELSNAITKKDARQQTARCMDCGVPFCTSDTGCPISNIIPKFNELVFKNQWKLALDKLLETNNFPEFTGRVCPAPCQGSCTLAIIDDPVGIKSVERLIIDNAFKEGWIKPCPPEVRTGKIVAVIGSGPAGMACADQLNRAGHSVVVYERADRCGGLLMYGIPNMKLDKSIVQRRLDLLAAEGVQFITNTEVGKDISVEELKSKFDAIVYTVGSTIPRDLRIPGRELKNIDFAMTLLKSNTQALLDRDLETIKKQIKGKKVIVIGGGDTGNDCLGTSVRHGAASVLNFELLPQPPNERSKDNPWPQWPRIMRIDYGHAEVKEHYGRDPREYCILSKEFIGNENGEVKAIKTVRVEWKKSQSGVWQMVDVPGSEQIFEADIVLLSMGFVGPEVIEDPTFVKSKRGTITTLSDSSYSVDGDKVFAAGDCRRGQSLIVWAIQEGRKCATAIDTFLMGSTNLPGNGGIVKRDYKLLEELASTI

SEQ ID NO: 28266 - protein, 324 aa, Kluyveromyces lactis NRRL Y-1140
METSKRMSTNSIKLLAGNSHPELAQNIARTLGLRLSNIGVYQYSNQETSVTIGESIRDEDVYIIQTGTGEQEINDFLMELLIIIHACRTASARRITAVIPNFPYARQDKKDKSRAPITAKLVAQMLETAGCDHVITMDLHASQIQGFFHIPVDNLYAEPSVLKYIQHKTDIGNAILVSPDAGGAKRVASLADKLDLNFALIHKERQKANEVSRMVLVGDVTGKSCLLIDDMADTCGTLVKASDTLLEHGAKEVLAIVTHGIFSGSAEQKLKNSKLSRIVCTNTVPVDLDVNILDQIDISPTLAEAIRRLHNGESVSYLFTHAAI

SEQ ID NO: 28267 - protein, 157 aa, Kluyveromyces lactis NRRL Y-1140
MAEEEHTFETAGAGASLTFPMQCSALRKNGFVVIKGRPCKIVDMSTSKTGKHGHAKVHLVAIDIFTNKKLEDLSPSTHNMEVPVVKRTEFQLLDIDDGFLSLMTMDGETKDDVRAPEGELGDNIQAAFDEGKDLMVTIIAAMGEEAAISFKEAPRSE

SEQ ID NO: 28268 - protein, 319 aa, Kluyveromyces lactis NRRL Y-1140
MSSDPRFDFFQQKKLGIVLAPFSGGQPKSGVENGPKYLMKQGLRSDIESLGWETTLEEPLKGRDFESGKNDETDVYGIMKRPNLVGEATKLIYESVKKVSNEGRLAVTLGGDHSIAIGTVAGVLDKYPNAGLLWIDAHADINTCSTTESGNIHGCPVSFLMGLDAKNTPPSLKWVPKCLDPKKIAYIGLRDVDAAERKILKDNGIASYSMYHVDRYGLNKVIEMALEKVAPNGDEPIMVSYDVDAIDPLYVPATGTPVRGGLTLREGLFLVERIAETGRLVALDVVECNPELASHDGHVVDTITTGCSIARCALGETLL

SEQ ID NO: 28269 - protein, 444 aa, Kluyveromyces lactis NRRL Y-1140
MRRFGIRSVSNMTQQGKTGIRANKYFMGNVPKDVWTLTNEAAQAASKNEKNQGRSILNLGQGFFSYSPPKFAIEQAVSALNVPLNNQYSPTRGRPSLLKSLTDFYSPIYNETLNESNVTITTGANEGILASLVGLLNPGDEVIVFEPFFDQYISNIEIPGGKVRYVPLVAPKELSERVTIGAEWKIDFDILNKTINERTKCIILNTPHNPIGKVFTREELTQLGDICVKNNIYIISDEVYEHLYFGDEFTRIATISKEIGDLTLSVGSAGKSFAATGWRIGWVVSRNAELLSYVSKAHTRICFSSPSPFQEACAHSIDIGLHNGYFENMREEYKEKFAILTRVFDELGLPYTKPDGTYFVCVDFSKVQIPDEYPFPRELNERAKDFKLSYWLVNELGVVAIPPTEFYIKEHEKAAENLLRFAVCKDNQYLEESVERLRLLKDYL

SEQ ID NO: 28270 - protein, 447 aa, Kluyveromyces lactis NRRL Y-1140
MIANNIAYITALFSYLLIAHSHFVPATNQKSSSFQIENDAPVDVELLQQDSLMYQLYGDLLQSRNGEESEVAAARPLIKVHPEETDEEFRGMCSFYNDHENEYPEDDFEDDLLQFTGIVSFAHTPIAQCFRNTSLEMDIAIVGAPFDTSVSYRPGARFGPNGIRQGSRRLGNGISPVRGFPGSKLRKLDPYHSGYKIVDCGDIPMTPFDNKLALNQLYRGQRALHNHSSLVHKEQPPKLITLGGDHTITLMALRSAYEHYGKVSVIHFDSHLDTWDPKVLGGNISKRAGLNHGTFLHFAHENGYLQDDKNIHVGIRAPYIAPGFYDEDHDYECGFEKIVARDLDIISLKEVVSAIKKRVGDGPVYISVDIDVVDLASAPGTGTPETGGLTSRELLTILDGLEGLNIIGADIVEVLPAFDTNGDITTIIAAQVVDSILGLMTVDSVEN

SEQ ID NO: 28271 - protein, 480 aa, Kluyveromyces lactis NRRL Y-1140
MSKRSSSVANTPVKRKHLHSTLNHKFVSINSQDDYKHLYRSVVPLDIFVWGTGSMCELGLGPLAKNKEVKRPRLNPLLPRDEAKIVSFAAGGMHTLALDADNNIWSWGTNDSGALGRDTSGAVEKLKDMDANDSDDDEDGDLNEIESTPTKIPRDSLPLDELRCVQIAATDNLSAALFENGDVYAWGTFRCNEGILGFYRDEITVQKTPWIIPNFSKKAKIVQMAAGKDHILFLDETGIVYAWGNGQQQQLGRRILERSRLRTLDPRPFGLDNIKYISSGENHSFALSTDGKLYSWGLNQFGQCGISTELEDGSLVSVPTEVILPEGVEIDSVSAGEHHTLILAKSGDLYSCGRLDMFEVGISKDKLPEYTYKDVHGKARSIPLPTKLEDVPSFKAIAAGSHHSLAIAKNGIVYSWGFGETYAVGLGPSGDDIETPTRIKNTATQDHSIVFIGCGGQFSISGGVKLSDEEAEKRADEMDD

SEQ ID NO: 28272 - protein, 682 aa, Kluyveromyces lactis NRRL Y-1140
MSSVAASQNKINDLLEAIRQEFANVSQEANSYRLQNQKDYDFKINQQLAEMQQVRNTVYELELTHRKMKDAYEEEISRLKLELEQKDRQLASIAHGSTVGNVPGQVPQLSRNSGAQGNANIAPPNIPQPMVSQTVGTGMAPQMAPLNTQHPTQQTKSNAGEQAAANLAPVIQQQQQPQQQLPPQQQQQQQQQQQSNIPVTTAAPVQPAGGNLDQTVPNSISPQQQPTEQQQPASTATTAPATASTAPPTSAPSDQVGQDHYLVPADQRAVHAKPIPPFLLDLDSQLVPSHLKKQNNDYYVLHNPALPTDLDVELHKSLEHSSVVCCVRFSSDGEFLATGCNKTTQVYKVSTGELVARLSDDSASQPQPQPQNQTVTAETSTSNSNGSSAEDGTGNQNSAASTASSDLYIRSVCFSPDGKFLATGAEDKLIRIWDLETKKIVMTLKGHEQDIYSLDYFPSGNKLVSGSGDRTVRIWDLTTGTCSLTLSIEDGVTTVAVSPGEGKFIAAGSLDRTVRVWDSDTGFLVERLDSENELGTGHRDSVYSVVFTRDGKGVVSGSLDRSVKLWNLNGLSGQKSHAECEVTYTGHKDFVLSVATTQNDEYILSGSKDRGVLFWDTKSGNPLLMLQGHRNSVISVTVANGHPLGPEYGVFATGSGDCKARIWKYSKKNSQQNSTQIKEIKE

SEQ ID NO: 28273 - protein, 404 aa, Kluyveromyces lactis NRRL Y-1140
MASRLQQLEKHLTGRSSEKDIKSKNPDDVVVVAAYRSAIGKGFKGGFKDVNTDYLLTQFLKEFFEKVDIDKSVIEEIACGNVLNPGAGATEHRAAMLAAGLPYQTPLVAINRQCSSGLTAVNDVANKIISGQINVGLAIGVESMSKNYGPKALGSISNELKSNTAAAKCMIPMGFTNENVAKKFQISREDQDKFALESFYKAERAVSQGLFKDEIIPIELPDGSIIAQDEGPRKGVTFESLQKIKPAFVKETGVTTAGNASQISDGVAGVLLMRRSMAMKLGLEIVGKYVAFQAVGVPPEIMGVGPAYAIPRVLKDCGLNVNDVDVYEINEAFAGQAIFCVNHLKIDKKKLNPRGGAIALGHPLGCTGARQVATILRELDAGQIGVVSMCIGTGMGAAAVFVKE

SEQ ID NO: 28274 - protein, 843 aa, Kluyveromyces lactis NRRL Y-1140
MFTTRAEQNNIKATIAASYDKLYSQFSSDELSEIGNYKISKFIGEGSFGKVYLATHRLTHQKVVLKTGNKRDPNVVREVFYHRQFDFPYITKLYEVIVTESRVWMVLEYCSGHELYEHLLKEQRLSLEESKKLFSQIASAVYYAHELKCVHRDLKLENVLLDGNGHAKLTDFGFTREMATRSQLETICGTTVYMAPELIERKCYDGFKVDIWSLGIILYTMINGYMPFDEDDDIKTKLKIVNDELDFNQEWISDDAIDLIQGMLRKNPNERISLAQVLSHPFLQPWGVVAKEKTDKVLLKQRGGHVHFHSKHEKRLLKRLKQCGFDTGSIKNSVNKRKCDSLSGLWFLLLERYELSDAKVPKRSKSVMSVRKVFESSVNMVMDDILVTSPECVKINSLKKILSRKSVDQDVELPQTIEDVKVRTQPKDRKAAEPESIHPADTTNKKKGFLQRVSSLFKPKKHNNHVDDNQSIKFSSQGIHPLLGKKRHKNGSNDSEAPSISQSTKPPPEQEDLNVQFEDITNKANHSFKKLKSHSSSEISKNINEPQLNHLHIDGGTEDSLKISNNRGIRRSSIASQHSAISNDTFNSDYSTDAQSGFRSNNTQSSSRINANSETSAATRKNVRRTLSVLSSASSNSEMSSRTDSFYDITTASSPMNMDIRSNYNIRSDSQFPKINGNSPWLIKRGKSPIGRRSRISNRSLNRKFRQPTPNRADSVIQEESSFDENERASNLPEVSEYDSGEIAIHSDSETPSKGNTPLYAIGINHPESRPVLFNVGRSVSDGSSWSHPQSDFHEPLSAPVIRKSSRRHVEDDDYESNIAADDEDNSLEDEEQEHVRSIAESV

SEQ ID NO: 28275 - protein, 1267 aa, Kluyveromyces lactis NRRL Y-1140
MSCAVQAAVVAMKDNSSHGQVPYRANNEHLNRVVQSVTDATKRLSQISTASSNANVNNTKTSKRRNRDTVGPWKLGKTLGKGSSGRVRLAKNMETGKLSAIKIVPKKFVKSNQIKQLPYGIEREIIIMKLISHPNVMGLYEVWENKSELYLVLEYVEGGELFDYLVSKGKLPESEAIHYFKQIVQAVAYCHGFNICHRDLKPENLLLDKKKRSIKIADFGMAALETSDKLLETSCGSPHYASPEIVLGRKYHGSPSDVWSCGIILFALLTGHLPFNDDNVKKLLLKVQSGKYQMPQWLSVEAKDLISRILVVDPNRRITIDQILQHELLTKYDQKSRSKSNSDLNLLNRTPNIVSFSSERDIDETILSNLQILWHGAARKHLVTRLMKPGFTEEKMFYSLLWNYQEKQQKSMQKDLIPVPTLKTSSASSVSPLNISSDVNSVTNTAKKQQQSSNGTVLPASMAPTISAFGQQISSDSSESSTLQAPKIHQKSHFSISSLKNGSSKSPKKTKQGFIASSSSSKLFQPNFGAKSSSQSISKSSSKKSLTPTTPKKRTLQNSASKRSLYSLQSISKRSINLNELLHDELQHEYPPPPLPSISSSEHTSSKLESIVDDYDRSTSVHGATMDNFLGESGQHMKAQQNEKLTQPSKNILAQPKLNNQPQTENRQSVTSMKRKTADNTIATVPVSMTPLKDMTNTFQSKSMYVSSLDPKRNKPKPSLENLLRKVSVPQRIKSRSTIRKLRDSGDWTVSGEAQALFGGKGSSEGENQLQRQKTNPSKLTAPETVLTTSTPMTDIKPDLLRMPSSLINSSMTFKDLSQFIMNIDEDKVPVTQASNPVNTDHEKLSENQTLMIENDSNRFETSSNYDDYNVNTAPAVTTAGDIDIFEDAPDDANESVTTSESMIDQSQLNLKKKAASIDSIDTSHVLTPATDVRVSLYINQMDKLDNLPRETTEQIISKFKLSPIKDIKQKRFSNGDRDLTITGSMISMFKDLDGDESRAEYDDNGLGLLGSALDTRPVENETNEDTNGTTVKRNSTVLVSSINGDNLDLSTEEQKNDDGNHGQGQTRRVTLLFDDGSSESEQVFKPVAAERRQPTLNANSTTTNNVGSKRKSNYINKLPKIKEDEVKPITSMKSSSPVNWFSKLLQRIKTSKPKRTVYEYRTSSIPFDNIHILLMTQFGKNGVDCELKKMERKGDKEYVTYDCNFGGIKRNRPKSKFTVEMRCMNGTETVLSLETRSKRFVNDKDTMASFERFNKDVAGAISAQEE

SEQ ID NO: 28276 - protein, 899 aa, Kluyveromyces lactis NRRL Y-1140
MNDETQFTNKANEIIRLAQKLAQDHRHAQLQPIHLLAAFVEPNEDGSVGFLQNLVELAKYDYEPLKRAINRNLVRTPSQTPAPLEIQPSYAFGQVLKDTSEIRKQQKDSFVGQDHILTALFKDATTQSIFKECSIDIESVKQQMLELRGNQRIDSRDADTNEKWEYLKKYAIDMTEQARAGKLDPVIGREEEIRTAITVLARRIKSNPCLIGEPGIGKTAIVEGVAQRIIDDDVPQILQGCKLFSLDLAALTAGAKYKGDFEERLKGVLKEIEESKTLIILFIDEIHMLMGQGVDDSANAANILKPALSRGGLKVIGATTTNEYRSLVEKDGAFERRFQKIDVPEPTTRQTVAILRGLQPKYEIHHGVRILDSALVSAAQLAKRYLPYRRLPDSAIDLVDISCAGVAVARDSKPEELDNKERELHLLQVEIKALERDEETDPTTKERLQQARQKEASLIEELEPMRQRYQQEVDSHEQLRQAKKKLDELENKCMDAERRYDNATAADLKYFAIPDIKKRIEELEQKVAEEESREGSETMVKNVVNSEVIAETAARMTGIPVNKLTESENTKLIHMERELSQQVVGQMEAVKAVSNAVRLSRSGLSNPNQPASFLFLGLSGSGKTELAKKVASFLFNDEKAMVRIDCSELMEKHSVSKLLGTTAGYIGYQEGGFLTNQLQRRPYSVLLFDEVEKAHPDVLTVLLQMLDDGRITSGQGKTIDCSNCIVIMTSNLGAQFINAQTGSKVTEGSKELVMSAVKAHFRPEFLNRISSIVVFNKLSHKAIHKIVDIRIKDLEKQFADNDKNYKINVSPPARDFLTKNGYSEDMGARPLNRLIQTEILNPMAIHILKGEIKDKEIVNVEVGADGSHLEVLPNHPASSEIGDEDMDLDLDDDDDLDLD

SEQ ID NO: 28277 - protein, 528 aa, Kluyveromyces lactis NRRL Y-1140
MLSVRVNLKTRISSGMIRVNAPALKSTMPSVTSLTQLRFSTTVKPAPKLSLDDVNENVLKAKYAVRGRIPMRAEELRDQLKKDPSSLPFSKIISANIGNPQQLDQKPLTFYREVLSLLQHPELLEEADEALQTLYKTDSIKRAKRLLSEVGGSVGAYSQSQGVQGIRETVADFITKRDDGEISYPEDIYLTAGASAAVSYILSILCKGPNTGVLIPIPQYPLYTASLALNNSRPLPYYLREEQNWSTDPEEIEQVVLDAIQKGIKPTCLVVINPGNPTGAILSEQSIQKIFEVAAKYGIVVIADEVYQENVFKGSKFYSMKKVLRNLQKTYHGQYDNIQLASLHSTSKGVSGECGQRGGYMELVGFNHDIRQVFLKLASISLCPVVTGQALVDLMVSPPQPGDESYEQDQQEREDIHDALDERASKLFETFSRLEGIECRKPQGAMYLYPKLDLPYKVIQEAQHLEMEPDEFYCKALLENTGICTVPGSGFGQVPGTYHLRTTFLPPGTEWVETWEKFHKAFFDKYRD

SEQ ID NO: 28278 - protein, 891 aa, Kluyveromyces lactis NRRL Y-1140
MTSPQQTSVSGKEFDSLDGESSNQYSVGPDFDQLEQEYDDLKTSEIIAPHISNGHSISSSPRHHHLYEDRHLDSIIDTNTHGFKKHDNGNGKFADVNIEQIYNYDSLRVPNYEETVVDAKQLYDEKLRPYLTFSAIVEYLTSLFPLLKWVHHYNFNWLYNDLVAGITVGCVLVPQSMSYAQIATLPAQYGLYSSFVGAFIYSFFATSKDVCIGPVAVMSLETAKVIARVLEKVGEDNPEITAPIIATTLSLICGGVALGVGLLRLGFLVEFISLNAVAGFMTGSAINIMSGQVPGLMGYSKNVNTRDSTYKVIINTLKHLPDTKLDAVFGLIPLFILYSWKYFCGTLGPKLVDRYVARSDVKRAAAYKYILFYLQALRNAFVIIIFTLISWGITRHKAKEDLPISLLGTVPSGLKNVGVMKLPDGLVSNLASELPSAIIILVLEHIAISKAFGRVNGYKVVPDQELIAIGVTNLISTFFNAYPATGSFSRSALKAKCNVKTPLSGIFTGACVLLSLYCLTDAFYFIPKAALSAIIIHAVSDLVASYKTTWNFWLMNPLDFVCFIVTVIITIFSSIENGIYFAVCWSCALLLLKVVFPTGQFLGYVEICQVSNAEVDENIDRIVLSEDSQPKTIEDNVTKNNTAVKVGVVANESFGHSQLQYHTKWLPLNNHYQRELNPDVVVQAPPPGVIVYRPSESWTYVNCSRQYDTIFDRVKELTRPGKLLKHVSKHDKMWNDPGEWEPPFLVKKLFKLGNKHDLEGGEVIDERPVLKILAMDWSQVTQIDSTGVQNLVDLRKAINKYANRQVEFHFSGIISPWIKRSLINAGFGTVNEEFSDESIIVGHTSYSLVKNRPDLQDPEAALPEPIALHTALGVNLPFFHLEMPEFHKWHL

SEQ ID NO: 28279 - protein, 804 aa, Kluyveromyces lactis NRRL Y-1140
MSSVDELTNLFSKIGFEEAKVKEILKNAKVSSSLESLVNLASDDFPWNKNSRALIHTLAASLKGAEVPHLQYIVDGIGKNDLKTALQIDAALKYLKTKGEDATVVDLNKESGVGIEVTEDQVRNRVAKYVEDNKDTILKERYKLVPGLFAKIKALPELKWAEPRLFKPIIDEEILKVLGPKDERDIVKKEKKPKAEKKANGKASKDQTEEDGPKRSMFTEGFLGDLHKVGENEQAYPELMAEHLKATGGKVHTRFPPEPNGYLHIGHSKAIMVNFGFAKYHNGVCYLRFDDTNPEAEAPEYFESIKSMVSWLGFKPWKTTYSSDYFDELYQLAETLIKNGKAYVCHCSAEEIKRGRGIKEDGTPGGERKACVSRERPIEESLTEFRKMRDGFYKPGEAILRMKQDLNSPSPQMWDLIAYRVLDAPHPRTGDKWKIYPTYDFTHCLVDSLENITHSLCTTEFYLSRESYEWLCDQVHVFRPAQREYGRLNITGTVLSKRKIAKLVTGGYVSGWNDPRLFTLEAIRRRGVPPGAILSFINTLGVTTSTTNIQVVRFESAIRKYLEDTTPRLMFILDPVEVVVDNVDEDFVELCNIPYRPNTPEFGDRTVPFTKRFYIERSDFSEDVDNKEFFRLTPNQSVGLIKVPYTVSYQSLEKDANGKITKIHVKYENEEAKPKKPKTYIQWVPISEKHDSPVRIAETRVYNQLFKSENPSAHPDGYLSDINPDSIIVYKSSVAEYNINSIIKNSPWVVDSAKKSEFYVEEEKGRKEVCRFQAMRVGYFTLDSDSTDEKIVLNRIVSLKDGTK

SEQ ID NO: 28280 - protein, 244 aa, Liquidambar styraciflua
LATTEFPNQSSEGSSSQKKMGRGKIEIKRIENTTNRQVTFCKRRNGLLKKAYELSVLCDAEIALIVFSSRGRLYEYANNSVKSTIERYKKASDTSNPGSVSETNAQFYQQESSKLRRQIRDIQNLNRHIMGEALSSLTFRELKNLEGRLEKGISRIRSKKNELLFAEIEYMQKREIELQNANMYLRAKIAENERNQQQTELMPGSVYETMPSSQPYDRSFLVANLLEPPNHHYSRQDQTPLQLV

SEQ ID NO: 28281 - protein, 320 aa, Kluyveromyces lactis NRRL Y-1140
MATNSIKLLAPDVHRNLAELVAKRLGLKLTNCKLKRDPSGEVSFSIGESVRDQDIFIVTQIGSGDVNDRVLELLIMINASKTASARRITAIIPNFPYARQDRKDKSRAPITAKLMADMLTTAGCDHVITMDLHASQIQGFFDVPVDNLYAEPSVVRYIKENVNFKEAIIISPDAGGAKRAAGLADRLDLNFALIHKERARANEVSRMVLVGDVSDKICIIVDDMADTCGTLAKAAEVLLENKAKSVIAIVTHGILSGKAIENINHSKLDRVVCTNTVPFEEKMLRCPKLDAIDISSVLAEAIRRLHNGESISYLFKNYPL

SEQ ID NO: 28282 - protein, 684 aa, Kluyveromyces lactis NRRL Y-1140
MVDDSYYITPHETALAVVATSMKKARLRFDTLVINSLMGGILFSAGGMLFVAARSENPLIFEQHPGMTNFLGAFTFSIGLFYVIINGADLFNSNVLFFTVGFLRGAVSIYDLFVSWAISWLGNIAGTLFVCYVICHLSGTTTSELLVAGSISIAEGKASSSFIQTFIKGIAGNFYVCLAVYLQLMCKPIHVKLIVMTIPTFTFVALGFTHVVADMSMLMIGMLNGANVSVGTYIWKLLIPATLGNIIGGSFFSGVIPYYLHLRVVERDRKQLSLPEFEARDEQPELNMDSRVVRVDPKETAEAEDDSDIDSDDENYGLLSEKQSSDSTGRNASDDQVLPYVGTDGTSRDLHRSETNGTMASLRSHGSKIRSPPGVFPVRGMGKPLAKERSIVDSEYSNESHHSSKASPSVNSFDMISMRSDEDSTLENPIGFQGVSQQPSLQERRNSILRTLSRIPTVHSNPLHHMSSQDDQEYKKEVEEYEKEGHYNVRDHKLGTKLEKALTRIATRKSNEELSDMLPRTTQDIFPEQKPADEMNPINSRRSGTTMSGLLKTISKQFVPTKQPADVNEVHRRLSQAGITTKAANASDNIAGIENYDGIELPSHSPYYRRPSNISNDSTSNSLYTMGSVNRSKTPSFIVDMGHASNPIGGGGVSVAGKRKSYPLKTIPHFDNDNFEEQSVTDLH

SEQ ID NO: 28283 - protein, 522 aa, Kluyveromyces lactis NRRL Y-1140
MIETSNWVVQKFGGTSIGKFSKQIVNEIIKVYSQEYDNNVAVVCSARSSYTKAEGTTSRLLLACDLASNNNYEYKNVLDLVERDHVANAEESVKDITIQETLIEDTKREINIVRRYLDASQVLGEVSTRTLDLVMSLGEKLSCLYVTALCQDNGVNARYVDLSFIVPSDYECKEGTLDNSFYTFLVTAFREKLSPILKETENGTKIIPVITGFFGVVPMGLLNGVGRGYTDLCAALIAVALNADELQVWKEVDGIFTADPRKVPQARLLDTVTPDEAAELTYYGSEVIHPFTMEQVIRTHIPIRIKNVQNPKGNGTIIYPSDQAKKGESTPPHPPVALTSSIFESKKKGATAITTKSDIVVVNIHSNKKTLSHGFLAEMFSTLDKYKLVVDLISTSEVHVSMALPVPDSDSLKALRCAVEELKRLGTVDVIKKMAIVSLVGKQMKQFVGIAGTMFTTLAEQHINIEMISQGANEINISCVIDESNAVRALQSIHAKLLDSPQNENFESAVNERLEQIKQMSL

SEQ ID NO: 28284 - protein, 410 aa, Kluyveromyces lactis NRRL Y-1140
MKVAGFILGALIQFSLTEGHVEQNENANLTEMWGEDWPFSGIQTFAHLPHHKCLIDMEKKFDIGVIGVPFDTAVSFRGGARFGPQAIRKASQRQTSMRGFNFRADINPYQDWASVVDCGDVPVTPMDNCLALKMMTAAYENLLSHESQTSDNNLPPRFVTLGGDHSIILPALRALRKTYGRLAVIHFDSHLDTWAPSKYPSFWHSDTSEFTHGSMLWIAHNEGLLTENNNIHAGLRTRLSGSSFEDYDDDDKVGFHRIEADEIMDGGIKSIVEKIKSKIPSDVPVYISVDIDVLDPSAAPGTGTMEVGGWMTRELIRIIRELEDLNLVGADIVEVSPPFDPTEITSLAGAQIAYELITNMVKKGPIDPELIKHNLELSDKLTQGQQLLGFSSPTDELNDKIQKEQFVLQA

SEQ ID NO: 28285 - protein, 219 aa, Prunus armeniaca
MEKTECSEAENFGSVTTSLEPQATAKRKKAKSKNQRRFSDEQIRLLESIFEADSKLEPRRKVQVARELGLQPRQVAIWFQNRRARWKSKQIEQDFRTLRADYDNLASRFESLKEEKQSLLMQMQKLNELVGKPSQGLEGNIMVDGSRLQEELEPRGVIQSHKNNTSNDVGCHGDEIHELLSMAHVDASSLSPQDWHRFEPSILFDPSRFTSSHWLNFWT

SEQ ID NO: 28286 - protein, 399 aa, Streptomyces sp. CL190
MASATNSSVIVAGARTPMGRLLGSLKSFSGADLGGFAIKAALDRAGIGGDQVQYVIMGQVLQAGAGQIPARQAAVKAGIPMNVPALTINKVCLSGLDAIALADQLIRAGEFDIVVAGGQESMTNAPHLLPKSREGYKYGAIEMLDAMAYDGLTDPWENIPMGQSTEKHNTRLGIGREVQDEIAALSHQRAAAAQKNGLFEAEITPIEIPQRKGEPVVFSKDEGIRAETTAESLGKLRPAFTKDGTITAGTASQISDGAAAVVVMSKAKALELGLDWIAEIGAHGNVAGPDNSLQSQPSNAILHALKKEGLEVEDLDLIEINEAFAAVAHQSMKDLGVSTEKVNVNGGAIALGHPIGMSGARLVLHLALELKRRGGGVGAAALCGGGGQGDALIVRVPKA

SEQ ID NO: 28287 - protein, 322 aa, Mesoplasma florum L1
MYSVEQIKKILVDSDHKKTIVLPEGEEPKIQEVANTLVKENISKVIMLFQKSESIPSSLDSKIEVIAIDKLDKQPLIEKFMDLRKDKTNLEQATKLMGQANYIGAMLVKMEKADCMLCGITYTTADTIRPALQIIKTSPNVALAASVFIMNKGEENYFFTDCALNLKPTSQQLADISKMTAKFAQSFDVKNPEVALLSYSTAGSGAGEDVVRVKEAVELLDSQTVDFNYAGEIQFDAAWDKEIRDKKFKDCKLTKQTPDVFVFPDINAGNIGYKIAQRMGGYEAIGPFILGFNKPVNDLSRGATLTDIMNTAIITIYQALEA

SEQ ID NO: 28288 - protein, 396 aa, Mesoplasma florum L1
MILVVNAGSSSIKFRLFNDLDKSNPIDILDGLAERITVDGAVSFKYEGKKYEYNVELPNHEVAIKFILDKLIELNIISNVDDINAVGFRVVHGGTISKSSIIDQKVFDTIKDAVKLAPLHNPGAITAIEAIEKVMPKAKLVACFDTAYHQTLAEEQYLYAVPYSWYKEHGVRKYGFHGISYQYIAEKMSEVLAKPKDQLNLIVCHLGNGASITCIKNGKSFDTTMGLTPLAGVMMGTRSGDIDPSIIEYMCKELQLDVSKITNILNKESGLLGLSGKSSDMRDVTGGYFKGDEDYKRALNKYTQVSADYIIRFANLLGHNIDGIVFTAGVGENSIHTRQFILEKLPLLDIEIDNAKNEESYGDYKYISSPNSKIKVLAVRTNEELMICKDTINLTK

SEQ ID NO: 28289 - protein, 347 aa, Mesoplasma florum L1
MLSKKENVHIFGLTQGVELAQEICDILGVKRKEVKTLKFADGEILIESLDSVRGKEIFVIQSTSTPVNESIMELLIAIDAFKRGSAEKINVVIPYYGYARQDRKAKGRQPITSKLVADLLTKAGADRVMSIDIHSPQSMGFFDVPMDNFYTAQTLATEIIDTIELNNWDPSNCILVSPDYGGMTRVHKVESYTGGVTNGIAVIGKRRPEPNKAEVEFVLGDIKDKHCFIIDDMIDTGGTIINAAKALKEQGAKDVHIFACHGLFNGPAKERMEAAIKEKIVEEVVVTNTIQIADEKKFNGLKIISVAPLLAEMIDSSISHESLTEVYNNKKQIIWDRAQCIVNKFKK

SEQ ID NO: 28290 - protein, 301 aa, Mesoplasma florum L1
MNKIKSGFISIVGRPNVGKSTLLNKIIGHKISIVTNKAQTTRNNIRGILTEKEYQLIFVDTPGIHTSKNQIDRFMNSSAMRSMKEVDVVVFMAPADETIGKNDLFILNELSKKNDIKKILVISKADVVSKEKLFLKATEWNTYEQIFDEIIITSSTENINIDKLIETIVGFLPETGHYFYDEESITDQPNRFAIREIIRESVLLKAGQEVPHSVAILVDELEETEDEINIVASIIVERKSQKGIIIGHQGKKISDIKYKSRKQIRELFEKDVNLELFVKVQENWRNSASLIKKMGYDKDKY

SEQ ID NO: 28291 - protein, 365 aa, Mesoplasma florum L1
MSKCIGCGILKQNKDQNKPGYVIKPENEYCLRCFKIKNYNELINQEINAEQFILKLKTLIQNDKPKDIEFFYIIDIFDLEGSRVKEIEEAIKRYPVTIVVNKIDLLPKAVKLAKIRRYITDLFAKSAIYDANIILNTSFKNNFTNSLLNKIKKTKTKKYFIGSSNVGKSSIINSLLRTNNLIPQIVESKYFNTTLDFIQIKLSSDDIIFDTPGIARSNSAANLLDKEDWKYIYFNKEVAQNTFQLKPFNSIFYAGIAWVDFEWESDEINSFHFFNNKEIKLHRTNTKNAFDYYTRNKENIVPYNLDNNFVKREFIFNEKDINKEFEISISGLGWFNFKVKNPMKVTINIPTSNVEVETTLRKPLV

SEQ ID NO: 28292 - protein, 711 aa, Mesoplasma florum L1
MEFQQKGEEINALEKYTRDLTQSAKDGKIDPIIGREEEILRVIRILSRKTKNNPVLIGEPGVGKTAVVEGLAQRIVKGDVPSILKGKRILELDMGSLMAGAMYLGDYESRVKAIVNEIKKSEGEIILFIDELHLIVGAGKTGNGGGMDVSNLLKPALARGELKAIGATTLKEYREYIEKDSALERRFQRVMVEEPTVDQTISILRGLKERFETYHGVRIHDNAIVSAANLSNRYIADRFLPDKAIDLIDEASSTIKTELASVPTELDQVNRKVMQLEIEKSALSKEKDDKSKERLAEAVKELEKTKIEQDKLASEWNKQKSQLEKINSFKTTIENLKNELEISQNEGNYKRAGEIQYSLLPSLEKQLSEAEKDTRETLVSEEVTEKDVAEIVAKWTGIPVDRLVESEKTKLLELEKTLEERVKGQNQAIEAVSQAILRSRSGIKDPNKPIGSFLFLGPTGVGKTEVARSLADILFNSNKKMVRIDMSEYMEKHSVSKLIGSPPGYVGYEEGGRLTEAVRRNPYSIVLFDEIEKAHPDVFNILLQVLDEGRITDSLGKTVDFKNTIIILTSNLGSEYILKNGSTSEESKIAIQAELLKHFRPEFLNRIDNVVVFNPLSKENVSEIVTKELNTLSARLENDKNFFLTFDMKAKNKIIDEGYDSQFGARPIKRYIEKNIETLLAQKIISGEIEENIRYTITVENDDFELTKIRN

SEQ ID NO: 28293 - protein, 432 aa, Mesoplasma florum L1
MKFIDTAKFTIKAGNGGNGAVSFHTALFVPNGGPNGGDGGNGGSVIFEADGGKHSLLDLKLQKQLSAQDGFKGDIKNMHGAQGKDLIVRVPVGTLIIENKTGTILADMDEDKKQVLVAKGGKGGKGNARFANSRNKAPTIFEAGEIGQFYEVKAELKVLADVGFVGLPNAGKSTLLRAISNSKPEVADYAFTTLNPQLGVSRAKDGSTFVVADLPGLIEGASLGKGLGHQFLKHIERCRVICHVLDMSGNYGQEDVIKNYELIRSELVKYNYKLDERPEIIVANKMDTDEAQLNMMEEDIKKYFKDKKVVFVSGLLKDNVDELLLKIAKELETAKYVPLWEMEQDIYEGIKVYRLEEDEEDIQIINKGNGRWEVAGDTIYKIYQKFPITTDDNLLLFNEKLKKSGVYDMLRERGVGAGDIVKVFEYELEWMD

SEQ ID NO: 28294 - protein, 514 aa, Debaryomyces hansenii CBS767
MDESDEEYIAPQHTAADTPSGVPSNEASQKESLVPADGVSKRTRSSGMTHQPRSGAVGDLKSSNGGYAWEDEYQRPWDIVKDDEDGRSLETIIQTMIENRKKKIMRNPTTPFQRGIIRTLVVIIDGSLVMLEKDLRPTRFSMMLSLLQEFVVEYFDQNPISQLGIIMMRNGVSNLISEVNGLPQYHLDKIRQLKSRQHNKYEPKGDPSLQNALEMARSLLMYNFGTNLNDTKNSKEILIIFGALFTSDPGDIHKTINSLVKDEIKVKVIGLSAQVAICQELVNKTNNPGKSNTFWSAGGNNYGVIMNEIHFRELLMDCVIPLPVTTNAVIDENNSKEVPIIKMGFPLKIQPVITSSTSNLSVDFPQLCACHPTQDSLESKNNDPTATLGTRSVIGYECPQCNNKVCHLPTICPICGLMLILSTHLARSYHHLVPLGDYKEVPVSESYSSTYCYGCLLKFPSGIKNTDVNEDGKTKMDSLTSSRYRCGKCQNDFCIDCDVFVHESLHNCPGCENK

SEQ ID NO: 28295 - protein, 557 aa, Debaryomyces hansenii CBS767
MRSDIPETLQNFVSTKTVHQTWAKTFFCKPQAIFQPRTVDEIRELVDQARINGKTIMTVGSGHSPSDMTMTKEWLCNLDRFNQVLKKEEFSGPTRNGEGEEVKFVDLTVQAGCRIYELNRYLKENELAIQNLGSISDQSMAGVISTGTHGSTQYHGLVSQQVVSIEIMNSAGKLITCSSMENTQLFKAAMLSLGKIGIITHVTLRTIPKYTIKSKQEIIKFDTLLKNWDTVWLDSEFIRVWWFPYSGNCVCWRASKSSEPLSKPRDSWYGTWFGRKFYESLLWISVHICPHLTPLIEKFVFKNQYGDVETLGHGDVAVQNSVEGLNMDCLFSQFVNEWSTPLSLGQDVLIKLNDVIQTAREQNRFYVHAPIEVRCSNLTYSEKPFVDENDEPSLYPNKKWLAKRDRLSPGPIPGNNLRPYLDNSSNLRYDGDGANVTNDQLTLFINATMYRPFHTNVNSQEWYQLFEDIMTNASGRPHWAKNFIGVNGAHRTDQDLRKQLEFGGKTSYSMKGFNPILKKWFGENLVEYNKVRESMDPDNVFLSGKDWAVRNGILIDV

SEQ ID NO: 28296 - protein, 498 aa, Debaryomyces hansenii CBS767
MVALERKRKISGSEQPNGTKKFKSATSSFVLHSYSKLPDLNSIPLAKTQPLDVFVWGTGSMCELGLGPSAKTKEVKRPRLNPFLTSEHLGDSKIVDFAAGGMHTLALDSDNRVWSWGGNDSGVLGRDTSKVKEVLKDMDADDSEDDDDGDLNEAESTPGLVENLPKLKGAKIVQLAATDNLSAVLYDNGDVYAWGCFRCNEGLLGFLRDEIKLQKTPLKIKQLKNVVQLARGKDHLLALDSKGIVYAWGNGQQFQLGRRVLERHRYNGLEPKQFGLYNIKYIASGDFHCFAIDHDDQVYAWGLNQFGQCALTDSDGKLEDGSLITSPTIIPELSKKGITHLCAGEHHSMALTGDGLVLSWGRYDMKEVGIPKDKLPESTFKDAHGNARSVPTPTKLQFGLKSDNGVKCKTIACGSHHSFAVTDDGFVYAWGFGDTYAPGLGPLEEDVEKPTRIVNTATKYHDIQQINAGGQFSISGGVKIDDEDKAEDRIEKYEEIDG

SEQ ID NO: 28297 - protein, 591 aa, Debaryomyces hansenii CBS767
MVFILAVRPRLLYIANRQIQSNKRLISSSTQKLLQSSNTLSNASKVNRQVTEKTNKFFKKRHVALVSGIIIIGSYISFNQSNYYNLDTVPPIGGGGRSGISPKLFPPSNTTVIGDDSRYFSTSTNSMHQKNSIGNQQQKQGVFLLNDEQVSERLRQFEESYSVNRGKGVTRYDICQLPSNSPIEDDRAEEIVQVPILQDNNIKTSTDWMFFGVFDGHGGWTTSSKLRDQLISYIVHELGTIFKPTNEDNLRYVPNGATIDQAIKNGFLKLDHEVVNKNMEKLLNDNNKAKAAELLMPALSGSCALLSFYDTNSKLLKVAVTGDSRALLGSFKDNHWTVRQLSIDQTGSNPTEVARIISEHPDEPNVVRNGRVLGTLEPTRAFGDCRYKLPASIQERIYKQFFGRRLPNNLKSPPYVTAEPVITTTKINPENNDFLVMASDGLYEMLSNEEIIGLVVKWMEKERMVKPQKSFWNYFGSTENKLPEISDITNDKSSKQPFRKNKQSSGYGGFLLDDRNVSTHLIRNALSNGGSREQTSMLISIPNPVSRRYRDDLTVTVVFFGKDLRGENEAGKLEINADATAGGIDSAKPKL

SEQ ID NO: 28298 - protein, 387 aa, Debaryomyces hansenii CBS767
MKLLSQSFEKDKSGSTTLVPQDKEDLWQLYNLIQKGDEIKLPTHRNVKKVTSGGGSGGKDKGKADRKLLTLKMSVEDIEYTPSDEVMRIRGRTVEPNEYVPIQSYHTAEVQFDKKFTLIKPDWDEISYGIIVSACSIEEKAEVGAVIMEEGVAHLCLVTDNMTVLRNKIEKSIPRKRRGEGGGGNHDKAMEKFLNMVLSTMLRNFDLTKLKAIILASPGFTANALYQNTINQAIQEENKLVIQNKSKFMVVHSSTGYLQGLEEILKDPSIQKQLSNTKFAREGAIFEEFQRVLNNDDDRAWYGPLEATKAVELGAIKYFMITDTLFRSDDIAVRKHYIKLTEEVKRQGGEVLIFSSLHESGEQLDQLTGVAVLLNYPVADLDEDEEE

SEQ ID NO: 28299 - protein, 607 aa, Debaryomyces hansenii CBS767
MSVYTPNSAAVAAQQQQQQHQQRQQHQQRLSELLEAVKQEFDFALNEASNFKQVKEDYDLKYNQQTAEMQQIRQTVYELEMAHRKIKEAYEEEILRLKTELENRDRQAQQHQNKLNGIENRQPPFGNYPPPQQQQPPQQAPVPQVSQSQTLPPPIKPSPAKQEAKLESPKTAKVEPTKDETASTQPPAEPSTPETSTALTIIDKSQYIVNPLQKASHVKEIPSFLADLDVSKANPDFKKQKPDYYVLYNPAFNRDLDVDLIHSLDHSSVVCCVRFSKNGEFIATGCNKTTQVFNVKTGELIAKLIDDNSSNGINDDSNNENQSGESNVQSSSANANGDLYIRSVCFSPDGKLLATGAEDKLIRIWDLETKRIIKILRGHEQDIYSLDFFPDGNRLVSGSGDRTVRIWDLRSSQCSLTLSIEDGVTTVAVSPDGQLITAGSLDRTVRVWDSTTGFLVERLDSGNESGNGHEDSVYSVAFSTNGKQIASGSLDRTVKLWNLEGKQDPQSNVSNNASTGKKSSCDVTYIGHKDFVLSVCSTPKNEYILSGSKDRGVIFWDQLSGNPLLMLQGHRNSVISVAVSLNSQGTEGIFATGSGDCKARLWKWTRK

SEQ ID NO: 28300 - protein, 416 aa, Debaryomyces hansenii CBS767
MSKGKVCLAYSGGLDTSVILAWLLEEGYEVIAYLANIGQEEDFEEAERKALAIGATKFVVVDVRKEFVEQVCFPAIQTNAIYENVYLLGTSLARPVIAQAHIKVAEENGCFAVSHGCTGKGNDQVRFELAFYALKPDVTVIAPWRDPDFFNRFAGRKDLLEYAGSKNIPVAQTKAKPWSTDENLAHISFEAGILEDPDTTPPKDMWKLTVDPLDAPDTPEDFSVYFEKGIPKKLILDGGKKVITEPVELFTEANALARRNGVGRIDIVENRFIGIKSRGCYETPGLTILRSAHIDLEGLTLDREVRAIRDQFVTTTYSKLLYNGMYFTPECEYVRTMIDPSQKTVNGVVRARAYKGSLSILGRSSDTEKLYDETESSMDELTGFSPEDTSGFIAVQSIRIKKYGEAVREKGNTLSL

SEQ ID NO: 28301 - protein, 790 aa, Debaryomyces hansenii CBS767
MLPDENTRLLERSSSLQIPTSRGGSPGPSSSSRLKRPPLISIPTSQSVRSLRSINNVNDPLVNSYISNRSKNGYSRGNSATDELDESIFKSRFWNKFNRIEADDSFDFYSYVSYYCPILKWLPNYDAKNNFLGDCVAGLSLASFQIPLVMSFSLSLAHLSPVSGLYGIIIGACVYSILGCVPVLIVGPLPSTALIYGEAIEAIRQLPNFAELSKLQISSAISAAMSGLLLGAGIFRMGFLDNVLSRALLKGFIAAIGFIMIINELSTELGIGDLILDNPYLTTFDKLMFVCKYARQSHIFTLLVSCITLGLVLSIRKLKNTLVNKYHMRHAVLIPELFLMVLVATYLSWRFQWHSEYGVEIIGNIQSSTPDSKSMVEFINPFKPSLIPLYKKAFSASFLCTILGYFDSTTATKALGAKYNYNVSSNRELIALGATNFVVSLVGGIPAFGTFGRSKINILSGANTQMASIMMSIATVLVIIYLLPLLYNLPKCVLALSTTIIGITVLEEAPSDLKFFWNIGGYDEILTFLFIFCTTILWNAEAGVLSGAAFAIIRIIKHSTRSRIQILGRVPNTTVFRNADELIEESFVTYANGSDPVNQEETSSDIEDSTDKLMNLIAEIEEIEGVLVIKIPEPLNFANVGDLKNRLNRIEKYGSLLIHPSQPTRRDFNNTTIKFIIFDCKGMNAIDSSATQILYEIIRKYIEVNEISVCFSRVAMSKDIRHKFKKLGIIDLVNNSYKTYENSNNVRSKSAGSENGSSTNLYSYGTSSGMEDGFFLSIDEAIKAFGSQNV

SEQ ID NO: 28302 - protein, 567 aa, Debaryomyces hansenii CBS767
MSEVSLGRYIFERLRQLLVQTVFGLPGDFNLSLLDKIYEVDGLRWAGNANELNAAYAADGYSRVKGLACLITTFGVGELSALNGIGGAFAEHVGLVHIVGVPSISSQAKQLLLHHTLGNGDFTVFHRMSNNISQTTAFISDIKSAPKEIDRCIREAYIFQRPVYIGLPANLVDINVPAVLLNIPIDLSLRENDPEAQEEVIDNILQLISEASNPVILVDACTSRHNCNGEVEALVNKTQFPVLTTPMGKSSFNESHPRFAGVYVGTMSHVEVKNLVDGADLILAVGALLSDFNTGSFSYSYKTKNVIEFHADCIKIKQGTYPGVQMKEVLNVLIDKIDPAVKHYNPIAIPSPTFLTNSVTNSDVLSALLTQEWLWSKVSAWFREGDIIITETGTSAFGIVQTKFPNNTIGISQVLWGSVGFTVGATLGAVMAAEEIDPNKRVILFVGDGSLQLTVQEISTMVKWETRPYLFVLNNDGYTIDRLIHGMSATYNDIQPWNNLALLPLFNAKYYDAIQVSTTDELEKLFCDEEFAINSKIRMIEVMLPRMDAPINLIKQMEFISKMNADT

SEQ ID NO: 28303 - protein, 835 aa, Debaryomyces hansenii CBS767
MPLNDITPSSNIPKLSNGKKRFMDAQDDDNTFLPPALSSYSIALLNERTKQLPSHITGIYEFDFPNSRSKNNLKNKLSVHFRESDPVHTIEKPDTPHSSHNNSSAPMEPTSNSNNNKSYNTSHNASHNAITSTNPHIQNQNNISAHNSFNLSTNNFSSHTHNTTSEYNDDLMDISPHESTSRNSSNHTPSTTFNENPPPSSSSQTKSSISQVHTLKRMRGTRRFGRMLGPPKRAMKLNEDKSTQAEYDGISSNENNDFQIPHNRAVSINNDDNNDNNNDDNINTNNNNNALSTPPPLFTMDFSPKINRIDNLKEKNPESVFFKTLKKMKSESPEDDIISKQKESELRRRIDEQKRINEIESQLSKSKSIQDIEMEISELNNSRNEANDRLDKKGFVSSYLADTNEEGNKENLILSTSKDSNISVKNEQPRLPLNNVSPNRLNRVAADETDFRKPKLPKPISQHATSNVTPPSSSDDYKRKKCISINGNQYEKLELLGRGGSSKVYKVKSLSNNKLFAIKKVTFDQFDELCVQGFKGEIDLLLKLKDADRVVKLVDHAIGEGSIYLVMECGDIDLAHVFQNKLSMNNVLDINFVKYHSIEILKCVQAVHRAGIVHSDLKPANFLFIRGILKIIDFGIANAVPDHTANIYRESQIGTPNYMAPEALVEVSQAFPGLPTPDNNNNQQQLNGLQRNTWKVGKPSDVWSCGCIIYQMIYGRPPYGGYSGNQRVMAIMNPQVKIQYPGKGIGNIKVPQSAIALMQKCLTRNPNERWTVEECLNSDFLNPKIVSETFVRDLVHLAVNFGHNNRVNGNGLITADVYDRLVDTVLKQIEDLNFG

SEQ ID NO: 28304 - protein, 799 aa, Debaryomyces hansenii CBS767
MLLPIQRVKPSFLFLYSSNVGIFRTLHTRIPTRLSTLNTSVIYRRTYPNISNACNVFLGKTNIIYGRLRYFSDSLVVRNTSDTPSKQELIKSLQKSNSLKNHLEFTKIRKRELREEEKEQQKKDRKPFRENIKTILRILKLGRPDLKLFLYALGFILFAVLYPTTAVKLVGSAIDAFNNNMKDSDGTLLIWGYKYSTVFGFMVPFMCLSAVCFWARIWVLKVLGERLVARLRLRVMKHLLRHDAKFYDHEKHKVGDLISRLSSDAYVVSRSITNNLPDGLKNVLFGIISSYMMFSINPMLFGIMLLISPPITFGSVWYGEKIRALSTRLQNATAGLTKVSEETLNSVKLVQAFTGEQKELTKYSDQLRNVINVAKKEALAQSNYLVSIYSLYHTGYLSCVAIGVYLIINGQMTTGDVVAFTMYLELFNLALYSLTTTYMELMKGSGAGIKLFELIDYDNDVPPVKGNKLPPGLSNGIEFKDVVFSYASRPYDKIFNECSFNIPASSTTCIVAPSGCGKSTVASLLLRSYNINSGEILIGGRNINNFQVRDLRRSIIGIVQQEPVLLSGTILENIVYGLTPSQISQMTMEDVKFAARQANCHDFIMSLPDGYETIIGSRGASLSGGQKQRVAIARALIKKPSILILDEATSALDSRLESLINETLKELTSQGKMTIISIAHRLSTISKSENIIVLGKHGKVVEQGRFVELYSDPNSELSKLLDSPGLDESEETPEQTEAEETERITEENKANELEIIRSMIDDLPVEMRAQLADQISQEINEDKNAAISESKISSDKIVS

SEQ ID NO: 28305 - protein, 419 aa, Debaryomyces hansenii CBS767
MRKCKVFVGSSHPELGKLVCDRLGVEPAPCTLKKFSNGETSVQIGVSIRDEDVYIIQSGSPQINDHIMELLILISACRGGSASKITAVIPQFPYSKQSKMKKHRGAITARMLANLLIMAGADHVVSMDLHASQMQGFFTKPVDNLFGAPTLARWIRHNISDWANAVVVSKNPGGTKRVTALADSLKINFAMIHTDRRRTKDGYVSKNKKALKTSKPVRVQGIDEDEEEDNIVSEMQTARIVQGHVVDDDYPVPQTPITNGIAHDNLETASIIDSDALGGSYDATNSDDDDEPTSMNLEKLITLVGDVNNKVAIILDDMIDKPNSFIAAAEHLRLNCGAKAVYVVGTHGVFSDKCLETLNDSDCIDKIVVTNTYPIGNERIQKNEKLSVIDVSPIFAECIRRDHFGESISVLFDSLAAIE

SEQ ID NO: 28306 - protein, 489 aa, Debaryomyces hansenii CBS767
MFKRFVSFKAAGKLKLADLNKLTINAKYAVRGKIPIRADELKEQLNDTNNELPFKEIIYANIGNPQQLDQAPLTWYRQVLSVLQNPKLLNSQIDYPKDVIDRAKILLENVGSVGAYSHSQGTPHVRKSVADFITRRDGFPSNSSDIFLTSGASAAVSYLLQVLSSSDRSGFLIPIPQYPLYTATIALNDAVPIGYYLNEENNWSTNPTQIRELIKENNEKGIQIKALVVINPGNPTGSILSYDNIVEIINIAAEHGIAIIADEVYQENVFEGEFVSVKKVLSKLNRLDPQAYNNVQLASLHSTSKGVSGECGQRGGYMELVGFSKEVRDIIFKLASINLCSVVSGQTLMELMINPPTPESPSYELYKSETSKIHKSLQSRADLLYKSFIEMEGITCNKPMGAMYLFPKLNFTPNSYSKLFEASENIGATIDEVYCIELLENTGICCIPGSGFGQVPDTYHLRTTFLPPGSKWIDRWVEFHNDFIAKYKN

SEQ ID NO: 28307 - protein, 573 aa, Debaryomyces hansenii CBS767
MCGIFAAFRQPEVEQFKSKALQYSKRIRHRGPDWSGNVIQNSTILCHERLAIVGLDSGAQPITSEDGNYTLAVNGEIYNHIQLRDEFPSYPYKSLSDCEPIIPLFEKYDVDAPKYLDGMFAWVLYDKKNDRIVASRDPIGITTLYMGKSSKNPKTRYFASELKCLTDECDEIFAFPPGHVYDSNTDEITRYFNPSWWEESSIPSKRVDLKEVRETLELAVRKRLMAEVPYGVLLSGGLDSSLIAAIAARETQKAAAGISKDGIDANKELSGVDEKGSLHSSGWNQLHSFAIGLPGAPDLIAAEKVAHFIGTIHHSHTFTLDEGLDALDDVIYNLETYDVTTIRASTPMYLLSRKIKAQGVKMVLSGEGSDEIFGGYLYFANAPSPKDFHEECVKRVKNLHYADCLRANKSTMAWGLEARVPFLDKQFLEVCMNINPEDKLIKPAEGKIEKYILRKAFDTSDDPNAKPYLPEEILWRQKEQFSDGVGYSWIDGLKDAAEAAISDEQFANPKAEWGTDVPTTKEAYWYRCKFDEIFHSKAAASTVMRWVPKAEWGCHADPSGRFATIHEQKVDQD

SEQ ID NO: 28308 - protein, 448 aa, Debaryomyces hansenii CBS767
MDSVYGELVASKESKNYKHELLETGELTRDAKFDKITEKSSIDLSQFDPNDIGSFQQVLDMYHLSQKSNMHQQHNDVYYEKSHESYQKYRPMVKFPNDDDTSDIYDDARNLFGGITTYGHFRHFNCFDPKLFDEKIDIAVVGAPFDTGVSFRPGARFGPDSIRLASKRLGGVSPDRGRGNPNTNMTEINPYDPRSHNLSIIDCGDVPMTPFDNRIALNQLYRGQRSIHKHTSGNKPKIITMGGDHTVTLMALKSAYEHYGALSVLHFDSHIDTWDPKKLGGGITNYMSLNHGTFLHYAAEQGYLNKGSCFHLGMRAPYIDYHYDLHHDKDHCGFNTITARDLDNLGRAHIVESIKQAVGSNPVYISVDIDVLDPASAPGTGTVEVGGWTARELLSILDGLEGINVVGGDVVEVSPPYDTNSGITALAATGVIDSIMGLIMVKTLSAHP

SEQ ID NO: 28309 - protein, 834 aa, Debaryomyces hansenii CBS767
MVNLSSSKFHITEPADEDIQLTLVNGNQKGHEDSCNRSSTPKFGSISRFFFNKEQSVSSDVSNADSTVSSNTDSLNHNHGSKSGVTNSEAREDEHDDAKQQPGLSKLKSFLRLSSNSLLLSNNGPNDNGEQNGPKGTDVITPNAESVTPVRSNEEKTKLKHESDRNEEGHNGNKDGSNVSTKQEASAGMMKKFMLGRKRSVSSPTSPATGNRKPQQSNLLINTESPKDIPEIITENTESPVISSNLYFAHQGLPPHMNNHNKNNHTLAASAANEDDISVALRHNDSVFSLNDGGPLKPPNVYQSKLSASDESGSEHEPIPEHTTESGLKTPEESTLQNKNKLEVPPHTLPHPGQASPFQKTLRRVASAPLVHRLLNDSNTRLPQTRAYVSNDDDFDITEHIGELKSGRPRTLSRGRMYSSASTKIMDAQVNQNSFKKIRLLGKGDVGKVYLVKENLSNRLYAMKILSKKEMIERNKIKRALAEQDILATSNHPFIVTLYHSFQSNDYLYLCMEYCMGGEFFRALQTRETKTISETDAKFYAAEVTAALEYLHLMGFIYRDLKPENILLHQSGHIMLSDFDLSKQSESTKNPEIFFSKTSHGLSSSNNHNGPTLDTKACIDGFRTNSFVGTEEYIAPEVIRGKGHTSAVDWWTLGIFIYEMLFGTTPFKGRDRKKTFGNVLKKEVKFLETRSISSSCKSLIKKLLIKDEAKRLGSKTGASDIKNHAFFKNTQWALLRHQKPPMIPVLSKNKRADKVERYDSEEDQITDSTTDVSENKDILNDPFANFSSVTLHYNELDSGDDQMVYNEADNTVYTSVAYTMTNDSSPKPKHFLKR

SEQ ID NO: 28310 - protein, 412 aa, Debaryomyces hansenii CBS767
MDRLNQVLGHLSPSATNHITSKNPDDVVIVASYRTAIGKGFKGSFKDVGSDYILLKFLEAFLAKTQVNPNLIEDIACANVLKVRSGICEHRAAAISAGIPYTTPIIAINRQCGSGLVAIGDIANKIISGEIDCGLAVGVESMTKDFGLGQSVVSKALEDHPEMIKSKIPMGITNENIAIKYNISRKQQDEFAAKSFQKAEKALASGVFADEILPVESLIEEKDGQGNVSFKKIIVDKDEGVRKGVTAESLGKLRPSFKKDGLTHAGNSSQVSDGAAGVLLMRRSFAEENGFKIEGKFVRCVSVGVPPEIMGVGPAMAIPHILKKTNLVVDDIAAFEINEAFATQCLYSIKACNIPEEKVNINGGAIALGHPVGVTGARQYATILRLLKPGDIGLTSMCIGSGMGSASIVVKE

SEQ ID NO: 28311 - protein, 850 aa, Debaryomyces hansenii CBS767
MSETKLEDKSDFIRVDLKDESTALHEDYKHKLYEKLGHSDVLTDDTSIPEIEYLFQKTDELPLPKALDILKQCLQDHDDDPNFPYDDFEFIQKIVNGYNNDLRMSYDDWVFNVKMYAALNEYHSPYPEVRAISSPLDDPNIPCETIRAYILGFFWCVVGTGVNELFSRRQPSIYLSASVCQMLMYPSGLALEYVLPDWGFTLFGTRHSLNPGPWTYKEQMFATVMFDIAIGGMYVGYNFYVEKLNIFYGNTWITAGYQILLSLCTQLFGFGFAGILRKIVIYPVRAVWPTILPTLALNRALLKKEKKESIHGWTITRYKFFFIVFTCSFLYMWVPDYLFQALSYFNWMTWIKPDNFNLATVTGSIQGLGLNPISSFDWNIIGYWLPLAFPFYTYLNMMIGMFIGFFVIIGLYYSNYKWTAYLPINDNNIYTNTGTIYEVQSVLTNGRLDEDKYKKYGPPYLSAANLVVYGANCALYTFMVPYVFFTERKGIWNSIKSLKELITDFRSSNYSRFKDPHSRMMSNYKEVPDWCFLVIMLIALVFAIVCVKVYPANTPVWGIFLVLGINAVFVIPLCIIYAVTGYYFTLEVLVELIIGYALPGNGDALMFLKALGFNITGQAQQYVYDQKMAHYAKVPPRAVFRGQLLGTIFQIIVSLLVINWEISNIDGICTDEQSNNFTCPSEVSYYSSSVFWGVIGPKRVFNKLYPVLPYCFLIGFLLALVCLAVRHYFYKQTRWFQPAVIIGGLFNYAPYNLSYFLPGLYMCFAFNHYIKKRFGAWWEKYNYILSSSLDAGVAFGGIIIFFAVQYHEKDINWWGNSVSYAGTDGGMGQVSLLDPTTAPDGYFGLRSEEF

SEQ ID NO: 28312 - protein, 436 aa, Debaryomyces hansenii CBS767
MLFIWCNILTNVVAASILPQASFQIDGLLAGDPSIMESVPNIITEQVVLHYESKNYNFLDEYFGQVYFGDYSDLEKTIRKQKTSLWASREVTYPDKDDITDIVSGRSDRYVSNPLSGFLSFAHLPLTNCFSGETKFDIGIVGATFDTGVSFRPGSRFGPLGIRMATKRMSSGSISPFRKNFSLFKDGKIVDCGDPPMTPIDNRIALDQLYRAERAILKTKPTTPSLSKVSRILTLGGDHTVTLSCLRAVYEKWGKVAVIHFDSHLDTIDPYQMNENVTEYAALNHGTFFHWAAKRGLISESKNVHVGLRGYYENLNDTQRDSAIGFERIMSRDIDDIGIAGIVKRIKDRVGDSKVYITVDIDSLDPSSAPGTGTVEPGGFSSRELLTILDKLEGLEVIGADVVEVAPPYDTNEITTMVASEVARSLLGLMVITPVQ

SEQ ID NO: 28313 - protein, 547 aa, Debaryomyces hansenii CBS767
MGLTDFYKKLSSAEETNDNSETVSYNSSNDKEAAVVQLDQNKKEIGYLSATSLCLNRMLGAGVFSTGSTIFSLSGSVGTSLIMWAAGSIIAFTGLYVYMEFGSAIPRNGGEKNYLEYMYKKPRFLITAMYASYAFFLGWASGNSIVVGEYLLNAAEVEVTQWNSRAIGIGVITFAFIVNGINVKFGLFLGNILGLFKIVIVLLITVTGWVALGGGIHTNGFQAPDNFSNAFEGESPSGFGIVNALYNVIWSYVGYSNINYALGEVKNPVKVLRIAAPTAFISLAIIYMFVNIAYFAVVPKEEIANSGRILAASFFRYAFGKTAETASSVFVALSALGNVMSVIFSQGRIIQQLGREGSLPFSRFFATQKPFNTPFVGLMQHWIVCIVTIVAPPPGDAYNFILNLISYPLNVVNTAVAFGPSYIHWQKRRGLVEWDPPIKASIPIIVFFAFSSLYLIVAPYIPPTDGQTVYQDLPYWIHPVVTWGVFGVGAVYWLLWAKVLPHFGGYRLVAKEVLGEDGFWRNKFYKISRDETNAVDEDGDEIAERII

SEQ ID NO: 28314 - protein, 412 aa, Debaryomyces hansenii CBS767
MYCRVFTHFSLYRLYTLLDNININKTNHNKLIGLHQHRVNYMPRSMTASSSQLKRIETRIESLSESLSKSNARKPLGKFQLNTFDNNKITKLQNEKVRPLKSSHIPVKLPIRKKGHSPAQVLQNERMDTKLLLQKLPSASRHMTLDDFEIGKVLGKGKLGKVYCVKHKTSGYIAALKVMAKKDLIDLKLEKNFRREIEIQSNLIHPKISRLYGFFYDHKNVYLILEYSIHGELYHHLKVQRRFNDATASHYIYQVALALDYLHTKHIIHRDIKPENILLSTDNCIKLSDFGWSVKSLPSSSTKRLTICGTLDYLPPEMIESNEHDYTVDIWSLGILCYEFLVGKPPFEEIDKNSTYKRIAKVDLKIPSFLSSEATDLILRLLQKSPKKRITLAEVMNHPWIMNNQQYWPNEN

SEQ ID NO: 28315 - protein, 535 aa, Debaryomyces hansenii CBS767
MVNSPTLSALSYNSVLDFKKVNKASNWIIQKFGGTSVGKFPENIVDDIAKVFSQQNRVAVVCSARSSNTKSEGTTSRLIKSADLALEDGDFHALLKVIEEDHVENAKSRISDTKIQEELIENTMKELERANELLKACQVIGEISARTLDSIMSVGEKLSCLFMAALMNDRGLKATYVDLSDIIPLDYDFTSGFDEKFYKFLSSELGKKVLSLDSDVVPVLTGYFGVVPGGLLNGVGRGYTDLCAALIAVGTQAEELQIWKEVDGIFTADPRKVPNARLLDSVTPEEAAELTYYGSEVIHPFTMEQVIKAKIPIRIKNVKNPWGSGTIIFPDNLGRRGEETPPHPPAAYETLSSSYIATHKKKSATAITAKQDIVVINVHSNKKTLSHGFLAHIFTTLDNFKLVVDLISTSEVHVSMALQIQPDQELHLKNALKELRKMGTVDVTREMTIVSLVGKQMVNFIGIAGNMFKVLADERINIEMISQGANEINISAVIDAKDTLRALQSIHAKLLEGSYDLLGKTESAVDTRLEGLKLQ

SEQ ID NO: 28316 - protein, 352 aa, Debaryomyces hansenii CBS767
MTTTTIKPKVLRIGEIDFAHQKWKELSDVVEVVKCESSNREEFFKDLKTKYLDITNITRSFASIDQTGRFDEELVSHLPESVKAVSHCGAGYDQIDVEPFSNRKIQLSNVTTPVEAPTADVAVFLILSTLRNFQVGHDLTVQGKWPSGGKCAGAALGHEPLSQTVGIFGMGGIGRAIRDRLKPFGFKKIIYHNRSQLSPELEGGATYVTFDQLLSESDVICISIPLNAKTKHSINGDTISQMKDDVVIVNTARGAIIHEAELLQSLKSGKVGAFGSDVFEFEPEVSQELLDLPNVVSLPHMGTHTYESIQNMEEFVIANVFDHLYTGKVKTIVPEQYNLQFDETPLLKKASG

SEQ ID NO: 28317 - protein, 446 aa, Debaryomyces hansenii CBS767
MRDLFVLGGSSHPNLTRSICRNLTIDQAFVDSKKFSNGETSIEIQDSVREKDVFIIQSGCGHVNDNFLELLIMIAACKTASAKRVTAVLPLFPYSRQPDVPHAASLTGAPSVSTKKDKYTFESAPGTPRPLSRGESEAEGPVSPTPSSANSSQQTETLLSKATMNNVKQPVPTRVNTKIPSYTPTSIVTNSAATNLPCVDVYGKTESGYKQWIAQNGTLIANLLTTAGADRCITMDLHDPQFQGFFNIPVDNLYSKPLLKHYIIDYIPNYLDCVIVSPDSGGAKRATSIADALGCSFALIHKERRAKVANTPPSTNATNTGLHSVQNSLVATTMLVGDVKDRVCVLVDDLVDSSYTITRAAKLLKDQGAKYVYALVTHGIFSGDAINRINKSAVDKLIVTNSVPQNDNIGVLGDKLEVLDISRILAESIRRIHNGESVSMLFDHGW

SEQ ID NO: 28318 - protein, 630 aa, Debaryomyces hansenii CBS767
MADITQQMNNLSVEQGSQGNGSSRSQYVPPHLRNRPSGGNGSFGGNRRGGFNNNSFGGFDNNRRGGYNNNSFGGYNNNRRGGFNNARGSGRYNTPKPGVGRWVDGKHEPAEKNERLEKELYGIDEEPTTQSSGINFDNYDDIPVEASGEGVPEPITAFTAPPLDPLLVENVKLSRFTKPTPVQKYSVPIVAAGRDLMACAQTGSGKTGGFLFPVLSESYMNGPAEVPETAGAFSSHKVYPTALVMAPTRELVSQIFDEAKKFAYRSWVRPSVVYGGADIGGQIRNLERGCDLLVATPGRLKDLLERGRVSLASIKYLVLDEADRMLDMGFEPQIRHIVQECDMPGVEDRQTLMFSATFPKEIQFLARDFLKEYIFLSVGRVGSTSENITQKILYVEDEEKKSVLLDLLSANDNGLTIIFTETKRMADNLADFLYDQGFPATAIHGDRSQYEREKALAAFKTGTAPILVATAVAARGLDIPNVSHIVNYDLPSDIDDYVHRIGRTGRAGNIGIATAFFNRNNKNIVKGLVDLLTEANQEIPDFLNKIARESAFGGKSMRGGSSRGGRGGATRDFRKQGGSYGGGASSSNWGGSSSSGGGWGSSNNGGYSGYSGRSNGSSSYGNPSASNSWW

SEQ ID NO: 28319 - protein, 339 aa, Debaryomyces hansenii CBS767
MPKPLVVHLEPVRYSHHLWIELEEIAEIELVGDYSREEFIKDLHGKYANVVAIGRGYLTGQKVGMFDEELISHFPSSLKYIAHQGTGYDQIDVDELNKRGIQLSNCPDIVTKSTADMNIFLMLGAMRNFEAGRRNLIAGKWPAGGLGAGVEAGWAPSRKVLGIIGMGNIGRAVRDRAVSFGFEKIVYYSRSKLTPELEKDCEYVASLEELVAASDVLSINCPLNKSTYHLINDSLISKMKDGVIIVNTARGAVIDEQDMIKHLKTGKIGAAGLDVFENEPVPRKDLLDLPNVMALPHMGTHTVQAFSDFENWTIENIRSGLSTGKVRTIVQEQQNTTFN

SEQ ID NO: 28320 - protein, 979 aa, Debaryomyces hansenii CBS767
MSSQVVTNLEETTNQHKAINNPNVVKRIHREVRFGLYILGSTLGEGEFGKVKLGWRKDGKHPSQVAIKLIKRDTIMKDSESEIKIHREINSLKMLNHPNIVNLVEVMKSGKYIGIVLEYASGGELFDYILQHKYLKENVAKKLFAQLVSGVDYMHSKGLIHRDLKLENLLLDKHKNVIISDFGFVNSYNKDKNDLMKTSCGSPCYAAPELVLTQAPYEGRKVDTWSLGVILYAMLAGYLPFDDDPENEDGSDIVRLYHYICKTPLTFPEYISPLARDLLRKIIVPDPKKRITIKNIKNHPWLTPYVNLLSVTQPEWDKVHKDNKTVNPKSAATANNSYTNLIHSNTNKRFSMINEKTNSSSLMMPAGRSYSSTNVVNQLYSNPSAPTTSSSLANAVALSKPKDPASDRSRTPSPTKQLPNGNNYSSTNYQRGHAKSTSISNPYSSASNALKAMVTENDSKRNSLVSLDSTTSSMISLTSSTKPAQHNHLPSPHLPRSTTYTGSAISTIAESPSKPSPATHLAVDNESNVTHHNTASSSNITNLKPNSSSRESAKLPHANKKPRPTSYHPSSMSASLMSSNGSSLQDYIKIPTPLLPIPQLLSTSPTKASPSSETSSPVFTDTNNSSPTMRSNASINSRRNSVVTHVHVNGVLTSESNANHNENKRNSVLSYLEDKMDALELTELHSPLKSNKPGFTDNASDTNITPQINQLPMFDGQTESPIIHTSKAEESQVKDQSEEGNKIETDEHPFVNVANQVDENKVVDLALEKESISEAPEEPNVSHSQDRTNQQENITLEFEEPKYTLEAQPAEPVSQTFKDEPVVSLDEQLIKRDHVNIIDEQEKENLDRKTTNTKKETSREINKSSAKEIKDNKKRNRFSLLSFYSNYNGSSSSNVVLQQAPTSNVSHSGKRILEPSLEQNVPTQPQDQKRNVSNSSGKSSTSKKSNNSGTAHISSNNGKEASAARKVMDFFKRRSVKIG

SEQ ID NO: 28321 - protein, 776 aa, Debaryomyces hansenii CBS767
MEKLKNALSKDHGIEIESKNVNEIESAEEHVLMASKSQEFDPVTSRLEEVILDDDYAAVTVEDDSPYAEVRASVPSSDDADLPQNTIRMWILGMILNTIGSALNLLFSLHSPQIILTTLVTSLLAWPIGMAWARFIPNIKIFGTPLNPGPFNIKEHTIIVIMANVSFGGGAAYATDILLSQNKFYEQDFGWGFDLLAIWSTQCIGFALGGLARRVLVYPASMIWPQNLVTVTFLTNLHVNSNHVADGWKISRLYFFALIGICSFLWYWFPNYIFQALSWFAFPTWIAPKNVIVNQVFGANTGLGLIPITFDWNQISGYIGSPLIPPASAIATILLSMVTIFWIIVPAIHYSNTWYAQYLPISSSGSYDRYGSNYNVSRIINKDTLSFNEKSYKNYSPLFLSTTFAISYGLSFAAMFATLVHTVLFHGKDIMRQLKQKEKPDVHMRLMRQNYKDVPEWWFLIVFLVFFGISIVTIRCWNTEMPVYALIVALLIAVLFLLPVGVIFALTNIGVGLNVVTEFIIGYMVPGKPLAMMFFKTYGYITNNQAITFVQDMKLGHYMKVAPRLLFAAQFIASIWGSLVQVAVLRWSYGNIPNLCEADQANNYTCPNGKVFFNASIIWGVIGPERQFSQGQIYYGLLFFFIIGALLPLMNWLILKKWPKSPIRWLNWPVFFSGTGYIPPATPYNYSAYCAVGLTFGYWIKRRWFHWWSKYNYSLSAGLDIGMAWSSVIIFLTISLTKTSAPNWWGNNVIETTMDMTSTAIRQPLAEGEWFGPSSW

SEQ ID NO: 28322 - protein, 514 aa, Debaryomyces hansenii CBS767
MANDGFTGTGPGGDIMKVDLNEQFDKADMVWVGVSAALVWLMVPGVGLLYSGLSRKKHALSLLWASLMATCLTAFQWFFWGYSLVFTKSDSVILGNLDYFSLKNVFGAPSVVSTVPDILFCLFQGMFAAVTAILMVGAGCERARLGPMMVFLFCWLTVVYCPIAYWTWGGNGWLFNLGALDFAGGGPVHENSGFAALAYSLVLGKRHDPLTAGKVPKYKPHSVTSVVLGTVFLWFGWFGFNGGSTGNASIRSWYACVNTNIAAACGGLTWMFVDWFRTGGKWSTVGLCTGAIAGLVGITPAAGFVPVYTSIVFGVVPAIVCNFAVDLKSILQIDDGMDVFALHGVGGICGSILTGFFAADYIAASDGSVAADPSAAIAGGWMNHNYKQLGYQIAGSCAVGLWSFTLTGILLLIMDRIPQLRIRLHADEEIMGTDIAEIGEFTYYDDEMGQGNTLAMSDNLPYVIEPIRSTDQKKAQLQAAASRNDPEVHMGTTADGQGFVSPDDGSGTSHATKE

SEQ ID NO: 28323 - protein, 113 aa, Debaryomyces hansenii CBS767
MFEYIKSWFVSPPVSPVIKAEVQNLIDSNKILIFLKSYCPYCDSTKDLIKSITSDFKVVELNTSANGRTIQDALREMTGQNTVPNIFINRKHIGGNSDLQALQGAGKLKSLVN

SEQ ID NO: 28324 - protein, 530 aa, Debaryomyces hansenii CBS767
MPIPAPHGGKLQDLVIRDSSIRSDLFKEIADKKYKTLTLSPRQLCDLELILNGGFSPLTGFLNEEDYNSVVHDMRLSSVKNEKNGKGLLWSMPITLDVGQEFAGKLSKGEKIVLKDLRDEKPLALLTVETVYKPNKQTEAEKVFRGDPEHPAIKYLFETAQEFYVGGSIQGLDYPTHYDYIPFRKTPTELREEFSKLGWDQQKVVAFQTRNPMHRAHRELTVRAANDLGSDGHILIHPVVGLTKPGDIDHHTRVRVYQQILKKYPDGLATLSLLPLAMRMGGDREAMWHSLIRMNYGVDHFIVGRDHAGPGSNSKGVDFYGPYDAQELLAKYKDELEPKIKVVPFRMVTYLPDEDRYAPIDTIDTSKVNTANISGTELRQRLRDGTEIPGWFSYPEVVKVLRESNPPRSKQGFAIVIDSSDSKQGEYLSFALQSTLNQFSGERRITKLSSEQATPFIVNELVKSGSGVIVPTKSNQSDIIKAVGSGNSIIVNFNGEQNADQGIFSLKEDLTSVIGEIVEYLVSQGFYQQS

SEQ ID NO: 28325 - protein, 212 aa, Debaryomyces hansenii CBS767
MNLMTISQSLDESYTKHKIIPDVVDKFDTQGLLTIEYNEQDHVALGNTLKVENTQHHPVIQFTLNSPGQENDFEISNNDKFTLVLTDPDAPSHKDHKWSEYAHWIVTDLPLNANSNDVESAESLTTVLDYSKGKELLSYQGPAPPPKTGKHRYVFLLFRQDPSVSKFETPKDRPNWGTGTPSSGVRDWIKKNGPELKLLGVNFFYAQNDTQE

SEQ ID NO: 28326 - protein, 622 aa, Debaryomyces hansenii CBS767
MSKKGSIESSNTQTMDATEPGTLTHSASENSYHSNSSNDRSYQEQISNINSQNANLKTINKHLVNQEDTLKLQGGDVARHLYLQLENVSSKELTNLKRRTRSSSFSNFLSQSRRQSTASDINIPGGFRREFLINKSLQENTEPPNFLTRNFVEFLSIYGRFAGENFDDDDNEEQYEETFDEESLLLPNERRTPPTRRPRPEKKGAANVPKTFFLVFKALVGSGILFLPKAFSNGGLLFSAIMLLCFGILTFLCYIILIRSKRILNKSSFGELGFKTHGKPLRICILISILISQIGFVATYILFTAENLISFIENYLHFSANYVSTRNIVIVQCILLIPLVLIRNLAKLSIISLISSVFIVIGLIIIFYFSIMKISVEGVGDNIVYFNSSNWSMLIGVAVTSFEGIGLILPIESSMAQPEKFPMVLSISMCVITTLFMSIGVLGYSTFGDQVKSIIILNLPQGKLSVQFISLLYSLAVFLTAPLQLFPVTKILESLIFNSYLFNDNTTTARKKDDEGKLYHFSGKYSTSIKWSKNLIRAILISSICIIAYLNANDIDKFISFNGCFACIPLVYIYPPLIHLKTYKFDRQNDWKGKFFKIFDYILIIVGIVAVIYTTYQILFLI

SEQ ID NO: 28327 - protein, 578 aa, Debaryomyces hansenii CBS767
MLQNKEETISLGTYLFERIHQLKVQSIFGVPGDFNLTLLDKIDEVKNLTWRGNANELNAAYAADGYSRVRSTESSANGFACLVTTFGVGELSALNGIAGSYAEHVGLLHVVGIPATSAQDKQLLLHHTLGNGDFTVFRRMSSSITQTTGMVADAASGPQEIDRVIREAYINQRPSYLAFPTNMVELEVPKSALDTPIDLSIPDNDPETENEVLDRVTELISNSKNPIILVDACCARHGATGEARKLIDLTKFKFAVTPMAKGAKYIDEDHDRFAGVYVGTLSYPSVKEQVESSDLILSLGAMLSDFNTGSFSYSYQTKNVVEFHSDYTKIRSANYPNVRMKHVLQKLLESNKLKEAASKYEPVKVEKDPFPEEKRDELSKITQQWLWSKLSGWLRENDIVITETGTSSFGIIQTQFPKNTLGISQILWGSIGYTVGATCGAVMAAEEIDPNRRVILFVGDGSLQLTVQEISSMIKNKTKPYIFVLNNNGYTIEKLIHGETADYNSIQPWDHLKLLETFKAEDYESIRVSTVKELLDLFSDHKFAKNDKIRLIELMFDTMDSPQNLIEQARITAQTNSN

SEQ ID NO: 28328 - protein, 92 aa, Debaryomyces hansenii CBS767
MAPTEKKRTTRKKKDPDAPKRSLSAYMFFANENRDIVRAENPGISFGQVGKLLGEKWKALTPEDKIPYENKADTDKKRYEKEKAEYAKKNAA

SEQ ID NO: 28329 - protein, 323 aa, Debaryomyces hansenii CBS767
MTASQNAIKLLHGNSHPELAKLISKKLGIGLAKVGAFQYTNKETAVAVGESVRDEDVYIIQTGCGEGEINDFLMELLIIINACKTASARRITAVIPNFPYARQDKKDKSRAPITAKLIANLLQTAGCNHVITLDLHASQIQGFFRVPVDNLYAEPSVLRHIKDNYGKEDLIIVSPDAGGAKRVASIADKLDVNFALIHKERQKANEVSKMVLVGDVTNKSCLLIDDMADTCGTLVKAADVLLKNGAKKVVAIITHGIFSSNAIEKLNNSNLDKIICTNSMPLENKLSQCPKLEIIDISATLAEAIRRLHNGESVSYLFNNAPA

SEQ ID NO: 28330 - protein, 900 aa, Debaryomyces hansenii CBS767
MDNSEFTDNALRIITNATQLAKDNAHTQLAPLHFLAAMVPTDDENSTQYLKTLIQKARYEWPTFERNVNKHLVRLPSQTPAPDDIRPSYATGQVLANATKIKSQQKDDFVAQDHLLLALLDDSSIKAIFKESGINVDSIKTQAIELRGSQRIDSRQADSSSSYEFLNKYCEDFTEKAREGKIDPVIGREEEIRRVIRVLARRTKSNSVLIGEPGVGKTSIVEGVAQRIIDGDVPNILANSRLFALDLGALTAGAKYKGEFEERIKGVLNDIEKSNEMIILFIDEIHMLMGDGKSDAANLLKPMLARGSLHCIGATTFTEYRKFIAKDGAFERRFQKIDVPASTVPETVAILRGLQPRYEIHHGVRILDSALVTAAQLASRYLTYRSLPDSAVDLIDETAATVAVARDSKPEELDTLERQLHLIEVEINALERDVEADADSKDRLEVAKRKKAELEEQLGPLRERFNQERAGHEELIAAKRKLDELEIKALDAERRHDTATAADLRYFAIPDVAKQIEELEVKVAEEEQSLGSESMLKNAVSSEQVAETAARLTGIPVTKLSQAENTKLINMERELSSEVVGQSKAVKAVSNAIRLNRSGLANPNQPASFLFLGLSGSGKTELAKKVAGFLFADERAMIRIDCSELGDKWSASKLLGAAPGYVGYEEGGILTEALLRRPYSVILFDEVEKAAPEVLTILLQILDDGRVTSSQGKLVNCSNSIIIMTSNIGAEYINASKGPTIDDTTKGLVMDAVRANFRPEFLNRISSTVIFNRLSKKAISKIVKIRLKEIQERFAANGKALALEVDDAALEYLCNKGYSPDLGARPLNRLIQSEILNRLAVLLLKGQIKDKEVARVTLGPKGLEVLPNHEAEDEDMADVQVDDWKDSEDEDDYLDSTPLD

SEQ ID NO: 28331 - protein, 755 aa, Agrobacterium tumefaciens
MSASALLDNQCDHFSTKMVDLIMVDKADELDRRVSDAFSEREASRGRRITQISGECSAGLACKRLADGRFPEISAGEKVAALSAYIYVGKEILGRILESEPWARARVSGLVAIDLAPFCMDFSEAQLLQTLFLLSGKRCASSDLSHFVAISVSKTARSRTLQMPPYEKGTTKRVTGFTLTLEEAVPFDMVAYGRNLMLKASAGSFPTIDLLYDYRSFFDQCSDSGRIGFFPEDVPKPKVAIIGAGISGLVVASELLHAGVDDVTIYEASDRVGGKLWSHAFKDAPSVVAEMGAMRFPPAASCLFFFLERYGLSSMRPFPNPGTVDTNLVYQGLRYMWKAGQQPPKLFHRVYSGWRAFLKDGFHEGDIVLASPVAITQALKSGDIRRAHDSWQTWLNRFGRESFSSAIERIFLGTHPPGGETWSFPHDWDLFKLMGIGSGGFGPVFESGFIEILRLVINGYEENQRMCSEGISELPRRIATQVVNGVSVSQRIRHVQVRAIEKEKTKIKIRLKSGISELYDKVVVTSGLANIQLRHCLTCDTTIFRAPVNQAVDNSHMTGSSKLFLLTERKFWLDHILPSCVLMDGIAKAVYCLDYEPQDPNGKGLVLISYTWEDDSHKLLAVPDKKERFCLLRDAISRSFPAFAQHLVPACADYDQNVVQHDWLTDENAGGAFKLNRRGEDFYSEELFFQALDMTNDTGVYLAGCSCSFTGGWVEGAIRRRVTPSVQLSTIVEVFWQRTILYEHSWKRYNYRNRN

SEQ ID NO: 28332 - protein, 354 aa, Debaryomyces hansenii CBS767
MPVTSEELFLINVRTYQPPNILCPLHSIWHKVPVARRSAVFVLLFLGNMGELRVILTKRSSKLRSFPGHISLPGGKADSGLETEWQVARREMEEEIGLEANNEKLMKHYGFKIDHLNLLPCYLSRTFLAVKPCIGFMNLSSEHEQELFGNLKLNLNPDESSSIFSCPLKDFLYPSTKSPSRECIKRQFFKIEWGGIPWNLRSYTFAHENEHEIHWLREVSDTSMSSEEEPEDNPSMKEKAKSMPKRDLSTWGRLGTRRDSDTDQKINDVWGLTANILHDLAQIIYCQPTVYKNKTFGEEELINSVFTQGNLMQEKERSEEEVKLIHSKTINEEFGFNSILPKDEFLRLKEIYRH

SEQ ID NO: 28333 - protein, 429 aa, Debaryomyces hansenii CBS767
MSGASDFLSKGIDLVQKAIDADTATRYEEAYKLYYNGLDYLMLALKYEKNQKSKELIKSKFTEYLTRAEQLKDHLEKQAKSNTAEGSSDGSTKAKKSGDGDDDDTKKLRGALAGAILSETPNVKWDDIAGLESAKEALKEAVILPVKFPQLFTGNRKPTSGILLYGPPGTGKSYLAKAVATEAKSTFFSVSSSDLISKWMGESERLVKQLFTMARENKPSIIFIDEVDALCGPRGEGESEALRRIKTELLVQMNGVGNDSNGVLVLGATNIPWQLDAAIRRRFERRIYIALPEAEARTRMFEINIGTVPCECSGQDYKMLADMTEGYSGHDIAVVVRDALMQPIRKIQQATHFKTVMTEDGEEKLTPCSPGDEGAREMGWQEIDTDELKEPELTIKDFIKSIKNNRPTVNQSDIGNHTKFTEDFGQEGN

SEQ ID NO: 28334 - protein, 301 aa, Debaryomyces hansenii CBS767
MGDSSFVIDFLMGGVSAAVSKTAAAPIERVKLLIQNQDEMMKQGRLSRKYDGIIECFKRTAAEEGMVSFWRGNTANVIRYFPTQALNFAFKDKFKAMFGFKKNEGYWKWFAGNLASGGMAGATSLLFVYSLDFARTRLANDAKSSKGDGQRQFNGLIDVYKKTLASDGIAGLYRGFGPSVIGIIVYRGLYFGLYDSLKPVILVGPLEGNFLASFLLGWAVTTGASTASYPLDSVRRRMMMTSGQAVKYDGAFDCFKKVVAAEGIKSLFKGCGANILRGVASAGVLSMYDQFQMIMFGKKFS

SEQ ID NO: 28335 - protein, 93 aa, Debaryomyces hansenii CBS767
MSDNENQPKEEKPDNTHINLKVSDGSAEIFFKIKRSTPMRRLMEAFCKRQGKTMDTLRFLIDGARVGPDNTPDDLDLEDGDVIEAHREQVGGC

SEQ ID NO: 28336 - protein, 1314 aa, Debaryomyces hansenii CBS767
MSSHQRQDSIASLSSTATGNIHPQKIGPWKLGKTLGRGATGRVLLATHQSTGQKAAVKVVSKSELNDDEINKKSADEAGLPYGIEREIIIMKLLTHPNVLRLYDVWETSKALYLVLEYVEGGELFDLLVERGPLQEVEAIKYFRQIILGTAYCHALGICHRDLKPENLLLDSGLNVKLADFGMAALESNGKLLETSCGSPHYAAPEIVSGLKYHGAASDIWSCGVILFALLTGRLPFDDENIRNLLLKVQAGSFEMPCELSPEAVDLIDKMLTVDPMKRIPTERILSHPLLTKYPIPNEDLISVKSLPHPETAYKSLGSEKNIDKQILQNLSILWHDRSQGDIVDCLLKTGSNPEKTFYALLMRYRHNQEESAGSSPTRSNSQNFNNKIGNKDNNRKKRMSQVSASTSRNRPVLFQYKNGIKSSIGNGNGRLSSTSSVSNSPRKSPVRRSSNRYSFAQSPRKFGGTSDETTLHSSSVPRNIYNEIVSAQRNGQGVMPPPLPSKDNMDSKSNPIVDEVSNQDLLSSAKISPTKNKRGSVIRNSISKNRLSRRKSRTSFTPGLKRNSITTKLLSTYAKLAGETDWEFMDKQTKRTSATFATLCDKIFNQEQYDAEDEKLIDEEEKQAKEYERLMEIERKKHEAELRARKELAKQRKREKRKSLLSSRKLSILVKDDANNSEQDITVTDSDALSQPKRQSRNQAMRSISEGHGKESDDLTKEDLENLKRRSVTQPTPRRRKTPVLTRRPVSRLDPLWTAYENEEIERAQDALEAEYRDADFKTKKKINRESMVSVMDDKEVDNEPHVDDDATDEVQDEEAVKAKSRGYELPEPDMERSDLSDEYMSEIRKSRLLNSQLNINAIANGEKEVKSEKRQDKEPKTLIGDVRIPTVTRKSRCFTNSNKRLSVLSMYSTKQSYRDLNSILGDENDENNDVEGQLPQLRTSFADRLDRAGLADAEEEDDEPLDEGSIMDFDQHLANKRSSYYAGDKSRRQSRYSTTKRNSQAPTVDVPAIPKKSNKERDREDDTFVTKDDDVHRRKSAYSAKGANNNDDEDMIFENIKLPNEDRRQSASTAKSNKKKSFQPSAESMLIPNVDNIPEDAKTRKPDPRSQPYEKVRKPKVSNGELKSTGPEGQVKNPLEDTTNEPRENQKRKGSIFRKLSWGSKKTMDNSAAQLPSPADSRAPSVEEKPKSKSGFFRWFSSSSNQPGIESEIRRFKAILPKQEMSSALFALLNSWSNFGLKNLRNDTVGYNITGEISKNNAFNLKNCKFRIKVNPREFNQKSEIVCARVKGSKVTTDTLFKEIEKVLQKEGVMDI

SEQ ID NO: 28337 - protein, 622 aa, Debaryomyces hansenii CBS767
MSEQQGSDNRHHHHHHHHNNHHGDHSGQHDGHNNKVHQPQPIDPKANPANRIGKYQVLKTLGEGSFGKVKLAQHTTTGQKVALKIINRKTLAKSDMQGRVEREISYLRLLRHPHIIKLYDVIKSKDEIIMVIEYAGKELFDYIVQRGKMPEDEARRFFQQIIAAVEYCHRHKIVHRDLKPENLLLDEQLNVKIADFGLSNIMTDGNFLKTSCGSPNYAAPEVISGKLYAGPEVDVWSSGVILYVMLCGRLPFDDEFIPALFKKISNGVYTLPNYLSQGAKDILTRMLVVNPLNRITIHEIIEDEWFKQNIEEYLLPPDLSKTKHKKIEVDEDVITALQSTMGYDRDEIVNVINKCNQHNAPQQQSNEIIDAYLLMRENRTLVKDLKNSKLNNMDTFLSQSPPPSWTNNANNNSNMNINVNHSTKAPGVQQSLTYQTLAAVPDLSTLPNSTIAILPSSLPSIHRAYMMESNMDTQLKIAPVSHKKLKTRWHFGIRSRSYPLDVMGEIYRALKNLGAEWSKPTEEELWTIRVRWKYGPCILPNEKSQEEQQKDIPDMMKMQIQLFQLEPNNYLVDFKFDGWENSSNKDVSIKQDVDEMSSFSAYPFLHLATRLIMELAVNSQTN

SEQ ID NO: 28338 - protein, 238 aa, Debaryomyces hansenii CBS767
MSVIEIESESQFTELTKSDANKLIALYFHTPWAGPCQTMNSVFKTLAEANKSVLFISINADDHPDISELFEVSAVPYFILIRNSTILKELSGADPREFISALNQFTEKKDTAAPAAAAAAAPAAPAQSPIEESPEALNERLKKLTGAAPVMLFMKGSPSAPQCGFSRQLVAILREHQVRFGFFDILKDDSVRQGLKNFSDWPTFPQLYISGEFQGGLDIVKESIEEDSSFFENAVKSA

SEQ ID NO: 28339 - protein, 818 aa, Debaryomyces hansenii CBS767
MSVHESQVPEIQEFQPEAQEHDFDYANDEYEIKNSNVLVPLYNEREVTVVDWGQEVFGSPLQKATNYFISLFPIAQWILHYNRKWLYGDLIAGITVGVVLVPQSMSYAQLAGLSAEYGLYSSFVGVFIYSFFATSKDVSIGPVAVMSMQVGKVIQNVQAKVGEDKYDPAEIATFLSLICGGIATGIGILRLGFILEFISIPAVMGFMSGSAFSIIVGQVPGLMGYNSLVNTRSASYMVVIDTLKNLPNTTVDAAFGLVCLFILFVWKFLTEIAMKRWPRYKLWFFYSQNLRNAIVLIVATAISWGIVHPQKVAFDGPASDFKPPIKTIGEVPSGLQHVGVMTIPDNIISLMASEIPVSTIILLLEHIAISKSFGRVNDYKVVPDQELIAIGVNNLIGTFFNAYPATGSFSRSALKAKCGVRTPLAGIFTGAVVLLALYCLTSAFYYIPKAVLSAVIIHAVSDLIANYKVTWNFWRISPLDCGIFLIAVIITVFSSIENGVYFAICASVAVLLFRVSKPQGFFLGRIQVAEVINPIIDNSNSDSSSTISGDANYNNSSSDVSKDIEIHQVLSNTSNYQATSSNKFKSKEAITTLPSTHKLLDNNPNIRFHTRWVPLTKENINSDLQVRPPPPGVIVYKPIEAFTYPNASTQIERVTDEVKRITRRGKPYNSNDVGSRPWNDPGPLQWSIPFFKNKNAKVETPQEDNRPILKIVHFDFSTVASVDVTSIQALVDLRKALNIYADREVEFHFSGILSPWIRRGLMNAGFGSYSEDGLVSDTTYVNIATSSKTQDIESGINDQYFAAVSTNTPYFHLDIPNF

SEQ ID NO: 28340 - protein, 801 aa, Debaryomyces hansenii CBS767
MLRTRLIIQNVRSRAISQASRNINTVSSLSTRQIHVPAIQLKLNFGMKNGLQGMKYKHNSFGLNHVKFMHSSGIRKLQMSMDKEGQDTRPALEKYGTDLTQLAKDGKLDPVIGRDEEIRRTVQILSRRTKNNPVLIGNAGTGKTAVMEGLAQRILKNEVPDSMKDKQIITLDLSGIIAGAKYRGDFEGKLKQILKEVEEKQGKVILFIDELHILMGLGKAEGSIDASNLLKPALARGKLSLCGATTIEEYRKYVEKDAALARRFSAVTVNEPTVQDTISILRGLKERYEVHHGVRITDGALVTSALYSSRYITDRFLPDKAIDLVDEACSTLRLQHESKPDAIAQLDRQIMTIQIELESLRKEDDQLSLDRKTKLEEELNVKSAELKDFTEKWESEKKLIDDVKNAKTDLEQAKFDLEQCQREGNYGKASELQYATIPKLEEQLKELTDNEKSVEGSTLLHDSVTSDDIANVISKMTGIPLSNLMKGEKDKLLDMEATLKDKVIGQDEAINAVADAVRLQRAGLTSDKRPIASFIFLGPTGTGKTELTKSLAEFLFHDKSSVIRFDMSEFQEKHTISRLIGSPPGYVGYEESGELTEAVRRKPYSVILFDEFEKAHSDVSKLLLQVLDEGSLTDSHGKHIDFRNTIIVMTSNIGQEILLNDKDTSDDGHISESTKTQVSDMLKHYYPPEFLNRLDDVLIFNRLSKQSLKNILTIRLKEIDERLADRRINLSLSNESKDKLCELGYDPVYGARPLNRVLQKKVLNPLSKLMIKGQIREGETILVDLKDDEIYVTPNHEEDHP

SEQ ID NO: 28341 - protein, 907 aa, Debaryomyces hansenii CBS767
MSPDIAEQEYIELSNINVDGTTTSDNAFNIGNNWNLTTDQIQFILLRLGIITDDTYKPGSSLDINLSQTSRFMINKIDNLSVIEAITILREALAEHKDDFNFLHEDYQLLQRLVRLIPGDFEISGKQEIEKTNPEEIEEKPTHFKNKTYLNIIDWNLQVRLEAALIAFHSPYPEIRAITDPVDEQEMPAETIRAYVIGFFWTLIGSIINNFFVHRLPSISLGLHTIQLLLLPSGRLWEKMMPYDKMITIFGYLFNLNPGPWSYKEMMLSTIIYLCSAGTPYLVYNIFVMKLDKFYGLKWVSWVYQLLLALSTQCLGFGFAGIMRKVCIYPVKSIWPTILPTIALNRALMHQDDGNNPSIHGWKISRYSFFYVMFGLSFIYNWIPSYFFTALSSFNWPTWINPYLVHLNNVTGFKSGLGLNPLPTLDWNILDAAGCLTFPFYTYANQYLGSVLGFFVILIVYYTNNKWTGYLPINSNALFNNEGKIYNVHSILNDKNMFDEKKYKEYGPPYFSAANLVLYGAYFCLYPFAIFFHVVTEWESMKASFVNVWHSIVDSLSSKGNIFGRYSKDPHCVMMSKYREVPDWWFLVILVVSTVFAILCVSLYPTETPIWGIFFTIFINFIFLIPMTAIASVTGFSFGLNVLVELIVGYTIPNSGIALITLKSYGYDIDSQASNYITDQKLAHYSKLPPRAIFKGQLISTIISVSTALIIANWQLDNIQDICDSHQKERFSCPGANTFFFSSVQYGEIGPAKVFSGLYPVLKWCFLLGVLLVIPCYWFKKNGPSRLTRYFHPTIIIGGFLMYAPYNLLYYTGGFYLSFIFMYYIKKNYILWWEKYNYILTSALSAGVAFSALIIFFTVQNDYTALDWWGNNVNDQGIEGGLAPKYTWLDVKQAEDGYIGLRKGHFP

SEQ ID NO: 28342 - protein, 480 aa, Debaryomyces hansenii CBS767
MIKGKVLVVSNRLPVTIKRSPNGTYDYSMSSGGLVTALQGLKKSTEFQWLGWPGLEIPEDEQSKVNKDLMEKFNCTAIFLSDSIADLHYNGFSNSILWPLFHYHPGEMNFDENAWAAYIEANRKFAITIAQQVDDNDMIWVHDYHLMLLPQMLREEIENKKKNIRIGFFLHTPFPSSEIYRILPVREEILVGVLSCDLIGFHTYDYARHFLSSVSRIVSNVNILPNGIEYQGRSIGIGAFPIGIDVDKFTEGVTKPKVVDRIKQLKQKFTDTKIIVGVDRLDYIKGVPQKLHAFEIFLTENPEWIGKVILVQVAVPSRGDVEEYQSLRATVNELVGRINGRFGTVEFVPIHFMHKSIPFDELISLYHISDVCLVSSTRDGMNLVCYEYIACQQENKGVLILSEFAGAAQSLNGAIVVNPWNTEELSYAIKESLTLPEEKKELNFKKLFDYISKYTSGFWGESFVKELRKCSSQDKITEIR

SEQ ID NO: 28343 - protein, 701 aa, Debaryomyces hansenii CBS767
MIGSTQLMIPRLTSRLNNDIARRSLSSRISFINFSHNFHVHRVENNRSQTIHFNANRLHWNFQRRNSTSSTTTNVQMSEVLTRDVKTSTLRKDISKLFRLAKPEVKIIIAALVCLILTSAVSMSLPLFIGKIIDTAKSPDSRMTDADSEKGDNNDDDDDKKIFGLEPFEFYGALGVFFSIGAVANFGRTYLLRSAGERLVARLRSRLFLKILSQDSYFFEGGPSDKGMKTGDLISRLSNDTQIISKTLSGNISDGARSLISGCVGLSMMCVVLWKLTLCMSSIFPPLIIMSVVYGRRIKLLSRTIQENLGDMTKVTEEKLNGLKTIQSFAQQRMIVHGYNQEIKNIFSSSMREGKLSGIYYGINGFLGNMTLIGLLVIGTKLIGNGEITVGDLSSFMMYAVYTGSSVFGLGNFYSELMKGVGAAERVFELIELKPKITTTLGKKVDDLHGDIEFRNVKFSYPSRPDSPIFGGSELNLTITKGEHVCFVGPSGSGKSSISQLLLRFYDPTEGTITVNNHNIKDLNLNFYRSQVGYVQQEPLLFSGTIRDNIVFGRMDSNEDEIKEASILSNAYKFIEEFPDKFDTVIGPSTSGAAQLSGGQKQRVSLARTLIKKPDILILDEATSALDSQLEEIVMKNLKRLSKDMHVTIILIAHRLSTIRNSERIIVVNYRGEIVEDGKFNELYYNSNSELNKLLKAHELQ

SEQ ID NO: 28344 - protein, 417 aa, Debaryomyces hansenii CBS767
MQTSRTGKQVSEMSFLDRYFGPPFGTMDDDHQTKSFQGVEKKQPIQLDDRLHSLMINDDYEYPDRDDLRDINGTNTLYRGGEFGGIATFAHIPYANCHNPEFFEKEKYDIAIVGAPFDSGVSYRPGARFGPNGIRMGSRRLAPAYSVYRDGFDPYSNWAKIVDCGDPPVTPLDNRIALDQIYRANRAIGKHKTTEKNKDKSPKIFTLGGDHTITLPAIKAAYENWGPITVIHFDSHLDTWNPYYFGGNVTDYQSVNHGTYLHWAHEKGLLTDRSIHAAIRGPYPGPRDVEHDKKCGFDRILARDIDKFGTQGIINKIKERVGNGAVYITVDVDSMDPANTPASGTVEPGGWTSRESLTILDGLEGLKVVGGDVVEVAPPYDTAAELTSITAAQVADSIISLMIIKEEETDKKVKEIQ

SEQ ID NO: 28345 - protein, 360 aa, Debaryomyces hansenii CBS767
MVKSVNVAIIGSGVVGSAFVNQLKNLKTAINFNVVYFARSSKEALFSSDYKPVDLASYKNASAQAVLSLDELTKFLKGASKPTILIDNTSNSTIADYYPTFVKEGISIATPNKKAFSSDLSVWNEIFKNSEAPSGGLVYHEATVGAGLPIIGPLRDLITTGDKVEKIEGIFSGTLSYIFNEFSTTDPSTKVKFSDVVKVAKDLGYTEPDPRDDLNGLDVARKVTILARISGFDVESPTSFPVESLIPKELESVQTADEFLSKLPDFDADIQKVKEEALAENKVLRFVGQVDFKANKVSVEIGKYGFDHPFASLKGSDNVVSIKTERYSNPLIIQGAGAGAEVTAHGVLADAIKIAERIAI

SEQ ID NO: 28346 - protein, 1116 aa, Debaryomyces hansenii CBS767
MTIIIGTLFLPYTVKFDVGGRVDYDIDITQKDATVPNIQNDARNQQRKSVSAGMGTGISQSSILPSLSTSQQHTPRSGSPTFNDNASIMTGSDTDQVNSAQEFFHSHKRTPHDSQNILTDNLYDKLGSKLIQPRSRYSNVAFQSLVVDPKKKSEDAGLPGLKINRSSNNLTSLNNSSFSSYSNMIGLNPTTNSSTMSVPSTRQRTPISRQGFTLHSNSSSNSIPTRIKEVEEEEARESDYASDKSVDEDHIENFNDLVHGRTESKLTPFGGFSKPDLEDGILNQENIFEDAPWKVVLAGKGNVSLTKAVQIAVDAGGINDHKWVGTLAMPSDAVPNSVINGISDSLSENYDCEAVFPNDITFQGHYKSFCKQILWPTLHYQIPDDPKSKAFEDHSWGHYKLLNQLVADKIVDLYKKENGSSDPNDPNNMIWIHDYHLLLVPKMIREKLPEAKIGLFLHVSFPSSEVFRCFAQRKAILSGMLGANCITFQTDEYVRHFWQTCNRLLLADANEFGITYEGKFTMINTIPVGVDAKSLEGYLGSNEVNEWRNMIRERWSNKKLIVSRDKLEKLRGIKQKLLAYEKFLHSNPEYVDTTVLIQICPGTTQDSSYESEIMSIVGRINALTGDISFSQPVVLLQQDIGFEQYVALQCEAEVFVVASMREGLNLTCHEYIIATTEKKSPLMLSEFTGSSPLLNCNGEGAILINPWDLKRFAELFKVLLDMGQDEKVKRWTNCYKTICNHDSRNWVENCLQGINEGWDYDHSRNLNKLIPFTRDIFDSFYSRNDGGKRLFFLNLDTPSAIASTNDPSSKFHKLTSKSAVAAAGKNGAFSESSRFASLLNELLSDPLNHVYLTSYLKRSDLDTLYNRSPNLGLVAENGGYIKLTESDKWISIIDEVELEGWMPQVSQLIASKVERLPGSHMEVEDCTIRFHPGKSFENDRERSLSILGDCIQHVNELFLDQDGVHATLIRNVLIVQKNKLSMKALKFIISYYNQKKQGIKSESLIEEYQVKQVPGSAPSTPISETASLPPIKSPTSKIQKNLVTALFLSGGSTLIDEPGYEYANGLERSGEIPEVITVTVLGADSRTSATYCVSGKNELLGILSNPVSEPYKSHTA

SEQ ID NO: 28347 - protein, 401 aa, Debaryomyces hansenii CBS767
MSSVYIVSTARTPIGAFQGGLSSLTYSDLGSHAVHAALKKVPQIKAEDVEEIIFGGVLQANVGQAPARQVALKAGLPESIVATTVNKVCASGMKSIILGAQTILTGTADIVVAGGAESMSNTPYYVPSARGGARYGDAVMVDGVQKDGLLDVYENKLMGVAAEKCAKDHSFTRDDQDNFAIGSYTKAADAQNAGKFDNEIAPVTIPGKRGKPDVVVANDEEIKNFDEPRLRSARAVFQKENGTVTAPNASSLNDGGAAVILVSEKKLKELNLKPLAKISGWGEAARAPIDFTIAPSLAIPKALKHANLSMDDIDFFELNEAFSVVGLANAKICNIPSKKLNVYGGAVALGHPLGCSGARIVVTLLSVLAQEGGKIGVAGVCNGGGGASSIIIERFDHDSKL

SEQ ID NO: 28348 - protein, 662 aa, Debaryomyces hansenii CBS767
MSGPRKIQELTGSSSRRLSIAKLARSPISESPITSPSIRNGIHSHSFTANSPFLKEDSSRNYNECIESSSSKSSSKYNGSEVFHSGNEVADIPTLNGVETDFSTGMDDPKIMKQVHKHLRDQEVNALQMEGGDITRDLYKIADQEYRPKAPKRSRSLSSSEMETRRRGSTASSLNVPGGFRRQFIMNNTLRTRNPNFLTKNFVEFLSIYGHFAGEDLEDQNDLIACHYKAHIPNFDDSIDEESLLLPNQESVKINAKGTATDKKAYFLLLKAFIGTGVLFLPKAFSNGGLMFSSLVLAFFGLLSFWCYLILIHAKLATKVSSFGDIGLKLYGKWLQQLILTSIIISQIGFVAAYIVFTSENLKAFVGSVTSINTSDIHIMYFILIQLIIFLPLSLIRDITKLSLLALLANIFILIGLVTILYYSFYELLFLNHGAFGKDIEFFFNKESFSLFIGVSIFAFEGIGLIIPIQESMIYPNNFPRVLFLVIATISTIFIGIGSLGYLTFGKYVKTVIILNLPQDSPFVIMVQLLYAFAILLSTPLQLFPAIRLVELKLFTKTGKYSLRVKWLKNFFRFGFVLLTAVVALVGGQNLDRFVSFVGCFACIPLVYMYPPILHLKSCCKYSDTFNQAENRKRFWLGCLDCILVVIGGVAMIYTTYQIVVG

SEQ ID NO: 28349 - protein, 574 aa, Debaryomyces hansenii CBS767
MDDSYSTNNEAALAVVATSMKKARLPIEVLIVNSFMGGLLFSTGGMIFDVLESYNPGLKESNPGIIVLLQGFAYPIGLFYVVITGTDLFNSNILFFSVGLVRGAVSILDLIISWLVSYWINLVANIFVCYVICHFSHISQKEDFVKGSIEALMQKASFSFVDNLIKGMAGNFFVCLGIYLQIMVRPVHVKFLMLLLPIFSLVSIGFTHSVADMYIVLMGLINHAPISVGKVAWKIMLPGALGNIIGGSFFGIVIPWYLHLYSVERDQRKLNLPEYDARDEQPQINSDSRVVKNRSRTITEEFEEVPESLMKTEKRESSSLSSENNVSVAPPEQLVDNFSGYPENLIKISSRASGASRFSVGNARYAAKSPKNVFPVYGMAPPSERERSIASGMNVNTIDEDLDSIHTARTEFQNDDDSTTATYIGDHVKKFLSNLTVNKQHKDIESQNQDRPPVIRSHSTQSYHAMNRSHSRPHAIGINQFLQRSHEFANRPTSRAAATVDAVPLSTNLTTATRNTEPNNVDNIGSIPFTQPENISPGQSINSEFQTNNSTPPVQSSDQSSFNIVNYQPKSHEN

SEQ ID NO: 28350 - protein, 112 aa, Debaryomyces hansenii CBS767
MSTSKTGKHGHAKVHLVAIDIFTGKKLEDLSPSTHNMEVPNVGRREFQLLDIDDGFLSLMTNDGDTKDDVKVPEGELGDKIQSEFDEGKDLLVTIVSAMGEEAAISFKEAPK

SEQ ID NO: 28351 - protein, 794 aa, Debaryomyces hansenii CBS767
MASEEELINLFSKVGFNDKKSKEVCKNKKVSQSLAEIINESKVEETDEKKLSLLHALAVESKGGDVPRRELITKAIIDGRLKTNLQVTEAFKYVKENPETANNETMEEKSGVGIELSDSDVEREIKKYMEAHKSDIETKRYSIVPSLLGDVKKVPELKWAKPNLFKPIIDSLVLEMIGPKDERDVVKKEKKKLTKKQVETKKEAQIERSMFSEGFLGDLHKPGENPQKYPELMKEHLEFTKRKVFTRFPPEPNGYLHIGHSKAIMVNFGYAKYNGGNCYLRFDDTNPEAEEEVYFKSIEKMIDWLGYEPWKVTHSSDYFDELYDLAERLISLGKGYVCHCTAEEVKAQRGLKEDGTLGGERFACKHRSRSVEDSMAEFRKMKNGEYKSGEATLRMKQDLESPSPQMWDLVAYRVLNKPHHRTGDKWKIYPTYDFTHCLVDSFENISHSLCTTEFRLSRESYEWLCDELHVYRPAQREYGRLNITGTILSKRKIAKLVNEGIVRGWDDPRLYTLEAIRRRGVPPGAILSFINTLGVTTSTTNIQAVRLDSAIRAFLDQTTPRLMMILDPVEVEVENLPEGYEEMVEVPYKPGDTVKFGTRKVPFTKRFYIDRSDYRDSTSDDYFRLAPGQPVGLIRVPFNVSVKDVVKDDAGKVTKIIAHYDNDGTFKKPKTYIQWVPKSASSPIKVNEVRIQNQLFNSENPSAHPDGFLNDLNEQSEEIYRDAIVESAFTEIKEKSPLNIPIEGSEFNIKEKPSVETVRFQALRVGYFCMDKDSSADKLVLNRIVTLKEDSSKN

SEQ ID NO: 28352 - protein, 265 aa, Debaryomyces hansenii CBS767
MAKSRFEYVKQFERENFLLPDTYLIVRVDGKGFHKFSEEYEFSKPNDIRALKVMNNAAKNLMAQFPDIMMAYGDSDEYSFLLRRKCSLFERREMKLVSTFASFISVNYLYEWNLEFPEKQIRLERLPTFDARIVVYPTIKHIRDYFSWRQVDCHINNLYNTTFWTLVIKGGMTGREAENKLLGTVSSDKNEMLFKEFGINYNNESEIFKKGTILVREYDYTREGDDLSKRQQQRVEKQRKKALIEEYHLDIIGDTFWNERPWLLE

SEQ ID NO: 28353 - protein, 581 aa, Debaryomyces hansenii CBS767
MNSLHYQVLTSIEDVWTIINSLYMIYCTSLLPLAMIGIALFYSGLTQRRSSLTMLALPVFLTPFILIEWFIWGYSLCYSSSSNHFIGDLNFAVLRHMRDSVTNNYNTPRGEIWLINHFLFNGFMKVICVCLTFPGCIAERGRILPMVVFLFFWSVIIYNPVTYWFWNREGWLSVELNSLPVLDFAGGNCVHIVSGFTALAYSYILGPRNPKILYDYRSTNTGYIIIGTFFMICGWCGFVAGCDYKFTIECLYIILNVLLCASTSGIIWMLIDYYFSAIPLEGAPIESALSNHRDKIHVLRISSTNIRTIPSVTGASINQHYHDTKSNFVQRRKISIISFSSGIVTGLAVITPGGGYVSSPTDFWKSFVFGVLGGIIVNLSTRLKYFVQIDDALDIFAIHGVAGILGSLLTGIFANQRYNSKGGWVKGHWIQLGYQLLGCTVTAAYVFVLSCVFLYCIDLIPGLHLRMDKTFNQRMREERERVQAESTESPTSVDIEEQFVPHNTNEITYLEKLELLGTDCYEFNGEYFMDFMEFIKVIRPQDYPFDQFTEETETQYDSVNAIGSDYQLHPEGVNHLARKGE

SEQ ID NO: 28354 - protein, 865 aa, Debaryomyces hansenii CBS767
MHRPDNSSSRTHVSPSRSNTRSDPNMRRATSQSPSIRHISQRKVNTLERKPLLDRANSDMVDYQAAGNIPPSRSLLLSDIYRDDVESIVYNNAASDASCNEGHKRSSLTHAVTNEDMQSTRSEYLMGMNLNRENLSWKVVLPYYLPFLSWIHHYCPSFFVGDLVAGLSLVFFQLPLSLSYATSLAHVPVICGLYSLAISPLVYMVFGSVPQMIVGPEAAILLIVGQAVEPLLHHYKKKHSEKLDPVELVVAITFISGASLLGFGLGRFGFLDNVLSASLLKGFISGVGIVMAINSTIVMLGLTELLQEITEDPTKMDIHSPFDKMRFLFQHYKQFHILTFKISIIAFIVILLCRVFKNFMSKKNSNLLKKCVYLPEILFVVIVSTSLCAVNRWDEKGIEIIGKVTDISSSQILHNPVAVERWYLIKKLSTPGFLCAMLGFFESTTALKSLGSRYDLPISSNRELVALGAMNILVSIFGGLPAFGGYGRSKINAISAKTTMLGAIMGLCTIFTISYLLDALYYVPKCILSAITAVIGILLIDEAPHELWFHWKSKGYNELITFFITVMTTLFFSMEAGIAVGLVYLLIRVIKHSALSRIQILGRISGSDTFVNADVSHIPPNIGLLSDDVKHSHLPLNMFTDNNFTHLNLKVIEEIEGCLIVKIPEPLTFTNTSDLRGRLKRVEMYGSTKAHPAQRRTRDVTMTKYVIFDLNGMTGLDSSAAQILKELIKRYTNRNIYSFFVRVNDEEKLRYRLENTGITKLLAEVLESIKNNDDQNTFMFNKIKDNRKVSGLQRENSDILHPDMDEHMDIYNLTENSHTPYFEHISDVLKVIDYYEINDQLQSRNEFLDVDQAERRSSLPSVDIA

SEQ ID NO: 28355 - protein, 248 aa, Debaryomyces hansenii CBS767
MTSLHHPVNDSTGYYEDQVPAPTYYNPHTNNQPHQIIDNLDSAPNSNSSTSYYGGEQQINQEQPVPSNNYEGQASQTPTNSQFFQGSPDSQSHQSQHNSPNNNSTTIAQPPTEQPFYVNAKQYHRILKRRIARAKLEETLKIARTRKPYLHESRHKHAMRRPRGQGGRFLTAAEIAEKERLDKLKALEDKEKIDNFNGDQPQEEQSDSSKSSTTPTTEKTTSNAGNVASNEDDSIFQNLINENGSTED

SEQ ID NO: 28356 - protein, 438 aa, Debaryomyces hansenii CBS767
MKVLNILTILFIATTTTANQLHSDPFSDNVVYFDTHLAEREPNLKDMWDDLWPFQGINTFAHLEHNKCLLDPDQEYDIGIIGVPFDTATSYRPGARFGPRAIRSASQRQTSLRGYNQRADFNPYTSWAKVIDCGDMPVTPMDNSLAFKQMNKGFEELIARRNSKNSTVTPPRYIALGGDHSVLLPHLRALHEVYGKINILHFDAHLDTWGPDKYPSFWHSKQAELNHGSMLWKANKECLTSEHNVHAGVRTKLSGIEDYVDDDSQNFTRITADDIWIKGVQYVVDKILETIPPDTPTYLSVDIDVLDPAFGSGTGTQEPGGWLPRELIHVLRSIENLTIVGADIVEVSPAFDTAEITATNGAQVVFEILTSMVKKGSVGHLVKNNNPKELLEVKSKNDGKSTQYLDKQEINRLIENKLQEFENIKFNLLSEIEQLRST

SEQ ID NO: 28357 - protein, 525 aa, Debaryomyces hansenii CBS767
MTISSVTTGILNRRKLFTANEDYKESDILLFSIASSLIWIMIPGLAFLYSGLARRKSALSMIWIVLMSSFIGIFQWYFWGYSLAFSDKSANNFIGDLHFFGFKNLLGSAEGTPDYPEIAYALFQMQFLLVTLAILAGGCIGERGRFLPTAIFLFCWATVVYCPVVYWIWGGGWASQWQGGALDYAGGGPVEILSGVSAFVFSAFLGRRNETLMINYRPHNISTICMGTSLLYVGWLFFNGFSCGNASIKVPYSMFNTHLCGAFGAITWCLLDFRLENKWSMVAVCSGCISGLVAATPSSGMIPLWASVILGIVSGIVCNFSTKIKYLCRVDDSLDVLAEHGIAGIVGLIFNALFGSSTVIGYDGVTVHAGGWIDHNYKQLYIQIVYILATAAYAGGVTAVLCFVINKIPGLHLRIDYNAEEIGMDEDQIGEFAYDYVEVRRDFLDWGNPNVNPNAQMSRPSQEVMEGIPPNPQVFQAVGSSSVSTAHQDDSSIQEKLDSQNHDSQVPESQNYNTASDTKEDVIEE

SEQ ID NO: 28358 - protein, 320 aa, Debaryomyces hansenii CBS767
MSTNSIKLLASDVHRGLAELVAKRLGMKLTPSELKRDSTGEVQFSIGESVRDEDIFIICQIGSGEVNDRVIELLIMINACKTASARRISVILPNFPYARQDRKDKSRAPITAKLMADMLTTSGCNHVITMDLHASQIQGFFDVPVDNLYAEPSVVRYIKETINYKDAIMISPDAGGAKRAAGLADRLDLNFALIHKERARANEVSKMVLVGDVTDKISIIVDDMADTCGTLAKAAEVLLDNGAKEVIAIVTHGILSGNAIKNINNSKLTKVICTNTVPFEEKLLLCPKLDTIDVSAVLAEAIRRLHNGESISYLFKNAPL

SEQ ID NO: 28359 - protein, 104 aa, Debaryomyces hansenii CBS767
MVSQHTTDKVQQLIKTKPVFIASKSYCPYCAKTKNTISSITKDAYIIELDEVEDGSEIQEALYELTGQKTVPNVFIGGEHIGGNSDVQELSSGDKLESKIKAVL

SEQ ID NO: 28360 - protein, 343 aa, Debaryomyces hansenii CBS767
MLSKQLRGLSILRNNRARCSLINGVRQISSGNSPLSATTSDPSGVHTATIVEPPVVAPPSGSTITLKSATRDDSKFGTRPIYLDVQATTPTDPRVLDRMLEFYTGLYGNPHSSTHSYGWETDKEVEKARKYVADVINADPKEIIFTSGATESNNMAVKGVPRFYKNTKKHIITTQTEHKCVLDSARHMQDEGFEVTYLPVNEEGLISLDDLRKSIRKDTSLVSIMAVNNEIGVVQPLKEIGKICRENKIFFHTDAAQAYGKIDIDVNEMNIDLMSISSHKIYGPKGIGACYVRRRPRVRLDPIVTGGGQERGLRSGTLAPPLVAGFGEASRLMKEEMDVCIFV

SEQ ID NO: 28361 - protein, 794 aa, Debaryomyces hansenii CBS767
MKFYIDDLPILFPYPRIYPEQYAYMCDIKKTLDVGGNCILEMPSGTGKTISLLSITVAYQMHYPEHRKVVYCSRTMSEIEKALIELHNLMKFRAEQLGYVEEFRGLGLSSRKNLCLHPTISKERKGIVVDEKCRRVTNGQLKKKIENGLINTEQTQDPEANALCSFHELLNEMDQHNLIPAGVYSFDALINHCKEVGTCPYFTVRRMIPFCNIIIYSYHYLLDPKIADRVSKEISKDSIIIFDEAHNIDNVCIESLSLDLTDDTLKRATRGANKLGDAVDDMKSQDSEKLQNEYEKLVEGLRQAEIARDEELFMSNPTLPQDLLDEAIPGNIRKAEHFISFLKRFIEYLKTRMKVLHVISETPISFLQHLKDLTFIDRKPLKFCSERLSLLVRTLELSEIEDFTALKDIATFATLVSTYDTGFQLILEPFETEGSTVPNPILHFTCLDASIAIKPVFERFSSVIITSGTISPLDMYPKMLNFQTVIQESYTMTLARRSFLPMIVTKGSDQVSISSRFEIRNDPSVVRNYGSLLIEFAKIVPDGMVVFFPSYLYMESIISMWQNMGVLDEVWKYKLILVETPDAQETSLALETYRKACSNGRGAILLSVARGKVSEGIDFDHHYGRTVLMIGIPFQYTESRILKARLEFLRDHYQIRENDFLSFDAMRHAAQCLGRVLRGKDDYGIMVLADRRFSRKKNQLPKWIAQALNDSDTNLSTDMALANAKKFLRSLAQPTNPNDQEGVSVWNLEQLEKFQREHQHQISAAEEKPKQENGNDNEEDDEFMDIDDDDLALL

SEQ ID NO: 28362 - protein, 878 aa, Debaryomyces hansenii CBS767
MTNALNEIENMSAFPSDGKTVSPKDYANNDKLKLSGRIINVMTLLPTQIVKKTNKSGNDNWDVEPVRGNSALYSSQFFLAQQTDWESHLVGWTGELINKSSNSKSIINENITDDPLYLNKEDKTSLEGKIRDANKSAHIHPVWLLRRDQERWRNYAENVLWPVFHYIQGEPSDGKDEASSWHDYVKFNEAYCQKIISIYKPGDVIWIHDYYLLLLPQLLRMEIPNAIIGLFMHAPFPSSEYFRCLSKRSHLLDGMLGADKIAFQSEAFQRHFSSCCTRLLGCEISKDKLMAYGSAISLETLPIGIDTKKIEYDAFSSDSGIEQKVRALGEIYADKKIIVGRDRLDTVRGVVQKLQAFEMFLQMYPEWRDKVVLIQVSSPGYSHSAKVEQKVTELVHHINSEYGDLNSTPILHYQKRINKDEYLALLRVADLALITSVRDGMNTTSLEFVLCQKENYSPLILSEFTGTASVLSEAILVNPWDSVGIAKTMNDCFYMSKDKKRALEERLYKQVTSNTIQNWTSNFITHLIDHVNNTHQTHYTPALNRPLLLNNYENSHRRLFLFDYDGTLTPIVKDPAAAIPSSRLNAVLDILSSDPKNQVWVISGRDQAFLDKWLGSKNIGLSAEHGCFLKDIGSTEWSNLSASFDMSWQTKVKEVFKEYTEKTPGSNTEQKKVALTWHYRRSDPELGKYQAEKCLKFLKETVATEYDVEVMPGKANIEVRPNFVNKGEIVKRLVLNPHGAKQIPHVVTNYNKDVPVDELPDFILCLGDDFTDEDMFKSLKDIEAEWSLKDHPTNQYGSHGVYPVAVGPASKQTIATSHLTEPSEVLETLGLLSGVVSLFESAGSVSLDDRGHLENSTSSNKSKSAIKEATKKEGSKSC

SEQ ID NO: 28363 - protein, 1531 aa, Debaryomyces hansenii CBS767
MGRYRDRNRETDENDDTNRQATMTTTLVQQHSRQSLGKFVNPSPTKYESTENMDKVVQSVTNATKRLSQISTNTNSSAKKRKTQNRIGPWKLGRTLGRGSTGRVRLAKNVNSGKLAAVKIVPKSNFKKLENPKYKRNSVDSSGSVKDRLPYGIEREIIIMKLISHPNIMGLYDVWENKNDLYLILEYIEGGELFDYLIKKGKLQEFEAISYFKQIINGIHYLHQFNICHRDLKPENLLLDFNKNIKIADFGMAALEVREKLLETSCGSPHYASPEIVAGKNYHGAPSDIWSCGIILFALLTGHLPFDDENIRKLLLKVQNGKFLMPNNLSSESKDLISKMLKVNPSERITIDAILQHPLLTKYPEPSVRKDKVTEYSDLNIRPIDSINNIDKEILKNLSVLFHNRDEQTIISKLLSPEDCSEKTFYYLLVKYRNEHLTASNNTINNYEDDPDLTGSESKQTITRSTSIVKTTTTDPLTGEKHTTIRKIPNSTSNFSNRSRSPKKKPEVLGNITNTAPTFKASTSFNKKKTLMNNNVISRNNSSKSLRKRPPQQQPPKLSRKISGMPDLNDLRLEKTQLNSLYKQQKLNGSFGNKSLFNFESVCQEIFGNAEQHEGDRKIEPKENLRKDKQMDGRTGKLSNIEKCERELAAKVHEKNDARALKLQHQQKEEDAKLQHKKQLESKKRDQSKLLQEKQRQALEKLGSQIQDNNDNNRRGIAHRTQQRHVTEPAPTSSLDPKLGGGAKSLLRAKSLASPSSYVSLRQNTHTSDNTSKVLQTLGIEVAPLKTSTKFNSNLKTSSSKNLSDYLDNETLYSRSDKSIEHQKENISMNKFNEKEKVNQSIAKPNYSRTSTSKLQPLAISRTTTLNSIGYRSLLDGIDENKVQKDLPKRPNGEKDYDTTLSTIETRKNGLIPNPRFSRFSFNGLLNSRFDNPDVTIQNNLVSSGTVVRKSVNQKEPISSRIIEEDPQTSHLKLETGSLKKSSTNLLGLGIVQNHQGKTSRKVSQNSEYCDSNFISVNLSDTADDSQDNTTLEENAISLSHANSVLKDDHANTTVSNTTISKQQEVLNTNVDQRNKRKSSYLGNLEGSKETLVENDKEDKSFQDSIKSMYKDYAKLYNDKKPKSETNTQELGETDDNIPSEKQTRERQSILRDDRINSIDSDNDLSFAADGSSNIDILDSSSIADTNMIENRSEIQLNDNKYSPTITDNQKDFGDEYEDEIDDQFSQHGDQQEYNHEYDHENNHEYNQEDGQEQHEHDHNQQNDQQLQDSDRLQTGTDLRKSTASTQIFSTMNLPKIRDKNSVVEENKEIKHSEVKSEESNQRHNSIFNKLKPKREAPKPPGFKWDDEKSQGHNRFSRISVSSKFDKQQKLNDNYNDSSKSNWFMKFINSLTANSKTPKGEKRKSLIRKFNSDKLDDNETKNFCVLDSTLQSSELTRVIKDTLELKKIEGSVSKVDIDEDFGMISGVIPARYSGGRRLRFKIEIINLKNSSSLHLSKLKGTDKGFKNLTNTVKFIVSKEEQNINRMSSVEA

SEQ ID NO: 28364 - protein, 589 aa, Debaryomyces hansenii CBS767
MSDITLGKYLFERLKQVEVSTIFGLPGDFNLTLLDKIYEVEGMRWAGNANELNAAYAADGYSRIKGLACLVTTFGVGELSAVNGVAGAYAEHVGLLHVVGVPSISSQANQLLLHHTLGNGDFTVFHRMSKNISHTTAFLSDSETAPAEIDRCIRDAYVYQRPVYLGIPANLVDVTVSSSLLEKPLDLSLKPNNAEAEEEAVELTLKLIEESKNPIILVDACASRHNCKQETKELVEITQFPVFTTPMGKGTIDEGGVGGLLEDDPSSIEKVKKKLDYGNSVSSRFGGVYVGNLSHPEVKEAVENADLILSIGSLLSDFNTGSFSYSYKTKNIVEFHSDYTKIRQATFPGVQMKEALQHLLKKVGQAALKYKPQPVPKVKLINTPASRDSKLTQEWLWTRVSSWFKEGDIIITETGTSAFGIVQSRFPNNTTGISQVLWGSIGFTVGATLGAVMAAEEIDPAKRVILFIGDGSLQLTAQEISTMIKWNTKPYLFVLNNDGYTIERLIHGENATYNDVQPWKNLDLLPLFSAEDYDAIRISTIGEAEDIFRDKEFEENTKIRMVEVMLPRMDASTNLIKQAEYLAKTNAAN

SEQ ID NO: 28365 - protein, 370 aa, Debaryomyces hansenii CBS767
MVSITEQTAILAKYLDLSQNGKVLAEYVWIDADGNSRSKCKTLDKKPSSVEDLPEWNFDGSSTGQAPGHDSDVYLRPVAFYADPFRKGDNIIVLTECWNNDGTPNKFNHRHESAKLMKAHADEEVWFGLEQEYTLFDQFDQPYAWPKGGFPAPQGPYYCGVGTGKVYARDLIEAHYRACLHAGVDISGINAEVMPSQWEFQVGPCEGIQMGDELWIARYLLQRVAEEFGVKVSFHPKPLKGEWNGAGCHTNVSTKSMRLPGGMKSIEVALSKLAKRHKEHMLLYGADNDQRLTGRHETASIEGFSSGVANRGASVRIPRSVAKEGYGYFEDRRPASNIDPYLVTGIMVETICGSIPDADMFKEYARESSD

SEQ ID NO: 28366 - protein, 535 aa, Debaryomyces hansenii CBS767
MLSIKNAYASISFRRGFSKTICCGNKQNLESNINDQWLNDLEGSTEEEIPEPDCVISKVSESDNDQSKVNYLDNIKYKLLGVDSKGLSDIQMTLKDYFMGNEHHTHNVFHGFSKFKQARKSEQRTFIDLKLIRVKSGKGGNGSASFFRDAFRPMGPPDGGDGGYGGNIYVNAVNNITSLHKVKRSYEARDGTQGMGKQLDGKNGEDVIIEVPVGTTVRWVPDPLELRKYLQETQQDLDQINLNIKGTGLKNDYIQFFRESFKPGEGWIFKEKEEDYFLERKFFNDLNEKVKEYDTEIIKEELYEDNFPMMGIDFDKPTSKPVLLIKGGKGGMGNMHFLTKDIRNPKFCKMGRAGLTKFFLLELKLIADLGLVGLPNAGKSTLLRAISKARPRVGHWEFTTLQPTIGTIFTSIDKDPFTVADIPGIIKGASENKGMGLDFLRHIERSGGLVFVISLESKDPIKDLMTLINEVGPKRMSAKKILVVATKADLEQKIDKYNDLRKFIESQDWKIVPVCAIRGENIEKCIKMMSETAHK

SEQ ID NO: 28367 - protein, 403 aa, Debaryomyces hansenii CBS767
MTIVTPVIYQIRELTPREKELIKASVPILEESGDVLTSKFYNHMLTDFPEVKPFFNESNQKTMKQPKILAFALLHYAKNIDDIAPLTAFVNQIVVKHVGLQVKPEHYPIVGQCLLDTMETLLGPEIATEEFLTAWATAYGNLAQILINAEAEKYKTMEWDGFRGFKITRIENESRNVKSVYFKPADGGKIAMPKRGQYVCIRFKLPDSDTEKSREYSLSQYPSSDEYRISVRLLEGGQISPFIHNGLQVGSTIRVSPPAGQFIYRESDVAKPVVLFVGGIGITPLVSITEKALESGRQVYMLNSNRQVETRPFAKWLQGLKEKYGDKFKLIEFISNESDSGLHAIDKLESRRLAAQDFDFVKPNFDYYMLGPNPYMNFVKGELLNRGVEESEIASEFFGPMEV

SEQ ID NO: 28368 - protein, 401 aa, Debaryomyces hansenii CBS767
MAINTPVIYKIRELTPREKKLIKASIPILDEDVLTSKFYNHMLTDFPEVRPFFNETHQKTMKQPRILAFGLLHYVKNIDDLAPLTTFVNQIVVKHVGLQVKPDHYPIVGQCILDTMKTLLGDRIATEEFLTAWATAYGNLAQTLINAEADKYKSNEWDGFRDFNISRIVNESKNVKSVYFKPVDGGKIAIPKRGQYVCIRFKLPDSETEKGREYSLSQYPSSDEYRISVRLVEDGQISPFIHNGLQVGSTIRVTPPAGQFVYREANSDKSVVLFVGGIGITGLVSITEKALESGRQVYMLNSNRQVETRPFAKWLQGLKEKYGDKFKLIEFTSNESDSGLHAIDKLESRRLAAQDFDFVKPNFDYYMLGPNPYMKFVKGELLNRGIEESAITSEFYGPMEV

SEQ ID NO: 28369 - protein, 175 aa, Debaryomyces hansenii CBS767
KYLDESYTKHKIIPDVVDKFDTQGLLTIEYNEQDHVALGNTLKVENTQHHPVIQFTLNSPGQENDFEISNNDKFTLVLTDPDAPSHKDHKWSEYAHWIVTDLPLNANSNDVESAESLTTVLDYSKGKELLSYQGPAPPPKTGKHRYVFLLFREDPSVSKFETPKDRPNWGIGIES

SEQ ID NO: 28370 - protein, 198 aa, Gossypium barbadense
MCGGAIISDFVAPKYDRKLTGDDLWSELDIFSDLLGFDNNGKSFVNHQFHNNNNNKLINPKDNQLNKERSETIQKTSQVTKKVEKTQRTRKNFYRGIRQRPWGKWAAEIRDPQKGVRVWLGTYNTAEEATRAYDEAAKRIRGDKAKLNFPQTPTKNQAASPALTLLPPAKKRCIVPGVNSTEFTRLDSPPISLWVLGV

SEQ ID NO: 28371 - protein, 319 aa, Gossypium barbadense
MSNVYLWFMYPYDIKFFFLCSIIEGSNSEKSMQFDGQAEKCAKRKRKNQYRGIRQRPWGKWAAEIRDPRKGVRVWLGTFNTAEEAARAYDAEARRIRGKKAKVNFPNETPRTSPKHAVKTNSQKPLSKSNLSPVQLNLDQNYNYLSQPEQEYFDTMGFVEEKPLVNQFAYVDPVPTSIDAGSNQSDNAPLYFNSDQGSNSINCSDYGWGEQGARTPEISSILEASVVGEEFLEDANPSKKLKPSSDNVMPAEDNSAKTLSDELLALDNQMKYFQMPPFIEGNWDATIDAFLNGDATQDGGNPMDLWNFDDFPTMAEGVF

SEQ ID NO: 28372 - protein, 772 aa, Schizosaccharomyces pombe
MKFYIDDLPILFPYPRIYPEQYQYMCDLKHSLDAGGIALLEMPSGTGKTISLLSLIVSYQQHYPEHRKLIYCSRTMSEIDKALAELKRLMAYRTSQLGYEEPFLGLGLTSRKNLCLHPSVRREKNGNVVDARCRSLTAGFVREQRLAGMDVPTCEFHDNLEDLEPHSLISNGVWTLDDITEYGEKTTRCPYFTVRRMLPFCNVIIYSYHYLLDPKIAERVSRELNKDCIVVFDEAHNIDNVCIESLSIDLTESSLRKASKSILSLEQKVNEVKQSDSKKLQDEYQKLVRGLQDANAANDEDQFMANPVLPEDVLKEAVPGNIRRAEHFIAFLKRFVEYLKTRMKVLHVIAETPTSFLQHVKDITFIDKKPLRFCAERLTSLVRALQISLVEDFHSLQQVVAFATLVATYERGFILILEPFETENATVPNPILRFSCLDASIAIKPVFERFRSVIITSGTLSPLDMYPKMLQFNTVMQESYGMSLARNCFLPMVVTRGSDQVAISSKFEARNDPSVVRNYGNILVEFSKITPDGLVAFFPSYLYLESIVSSWQSMGILDEVWKYKLILVETPDPHETTLALETYRAACSNGRGAVLLSVARGKVSEGVDFDHHYGRAVIMFGIPYQYTESRVLKARLEFLRDTYQIREADFLTFDAMRHAAQCLGRVLRGKDDHGIMVLADKRYGRSDKRTKLPKWIQQYITEGATNLSTDMSLALAKKFLRTMAQPFTASDQEGISWWSLDDLLIHQKKALKSAAIEQSKHEDEMDIDVVET

SEQ ID NO: 28373 - protein, 247 aa, Gerbera hybrid cultivar
MGRGRVELKRIENKINRQVTFAKRRNGLLKKAYELSVLCDAEVALIIFSNRGKLFEFCSTSNMLKMLERYQNCTYGSMEVDRSTPNAEQSSYKEYMKLKAKYESLQQYQRQLFGEDLGPLSLKELEQLERQLDSTLRQIRSIRTQSMLDRLSELQVKERMWVEANKALQNKLEEVYAENQAGPSWAAGEHHSSYGQEHQHQHQSQGFFQPLDCNSNLQIGYNTVDSSHITASTNGQNLNGLIPGWML

SEQ ID NO: 28374 - protein, 247 aa, Gerbera hybrid cultivar
MGRGRVELKRIENKINRQVTFSKRRNGLLKKAYELSVLCDAEVGLIIFSSRDKLYEFGSVGVMKTLERYQRCCFNPQDNNNERETQSWYQEVSKLKAKFESLQRTQRHLLGEDLGPLSVKELHNLEKQLEGALTQARQRKTQIMVEQMEELRRKERELGDMNKHLKIKVSHELSTFDAEGQGYRAQLPCPWNSGTNNTFTMHPSQSNPMDCQQEPILQIGYNQFMHGEGSSVQRNMVGENGIHGWVL

SEQ ID NO: 28375 - protein, 1612 aa, Oryza sativa Japonica Group
MATLPRAAAAAAPSPAAALLPLPRAAPLLAGRAAARSAARRLRARGTRAPPLAAARRGWGGVSPRAVLDLPRRREAAEKPAQKAADLNEILSERGACGVGFVANLKNEPSFNIVRDALVALGCMEHRGGCGADNDSGDGSGLMSGIPWDLFNDWANKQGLAPLDRTNTGVGMVFLPQDENSMEEAKAVAKVFTDEGLEVLGWRTVPFNVSVVGRYAKETMPNIQQIFVKVAKEDNADDIERELYICRKLIERATKSASWADELYFCSLSSRTIVYKGMLRSEILGQFYLDLQNELYKSPFAIYHRRYSTNTSPRWPLAQPMRLLGHNGEINTIQGNLNWMRSREATLQSPVWRGREHEIRPFGDPKASDSANLDSTAELLLRSGRSPAEAMMILVPEAYKNHPTLSIKYPEVIDFYDYYKGQMEAWDGPALLLFDGRTVGACLDRNGLRPARYWRTSDDFVYVASEVGVIPMDESKVVMKGRLGPGMMITVDLQTGQVLENTEVKKSVASANPYGSWLQQSTRSIKPVNFQSSVAMDNETVLRHQAFGYSSEDVQMVIETMASQGKEPTFCMGDDIPLAVLSQKPHMLFDYFKQRFAQVTNPAIDPLREGLVMSLEVNIGKRRNILEVGPENADQVTLSSPVLNEGELESLLNDSKLKPKVLSTYFDIRKGLDGSLDKAIKVLCDEADAAVRNGSQLLVLSDRSEALEPTRPAIPILLAVGAIHQHLIQNGLRMSASIVADTAQCFSTHQFACLIGYGASAICPYLALETCRQWRLSNKTVNLMRNGKMPTVTIEQAQRNFIKAVKSGLLKILSKMGISLLSSYCGAQIFEIYGLGQEVVDLAFCGSVSKIGGLTLDELGRETLSFWVKAFSEDTAKRLENFGFIQSRPGGEYHANNPEMSKLLHKAVREKSDNAYTVYQQHLASRPVNVLRDLLELKSDRAPIPIGKVEPATSIVERFCTGGMSLGAISRETHEAIAIAMNRIGGKSNSGEGGEDPIRWSPLADVEDGYSPTLPHLKGLQNGDTATSAIKQVASGRFGVTPTFLVNAEQIEIKIAQGAKPGEGGQLPGKKVSAYIARLRNSKPGVPLISPPPHHDIYSIEDLAQLIYDLHQINPKAKVSVKLVAEAGIGTVASGVSKGNADIIQISGHDGGTGASPISSIKHAGGPWELGLSETHQTLIQNGLRERVVLRVDGGFRSGLDVLMAAAMGADEYGFGSVAMIATGCVMARICHTNNCPVGVASQREELRARFPGVPGDLVNYFLFVAEEVRATLAQLGFEKLDDIIGRTDILKAKHVSLAKTQHIDLKYLLSSAGLPKWSSSQIRSQDVHSNGPVLDETILADPDISDAIENEKEVSKTFQIYNVDRAVCGRVAGVIAKKYGDTGFAGQLNITFTGSAGQSFGCFLTPGMNIRLVGEANDYVGKGMAGGELVVVPVEKTGFVPEDAAIVGNTCLYGATGGQVFVRGKTGERFAVRNSLGQAVVEGTGDHCCEYMTGGCVVVLGKVGRNVAAGMTGGLAYILDEDDTLVPKVNKEIVKMQRVNAPAGQMQLKGLIEAYVEKTGSEKGATILREWEAYLPLFWQLVPPSEEDSPEACAEFERVLAKQATTVQSAK

SEQ ID NO: 28376 - protein, 572 aa, Oryza sativa Japonica Group
MEATTTDGTTDHAGKPAVRSKSGTWRACPFILGNECCERLAYYGMSANLVNYMVDRLRQGNAGAAASVNNWSGTCYVMPLVGAFLADAYLGRYRTIAAFMALYIVGLALLTMSASVPGMKPPNCATISASSCGPSPGQSAAFFVALYLIALGTGGIKPCVSSFGADQFDDADPREHRSKASFFNWFYMSINVGALVASSVLVWVQMNVGWGWGFGIPAVAMAVAVASFLMGSSLYRHQKPGGSPLTRMLQVVVAAARKSRVALPADAAALLYEGDKLACGTRRLAHTEQFRWLDRAAVVTPTTDKDDDTGSRWRLCPVTQVEELKAVVRLLPVWASGIVMSAVYGQMSTMFVLQGNTLDPRMGATFKIPSASLSIFDTLAVLAWVPVYDRLIVPAARRFTGHPRGFTQLQRMGIGLLISVFSMVAAGVLEVVRLRVAAAHGMLDSTSYLPISIFWQVQYFIIGAAEVFAFIGQIDFFYDQAPDDMRSTCTALSLTSSALGNYLSTLLVVIVTAASTRGGGLGWIPDNLNRGHLDYFFWLLAALSAVNFLVYLWIANWYRCKTITTTEAAAQT

SEQ ID NO: 28377 - protein, 394 aa, Amycolatopsis orientalis
MNRVLSALAPHSSKRISEYAQRHPGTVDLTVGLPAFGPPRSFDERLAMLSSAPHVNARPEDQYAHSRGAIELRAAIAHVYKSEQGVDLDPDTQILVTNGAAGALWIAVLTLTEPGDEVLLADPGYMIYPPMIELLGRRVVRIPTSPADGFRLHLSDLRSRLTQRSRVVLVNSPGNPTGRVSSEDELADLCAFAVEHGLYVVHDEVLDRFAYGIEHRSVVALDHQGVGIAVNGLSKRFGMSGWRIGWLASSSAVIAEAAKAHTFFMLAVSHAVQLAAAAALSDPKADGEVSVYAAEIRRRGEVFLADLARIPGLGKTTVPDGGFYAFVDVGEFARLRGIRVAESTSAAVAEYLLHECGVAVVPGSVFGRAGEGFVRMSFAGSAEQLDRAVKRLAG

SEQ ID NO: 28378 - protein, 404 aa, Emericella nidulans
MASQVQPGQKPKVQPCRYKTGKTLGAGLYSVVKECVHIDTGQYYAAKVINKRLMVGREHMVRNEIAILKQVSTGHQNILTLVDYFETMNNLYLVTDLALGGELFDRICRKGSYYESDAADLVRAILSAVAYLHDHGIVHRDLKPENLLFRTPEDNADLLIADFGLSRIMDEEQLHVLTTTCGTPGYMAPEIFDKSGHGKPVDIWAIGLITYFMLCGYTPFDRETNLEEVQAIATANFSFTPVEYWRGVSQEARDFIKRCLTVNPKKRMTAHQALQHPWINPPYDTTDDLGSGEDLLPNIKKNFNARRTLHKAIDTVRAINKLRENGGLMMDGIMSVDPKPEHVNGSEVVEDRTTPRERENEDAMEIDSRSNARGQTEQQIREQERKVKETVAGLWSRTAPRSER

SEQ ID NO: 28379 - protein, 404 aa, Pseudomonas putida
MKLPIYLDYSATTPVDPRVAQKMADCLLVDGDFGNPASRSHVFGWKAEEAVENGRRQVAELINADPREIVWTSGATESDNLALKGVAHFYQTKGKHIITSKIEHKAVLDTARQLEREGFEVTYLEPGEDGIVTPAMVEAVLRDDTILVSLMHVNNEVGSINDIAAIGELTRSRGVLFHVDAAQSGGKVEIDLQKLKVDLMSFSAHKFYGPKGIGALYVSRKPRVRLEAIIHGGGHERGMRSGTLPTHQIVGMGEAFAIAKQEMVAENARIKALSDRFFKQVSNLEELYVNGSQTARVPHNLNLSFNYVEGESLLMSLKDIAVSSGSACTSASLEPSYVLRALGRNDELAHSSIRFSFGRFTTEEEVDYAAQKVCEAVNKLRELSPLWDMYKDGVDISKIEWAAH

SEQ ID NO: 28380 - protein, 872 aa, Yarrowia lipolytica CLIB122
MSKHTEVFSSEKVSSMDKDDLVDTQVAEVTTSLLDFVALQLEIPPSENDGTYPLEVHFMAEKLEETTLEEAIKIVKTNFAYHDHDNNFRDEYRIEVRELLKVFDGKDDYEKADPDDVLMMRYWGTVFNWWSPYPEVRAVTDPYNDEDCTTETWRVWVLGTVWVAIAAFVNQFFSVRMPAISLGAGVIQLLLYPCGKALQYALPDWGFHFRGKRYSLNPGKWSQKEQLLTTIMVSCASGTPYITSNIIVQYLPQFYNQTWASSFGYQFVFMLVTQMLGFGLAGILKRVAVYPVKAMWPSLLPTLAVNKALLAPNRKENINGWLISRYTFFMIVFIGSFVYFWIPNYLMNFLQTFNWMTWIAPENADLAIVTGSVGGLGFNPIPTFDWNQATASLAPITLPLYVSSIGFAGTFFSGLVILALYYTNNSWTGYIPINSNRLFDNMGKKYNVSKILTNYRFDDKKYHDYSTPYYSAGNLMLYSAFFAVYPLSFVYTCLMDWRAMWDALKDTGKALRYVHRSSYHGREDPFSRYMKNYPEVPDWWFYVVMVIMFALSIVLVKAWPVDTPVWTLVFVLGLVFVFIIPFTVFAAYTASSLSLNVISELIIGYALPGRFMALNLIKALSVTIASQAQNYTTDQKLTHYAHLPPRSIFWLQLWATLVNGLVCLGVIQFQLNLDGICDADNKQKFTCPGETTFFTASVAWGVIGPKKMFDKYPVMKWMFLFGALAGVFFWFVQVILPQILVKYFPNKAQTIDYYRRKILYFNPIIFVVGCLGWAPYNLTYQVGGMYLAVLFNGYIKSRYLAWWRKYAYVMEAAIVTGIALAGIIIFFAVQYHPKDIDWWGNTVIYDGVDGSGIPPRLEIPEKGFFGPPSSEW

SEQ ID NO: 28381 - protein, 573 aa, Yarrowia lipolytica CLIB122
MYSRSGRKKETTTPQHQHQQLQLLYTLLFTLFMEAYHPGDLLSVIHSTMAMMLMCPALGMLYSGLTPHSSALSMAGMNLAALSMAVLQWVVWGYSLALSPTGGKFMGNLRHAGFHHVALEPHPIAFGRLPGLAVAMFEGMFLCITAVIMTGSIVGRGRVVPFVVFIFCWATVVYCPIACWVWGPNGWSGNLGALDFAGGSPVHINSGFTGLAYGIMLRWSRGRKMGQTPVAVPEPHYPHSAMLVMIGTGLLWTGWLGFASEGAFGANLMALMASSNTMIGGAFGGLAWAVLDYRIERKLSMIGFCSGAVSGLVSLSPSSGYVAPWAAIVCAIVGSIACNLATQLKFFIHVEDPLDVFAIHGIGGMVGSLLVGLFAEKEVAKLDGNRDIKGGWVNQHYAQLGYQCAEVFSVAGYAFFVSLVLLFIIDRIPGLHLRMDPEAESQGPDTNQHGEVCYEFLAQLGDDPSPNHPDTDPSNTINGSSPRPSMDGNQFGIYELHAIQSKKVNDAYHFPMHPPMQVNFPPPVSQPQPPSQDATPPPHNEPPPTPMLDFSLGPQQPPRQPLNRTVTSPLLGE

SEQ ID NO: 28382 - protein, 903 aa, Yarrowia lipolytica CLIB122
MKKFTEFVPEGWVPTFHNEPPKNTEKDEVDRFLAEAVEPDLLDIIGNKLNAAVDQDKGYDKNVRYIAQRVGEMTDEEARSILKAFYTVHFDDGNLSSEYKDHITELAKGYPGMGGDPPGPRDPEIPYDDDKDEAPEDYSLEVRFQASLVKYWSPYVEVRAVTDAYDDPNEPCETIRSYFVGFIWMVIGAGVNQFFAFRFPSISLPSNILQLLSYPSGKLLEFILPDWGFTFRGHRISLNPGPWSRKEQMFATFFISGGGTPYITTANIPVQLLPMFYHETWATFGYQTILTLSNQLIGMGLTGMLRRFAIYPAKAMWPMSMPTIALNRALLQPKRKERINGWTISAYLFFFASFCFMFIYFWFPNYIFQALSTFNWMTWIAPNNKNLAFITGSQNMGINPFPTFDWNVITGGAGDPLVVPWSTLLNVYFGVWIGTFAIIGVFFNNVRNTAYLAMNQPGIYDNTGSSYNVSLILNSAGRFVEEKYQAYSPPFWTAGSLVSYGAFFTVYTLGISYCLLQYRRDIWSAMKDLARGVQFWRKDEFRNTHHDNTFVRSMNNYKDAPEWWFIALLLVSFGLAVATVEHWPTNTPVWGIVFVLGLNYVFLIPITMISAYTGSTWSMNVLVEIIIGVALKGRPQALNILKAYGVMIDSEASGMASVWKIGLYTYVPSRAVFRSQIISAVLASFTCLGVLQYQLHLQGICTPAQRFTTKFTCPGLQQFFSASVLFGAIGTERFMTHLYPFLKWCFLLGAALGPFFWFIQTGGPEMLAKWKPQYARKCVQWSRRANLFNPVNACVGIISFAPGNLCYFTGAIYVGALWRFWVRRRYIKWWAKYTYVLSAGFGCGIALSGIIMFFALSYRTGTTKAPEIDWWGNNAPATGFDGQAGPRLDIPAVGYFGPPAPFP

SEQ ID NO: 28383 - protein, 785 aa, Yarrowia lipolytica CLIB122
MVDDVFKRNRSTSASAALTLGPGDDTTTAKDSGKEITFPQRLKSFFKFNNTNSPVANSGNGPDEEIAFPKYDPTPTIHVQGVPGASNTSPPPDDKETKSSFKQRFLRGRSPSTPSTKDTNTPDQHNQHHGSVPTVPDIPSEFAPKLHYPKHLAAHTPEDEAVDPMDSTKPVPVVDEWPVQPAHMSGSASPNSPNFHSPPSSPSPNNNSNNYNYNNNNSSNYGGLGVPGQHPRKNIRRVASEPNVKNAISNSHSHSGGHHQQHLPIIPAGSEDVRLQDLVREEQQHPSDPITDRDRTHSAPLNDGINHGNGSHGQNSRSGSATPQSRSRTNSKSFARTYSSNSIKVCDVEVGPSSFEKIRLLGRGDVGKVYLVKEKKSTKLYAMKVLSKKEMIKRNKIKRAFAEQEILATSNHPFIVTLYHSFQSNDYLYLCMEYCMGGEFFRALQTRERKCVAEADAQFYAAEVTAALEYLHLMGYIYRDLKPENILLHQSGHIMLSDFDLSKQSEQLGAPTIQSSTNVPQLDTKSCIANFRTNSFVGTEEYIAPEVIRGNGHTSAVDWWTLGILIYEMLFGMTPFKGKNRNLTFSNVLKQEVNFPSGSGYQSISSSCKNLIRKLLIKDEHKRMGSKAGASDIKNHPFFKNTQWALLRNQTPPLVPVPSRGADAVNFRTMKDSSSVDFVTDKKQDKSISSVLSVNTDRSSTNSVAGPRSYGREGDYDPFQNFNSVTLHHVGADSEGEDDDGDITITNQDIPHTFQPNPAKSPNMKNSSGFFFGGQKDKLWKTNRT

SEQ ID NO: 28384 - protein, 302 aa, Yarrowia lipolytica CLIB122
MSDFLVDFMMGGISAAVSKTAAAPIERVKLLIQNQEEMIKQGRLSRPYAGIIDCFKRTAAEEGVVSFWRGNTANVIRYFPTQALNFAFKDKFKKMFGFKKSEGYWMWMMGNLASGGLAGATSLAFVYSLDFARTRLANDAKSVAKDGKAAGERQFNGLIDVYRKTIASDGIAGLYRGFGVSVVGIIVYRGLYFGLYDSLKPVVLVGPLEGNFLAAFLLGWTVTTGASTASYPLDTIRRRMMMTSGTGVKYSSAFDCGVQIVKAEGVASLFRGCGANILRGVAGAGVISMYDQMQMILFGKKF

SEQ ID NO: 28385 - protein, 498 aa, Yarrowia lipolytica CLIB122
MVRLTRTKVTKKPATTKAVSKKQSAKTAKVNGVKAAAAKQELEKKTVKEEKPIPAAKAPSRLRLSAIQRKHKHSPTLLPLPSINKVDCEVFAFGTGDMCELGLGPEKASTVKRPRLSPYLSKEIVDIAVGGQHGLVLDSQGRVWSWGGNDLGALGRDTSGHEVLKDMDADESDDEDDPKLNPAESIPALVDTDQRFVKIEASDSLSLALTAEGDVWAWGSFRNSQGTMGFSDKVKVQNRPVKIEELSNIAAIAAGRDHVLALTQWGTVHTWGDSENFRLGWKSNRSTLSPRELGLKNIVYVGAGEFHSFAIDTDGKVLAWGLNQYGQCGILGQSDNAAVDGPTYVDALDGKDIVAVTGGEHHSLALSKDGTVYSFGRYDYHQIGFTTKDLPEGTVRDDKGNPRFLPVPSPLSLGGEDDDEKLPKMRFIACGAHHSLIIDVDGRVWTWGFSSSFQTGHAEEDDVETPRKIMNTAIKPIDVKMAGGGGQFSVVAGVRKEE

SEQ ID NO: 28386 - protein, 564 aa, Yarrowia lipolytica CLIB122
MCGIFAAYKLPDVAEYKTHALQLSKRIRHRGPDWSGNCSKNNTIICHERLAIVGLDTGAQPITSPDESIVLGVNGEIYNHRILRKEFPDYKFKTHSDCEPIIPLYEKYGIDAPKKLDGMFAFVLYDSNKDRIIAARDPIGITTLYMGRSYKNPQTVWFASELKCLVDDCDEIKAFPPGHVYDSDTDKITRYFEPSWWDGSKIPTKRVDYKELREALEAAVRKRLMSEVPYGVLLSGGLDSSLIASIAARETRRAAPEKTVNQDLAGVDEQGHLTNSSGSRLHSFSVGLPGAPDLLAAQKCAEFIGTIHHEYTFTVQEGLDALRDVIYHLETFDVTTIRASTPMYLLSRKIKAGGVKMVLSGEGSDEVFGGYLYFGAAPSPEAFHTECVQRVKNLHYADCLRANKSTMAWGLEARVPFLDKQFLEVAMNIDPKDKIIDKDHIEKYSIRKAFDTSDEPGAEPYLPDEILWRQKEQFSDGVGYSWIDGLKDAAENTITDEQLKNPKPHWGADVPKTKEAYWYRCMFDELFPQPAAATTVMRWIPKADWGCAEDPSGRYVKSHSAHKQ

SEQ ID NO: 28387 - protein, 647 aa, Yarrowia lipolytica CLIB122
MSFPQQVIAPGQRLNELLEAIKQEFDSVTNEASVYRLHKDEFDVKVNQQTSDLGQIRQSVYELEMAHRKMKERYEEEIMRLKSELEARGGPAANPAHSQQQQQQQQQQQQQQQQNQQAQDQQARAAQQQAAQQQALAQQQAAQQQALAQQQAQAQQQAQAQAHHMGGVPPSQGQPPSLLRPSSNVFSGIMSGQPGTSSLAPPQGQPGQPQPGQPQPGQPQPYSGYVGANGYTSSPHNGPPVISAMASPNSKKRQVSTPVPGKASPQVAPQEMQQQQQQQGPPQQQQPPQQQQQSPEEMGNYLGDMDIERVPPELKKQKADWFVVYNQRAPRLLDVDIVQSLDHNSVVCCVRFSADGKYIATGCNRSAQIFDVQTGQLICRLQDDSVDREGDLYIRSVCFSPDGKYLATGAEDKQIRVWDIKSQSIRHVFTGHEQDIYSLDFSRNGRHIASGSGDRTVRMWDIESGQCTLTLSIEDGVTTVAISPDGKFVAAGSLDKSVRIWDTSTGFLVERLEAPDGHKDSVYSVAFTPNGMDLVSGSLDKTIKLWELQAPRGIQANQRGGVCVKTLCGHKDFVLSVASTLDGQWILSGSKDRGVQFWDPRTGQVQLMLQGHRNSVISVAPSPMGGLFATGSGDCKARIWRYFPVNR

SEQ ID NO: 28388 - protein, 455 aa, Yarrowia lipolytica CLIB122
MSEPTLESLQYTINTAYMLVASAGVFVITPGIGLFYAGMLRKNSAMQVIVQSYITTFVVTIQWWIWGYALALGDGSSFLGNLNMAFLKDSNPGPLVEGGPVPSAAYFIFSVFFPVCTVQIFLGSTAERGRVIPAQIIGFLFTTVVYCPLAYWFWAPKGWLLVLGTLDFAGGAPVHIAGGTASLAYAMFLGPRKITPRFHAYKPHNATMSMIGTTLIWYGWLFFNSGTLQAVNTRTAYIMLNTHLSASAAGMTYVIYDKIFHKKFSMMGACEGAIAGLVAVTPSCGYVAPWAAFTGGIMTALVCRLTINVNKWLRVDDAIYSFNLHAIGGCMGSLVTGFFASSTWTDMDGSKDAIAGGWIANHWVQIPYQLAGLGATIGWTFVVTYILCFVVDKIPGLKLRVDEDQELKGMDAYDILESAGETIDGVIVNTTEILVAHTPAHTPDSGSFVRGEKKE

SEQ ID NO: 28389 - protein, 526 aa, Yarrowia lipolytica CLIB122
MSLRNSTTAKRFHSHKTWAGTFWSRPSLYFQPASIEELQAIVTRARDLGKTIMVVGSAHSPSDLTMTSQWLVNLDKLSKAVSFKPHTSGLYTDVTVEAGIRIHQLNEVLKRKGLAMQNLGSISDQSVAGIISTGTHGSSAYHGLVSQQIVSLTIMIASGELLTCSPDENPTLFRAALLSLGKLGIIVYATLRTVPAYTIHSTQHVITFETLIREWDNLWTASEYIRVWWFPYAERCILWRASKSELPLSAPRPSWYGTWLGRLFYETLLWVSVRLWPSLTPSVERFIFSRQYGMEDTLGSGTGSEAVQGSVEGLNMDCLFSQFVNEWGMPLDNGPDVLRALRAKIEAAAKDNIYYVHSPVEVRCSNMSVPDSGDRNVEPNTQEFSASRRGAITGNTLRPLLDINPRDRPYASPHGHVTNSNLTLYINATMYRPFGVNSPVGKWYRDFEGIVAEAGGKPHWAKNFLGPETAELKDNESEDGKMLGLKPIIDEWYGDDLKQWKSLREKYDPTGVFLSGKVWMDRNGLL

SEQ ID NO: 28390 - protein, 370 aa, Yarrowia lipolytica CLIB122
MRSATIFSGSSHPKLVERICANLAIEPSNVDLAKFKNGETSVTIRDSVREKDVYVVQSGCGHVNDNFIELLIMISACKTASAKKVTAVMPLFPYSRQPDVPYTKAIVPPGGKTGGKDSDSTTDLANASGKPRQSGFFKDYNTGYKQWVAQSGTLIASLLTCAGADHIITMDLHDPQFQGFFDIPVDNLYGKPLLQHYISTQIPNYQDAVIVSPDAGGAKRATAIADGLCMDFALIHKERRPTKISGDHIAGKHNATTMLVGDVSGRVAILIDDLLDTSNTITRAAKLLKDQGAVKVYALITHGVFSGDAVEKIKKSEIDKIVTTNSTPQDQHAVELGEKLDVIDISRVFAEAIRRIHNGESVSMLFDHVS

SEQ ID NO: 28391 - protein, 882 aa, Yarrowia lipolytica CLIB122
MKLNVIDAAKHAKDLWMKQDPRDEEDESDVQAEVVEIEEQLIEWMANKLGIPPSDKDGGYPLEVHFMAEKLAEMPIDKALELVKTNYAYHDHDNNFRHEYRMEVKSVLEAFGEGEDPEKEDPDNLILLRYWAVIFHWWSPYPEVRSVTDPYDETDTTVETWRVWVLGTIWVAISAFVNQFFSVRLPAISLDASVCQLLLYPCGRFLQYVLPDWGFSFRGRRYTLNPGVWSQKEQLLATIMVSCAAGTPYITSNIITQALPSFYNQDWAANYGYQFVFMLVTQMMGFGMAGLLKRVAVYPVKAMWPSLLPTLAVNKALLAPNRKESINGWKISRYTFFMIMFVVSFLYFWVPNYLMNFLQTFNWMTWIAPNNADLAIVTGSIGGLGFNPIPTFDWNQATANLAPITLPLYTSITGFCGSLFGGLVILALYYSNNSWTGYIPINSNRLFDNKGKAFNVTRILTNYRFDREKYLAYSTPYYSAGNLVLYSAFFAVYTFSFVYTTLMDWRAMRDAIVDTAKAIRYIHRSNYHGRVDPYSRYMKKHKEVPDWWFYLTMLIMFVLAIVLVEVWPVDTPVWSIVFVMGLVAVFIVPFTVFVSYTATSLSLNVLAELIIGYALPGRFMALNLIKALSVQIAQQAENYTSDQKLTHYAHLPPRSIFWLQIWATLVNGVVCLGVIQFQLGLENLCDADNKLKFTCPSETTFFTASVAWGVIGPKKMFNKYPVMKWMFLFGAGAGLFFYVVQVTLPKFLAKWWPKHAEKIDYYRRKCLYFNPLIFVVGIIDGWAPYNLTYKVGGLYLAILFNGYIKGRYLAWWRKYAYVMEAAIVTGIALSGIIIFFSVQYNPKDLDWWGNNVIGDGVDGSGIPPNKKIPEDPGFFGPDSSQW

SEQ ID NO: 28392 - protein, 194 aa, Yarrowia lipolytica CLIB122
MPLITISAALTEGFKKHEVVPDVIDEFDPNTLLEITYGGENVVAVGNTLAVADTQHKPSIHASFPKDTEGTYTLVLTDPDAPSRTDNKWSEYCHYIVTGLKPGVVAEAEGAAVELDLSKGKELIPYMGPGPPPKTGKHRYVFVLYKEGAKSPEAPADRPTWGTNVPGSGTREWAKKNDLTLVTSNFFFAQNTEQ

SEQ ID NO: 28393 - protein, 886 aa, Yarrowia lipolytica CLIB122
MTILSATVEKAKKAKEIWLQDDPRDQDDDDSQVQAEVVEVDDSLIEWIAMKLGIPPSDFDGSYPREVHFMAEKLAEMTLEKALNIVKVNFEYHDHDNNFRHEYRVEINGLKEAFGSGEDPEKEDPENILLVRYWATIFHWWSPYPEVRSVTDPYDETETTVETWRVWVLGTIWVAIAAFVNQFFSVRLPAISLGSGVCQLLLYPCGRFLQYTLPDWGFTFRGKRYTLNPGVWSQKEQLLATIMIGCAAGTPYVTSNIITQALPSFYNQDWARGFGYQFVLTLVTQMMGFGLAGLLKRVAVYPVKAMWPSLLPTLAVNKALLAPNRKESINGWKISRYTFFMIIFAFSFLYFWVPNYLMNFLQTFNWMTWIAPGNKDLAVVTGSVAGLGFNPIPTFDWNQAVAGIAPITLPLYTSVTGFVGTFFGGLVILAVYYTNNSWTAHIPINSNRLFDNKGKSFNVTRILTDYKFDKEKFLNYSTPYYSAGNLVLYSAFFSIYTFSFVYTILMDWRAMRDAIVETAKALRYIHRSNYHGRVDPFSRYMRRHKEVPDWWFYLTLLIMFVLAIVLVEVWPVDTPVWSIVFVMGLVAVFIIPFTVFVSYTATSLSLNVLSELIIGYALPGRFMALNLIKALSVQIAEQAENYTSDQKLTHYAHLPPRSIFWLQIWATLVNIFVCLGVIQFQLGLDKICDADNRLKFTCPSETTFFTASIAWGVIGPKKMFDKYPVMKWMFLFGACAGLFFWFVQVMVPYYMAKKWPKYSEKIHYYRRKCLYFNPLIFVVGMLAWAPQNLTYKVGGLYLAILFNGYIKSRYLSWWRKYAYVLEAAMDTGIALSGIIIFFSVQYHPKDLEWWGNDVIYDGMDGGGIPLPPHVPIPEDPGYFGPPPSQW

SEQ ID NO: 28394 - protein, 948 aa, Yarrowia lipolytica CLIB122
MIVFLGAFSACMSGEVDIGLYLADSSSDLGFFVCIYISISPVDCTHSSHPPTMLRLKLFGKEKSSEEEVETEIGEVLDVSDVPEISEIPPDVTEYVAQQLGTPPNDVDGSYPADVLFMAEKFLLMSENEAIEICTRNLKYHEFDPNFRDSHKDLLAELLKSFNGSGDPDEAASDEKDEKDEKDDLDPIQKSMLLRFWATLFHWWSPYPEVRAVTDPFDDDSQTCLTWRVLLLGTIWVGVGAFVNQFFDPRLPAITLSASVCQLLLYPSGRLLQYCLPDWGFSIRGHRFTLNPGEWSQKEQLLATVMVNCANGTPYVAENIFIQYMPMFYNQKWAGGFGYGFLLMLVTQFMGFGLAGLLRRVGVYPVMAMWPSILPTLAVNKALLAPNRKESINGWTITRYHFFFLVFLASFLYFWIPNYLWTAISTWNWMTWIAPNNADLAIVTGSISGMGYNPIPTFDWNMMNMLISPILTPLYSSMNQYVGMFVSGLFILAVFYTNNNYTKWLPINDNTLYDNTGNPFDVTKILTNFIFDESKYKKYSPPYYSAANLVLYGAFFALYPMAFVYSVLCYWKQMGIALRDTWLSLRYIHRSNYEGLDDAFSRIQKKHKEVPDWWFYAILLIMFGLSIALVEHWPTDTPVWVIVLCLGMCLVFLLPFTIFYSISGVLLTLNVLGELIIGYALPGKFQALNTTKALMVQIADQAMNYTTDQKTTHYAHLPPRSIFMIQLWATLVNGLVCLGVLQFQMFSVKEICTKHNSMKFSCPNENTLFSASVIWGVIGPKRIFDHQYPVLKWMFLLGAGVGLLFWAFQYGLPMVLVKRYPASIKKILRYQRIVSKAHPLILCSAMLSWAPYNLSYMTGGFYLAILFNWYLKTRYLEWWRKYAYVFSSGMDTGVALSAIVIFFAVEYNDYGLSWWGNNVSSAGVDGQGIPIPPLPDVGYFGPGPDHYP

SEQ ID NO: 28395 - protein, 392 aa, Yarrowia lipolytica CLIB122
MEPVYIVSTARTPIGSFLSSLSGQTYVDLGAHAVKAALAKTDIKPDQVDEIIFGNVLSAGVGQAPARQVALKAGLPDTIVATTVNKVCASGMKAIIQGAQAIMTGSADIVIAGGAESMSNVPHYVQARVANKYGNGSLVDGIQRDGLFDAYDGQAMGVAAEVCADTHSISREEQDEFAIGSYKKTQAAYAAGKFKDEIAPIELPGFRGKPGVVVSEDEEYKNLNEDKLKSARTVFKKDGTVTAPNASPINDGGAAVILASAAKVKELGLKPLLKIVSWGEAANEPVKFTTAPALAVPVALKRAGLEAKDIDFYEFNEAFSVVGIANTKLLGLDSSKVNVYGGAVAIGHPLGCSGARVIVTLNSVLHQEGGKYGCAAICNGGGGASSIIVEKC

SEQ ID NO: 28396 - protein, 250 aa, Yarrowia lipolytica CLIB122
MSVVEITSDSHFSELTSSLAPTTLVAVYFHTPWAAPCAQMNSVFKSLSTLHSSVLFLSVNADELPEISESFDISAVPYFVMLRDGTILKELSGADPKELAATISALSESDAKPAESESAAAAAPTSSTADAPASSSTDAPEPAEETEEELNARLAKLVKAAPVMLFMKGTPAAPQCGFSRQLVAILREHHVRFGFFDILKDDAVRQGLKKFSDWPTFPQLYIGGELQGGLDIVKESIQEDPEFFEKAVAE

SEQ ID NO: 28397 - protein, 496 aa, Yarrowia lipolytica CLIB122
MRRSKVFIGNSHTELGGLICNRLGVEPAPCTLKKFSNGETSVEIGVSVRDEDVYIVQSGSPSVNDHLMELLILISGCRTGSAHKITAVIPSYPYSKQSKMKKHRGAITARMIANLLTMAGADHVITMDLHANQMQGFFTVPVDNLHAGPTLAQWIRHNVPDYKDAVVVSKNPGGTKRVTALADALKINFAMIQTDRRRNHKPYSSMLNLAQAPIFSVASPRKKGARGAPPTVLPAPGSPLNGTARRASMKLQDGPNTTHGTVPSRRKSSNTRKPSQLGGRRPSLNPGEEGEDDVFDDEEDEGVHIVTAHGVQTARVVQGHVVGDDYLEEESESEAQSEAETRPRLQHTDSSVDLKHALGGSVDAEGSDDDDDEFQREKLITLVGDVRGRTAIIVDDMIDRHGSFVAAAEHCRLNCGAKRVVVIATHGIFNDDCLEQLQACPCIDSVVVTNTYPIPVERRIAATKLVVIDVSAIFAECMRRNHHGESISALFEQMTM

SEQ ID NO: 28398 - protein, 459 aa, Yarrowia lipolytica CLIB122
MDSEAPVETLTAAQIKSYVDTAYILVCAVGVSLITPGIGMLYAGMIRRKNALTIVAQSVLTTCVICLQWWIWGYSLGNVPNGKMLGNLSLAFMMGSPTSHDELSLDQLEEEGIPTSVHFIFSAFFVVCTVQIFAGAIAERGRLISSQIVGFIFATVVYCPLSYWFWAEDGWLNAMGVLDFAGGGPVHIASGTGALAYALYLGKRIDDNGEASMLARAKPHNPTLVLLGTLLIWYGWLFFNSGTLLAVSSRTGYIMLNTQLSACTGGIIFAAVDKWRYGRVSLVGLCEGVICGLVAITPSCGYISPWFSVVGAIITAGVCCSLSNINQWIGIDDTIRSFNIHAIGGIMGSICTAFFADPAWAQEDIPGGWIKHNWVQLGHELAAVTTCVAWSFVLTYIICFVVDHIPGLKLRVTAEEEMLGTDVKDLSEKVENMEDSLWGNSPSMSREPTVAKRDAEPMV

SEQ ID NO: 28399 - protein, 428 aa, Yarrowia lipolytica CLIB122
MATVDFLSKALEIVRKAIEADNASKYEEAHELYVNGLDYFIKAIKYEKNPKSKELLRQRITEYFSRAEQLKEHLDKQKSKPAAQAAKQGGGANGGAGSGDDDNDTKKLRGALAGAILNEKPNVKWEDIAGLEAAKQALKEAVILPVKFPYLFTGKRKPLSGILLYGPPGTGKSYLAKAVATEANSTFFSVSSSDLVSKWMGESERLVKQLFAMARENKPSIIFIDEVDALCGPRGEGESEASRRIKTELLVQMNGVGNDASGVLVLGATNIPWQLDAAIRRRFERRIYIALPDAEARARMFEINVGNTPCALTQKDFRTLAEMTDGYSGHDVAVSVRDALMQPIRKIQEATHFKPVEIDGVTKYTPCSPGDPQATELNWMELEDGTVLEPELTLKDFIKAVKSTRPTVNNDDITRHEDFTNDFGQEGN

SEQ ID NO: 28400 - protein, 840 aa, Yarrowia lipolytica CLIB122
MSSPSSSREPSEIYPQEGEVDYFSPDSEDHVYLPQYHAHNPRVRDWFYKNVFSHPGERVKNYTLSLFPIVRWIYRYNLVWLTYDLIAGITVGCVVVPQGMSYAKLANLPPEYGLYSSFVGVLIYCFFATSKDVSIGPVAVMSQQVGRVIMHVQGEYPEASGPMIATMLAVLCGSIALGIGLLRLGFILEFIPAPAVMGFMTGSAINIVTGQVPALMGIDKLFNTKDATYMVIINSLKNLKHSNYNAAFGVVALFILYLIKYSCQYLSKKFPKYKKVFFYIEIMRSALIIIFGTLISWAVCHPHKKSGKFPISIIKTVPRGLIHTGVMKVDTIYMSKMASELPVSTVVLLLEHIAISKSFGRVNDYKISPDQELIAIGVTNLVGTFFNAYPATGSFSRSALKAKCGVRTPLAGIYTGVVVLIALYALNTVFYWIPNAVLSAIIIHAVFDLVAHPRQLFHFWKIAPIDAVIFFVAIILTVFVTIEAGIYFAVAASLVWLLLKVAFPAGDLMGKIEIVDVEDPLIVQQTADVEEIAAAEAARNTKLGKVKGLISKAGKLIEDGPVVDADVQHGLPLLAPQEVEKSTTAAALSHVPRRTVWVPLSRKNVNPDIKISPPRPGVIVYRFTEAFTYPNCSRQTDKLVDVIREKTRRAEGVRYKTLGERPWNDHGPRHPKESETVDLRPILEKVVLDFSVVSSTDSTGIQNLVDARGEINRYVGREVEFHFSGLLSPWVRRALVGSGFGGVPKGQHLSNYQVTAARRATALDRQTLPNDTTMVIEGDSLSNDSDEEYAKKKPFDEEEAIGGLDTKSVSSSSQDDKEFGGYIPVVSTDTPFFHLDIPDL

SEQ ID NO: 28401 - protein, 404 aa, Yarrowia lipolytica CLIB122
MRLISKGLKNKLEYKKLALDSTDDLYALTNVIQRGDLVEAKTLRAVPQTTGAFDDEQIQGNAGKKKVLRKLIYITVRAQKIVFDGEEIRITGVITDAGHHESLKTKYHTLALTPGDEVTVIKEFWDFFALQTLDQYVGADTMSALAMVFNSTGKFTIYELRHSVTRVLVQGYKAIPRKYDGQGSVGKTRGKQYNDFFNVAKETLLRTIENRCKADWTIPVLLISMPYMNKLFSEYFKAWAVDNKVKTAIQLQQGFITLETSSEGKTAIREALKSISYKSALNKLAIAADGNEMDQFQRMFHTDPDRVWYGEKHVDYALEMSAVSVLFLSSNFVRGFDHAKRSRYAEATQAVQQNGGKVFMYSHLQDSGRQIDALGGIAAILRFPLNDDAVELEDAELSDYSDDE

SEQ ID NO: 28402 - protein, 351 aa, Yarrowia lipolytica CLIB122
MLRIRPQFARQSLARLYSTQRQKILFLDNVVDAKDEFEKLKKKADVVTLKDGTDRESFLKDLKNTYKDINAIFRTFISVKKTGRFDEELAKALPESCKAVCHYGAGYDQIDVPFFSERGIQVSNVQSMADESTALTNLYLMIGTLRNFGDGALNLQKGQWLKGVALGNDISGKTLGILGMGGIGREIRDYVAPLGFSKVLYYNRNRLAPELEKDSVYCQSPEDLFSKADVISINVPLNAATKHLVNAESISKMKDGVIIVNTARGPVCDEKALVDGLNSGKIGGVGLDVFEREPAIEEGLLKHPRTLLLPHMGTWSHETHFKMEKAVLDNLESFVDTGKVISIVPEQKGKF

SEQ ID NO: 28403 - protein, 793 aa, Yarrowia lipolytica CLIB122
MSDVAELSTKLEHLGFAEPKIKEVLKNKKVAASFNDILNVVNVGKDEKRAALLHNLASSSKDAKDEAVIKKRNEVASAIADGRIKTNVQLDAAWKWAQDLHSSESLDQAAGVGIEVTRDDVYREIAAYIAANKAQLEEERYKALPGVMVAAKKIPALKWANPADFKPVIDEQLKELLGPKDERDLVKKKAPKAKPAAKDAAKKEEPEKVSATAMFTTGFLGNLHKTGENPQANMERMVEHLKATKGQVFTRFPPEPNGYLHIGHSKAITVNFGYAQFNKGKCYLRFDDTNPEAEEERFFTSIRETIEWLGFEPYKVTYSSDYFQELYDLAEKLIECGGAFVCHQTAEEMKASRGVSEGSRGGERVPSPWRNRTVEENLVEFRKMRDGHYKPGEAVLRMKQDLNNPNPQMWDLVAYRVLNAPHHRTADKWKIYPTYDFTHCLVDSLENISHSLCTTEFYLSRESYEWLCDAVDVYRPAQREYGRLNITGTVLSKRKIAKLVSEGHVRGWDDPRLFTLVAIRRRGIPPGAILNFVSTLGVTTAESNIQHSRFENNVRKYLEDTTPRLMMVLDPVKVTIENLPEDHFEEFDMPFGKNDERSRKVPFTRELYIDRSDFEESAGKEFFRLTATQPVGLLKVPHNISLKEVKKDAAGNITELICHLDNDIPFKKPKTYIQWVPECAAKKSPVKISETRIFKQLFKSENPQGHPDGYLADLAEESEVIHKHALVEPGFYDVKENSPWVTGEHTGKEKKGSPESVRFQALRVGYFCMDKDSTEKDIVLNQIVSLKEDNQKK

SEQ ID NO: 28404 - protein, 105 aa, Yarrowia lipolytica CLIB122
MATESAIKTIKEHIAKDKVFVASKSYCPYCKQTKQLLSQFKEAKPVILELDELDDGAELQAALAEITGQRTVPNVFIGGQHIGGNSDLQVLAQKDELADKIKAAL

SEQ ID NO: 28405 - protein, 884 aa, Yarrowia lipolytica CLIB122
MKINVIEAAKHAKELWLKKDPRDEDELQSDVQVEVVEVEEHLLEWMGAKLGIPPSDMDGGYPREVHFMAEKLAEMSLEKALELVKTNYDYHDHDNNFRHEYRMEIKGLLDIFKDSPVESEKEDPENILLIRYWATIFDWWSPYPEVRSVTDPFDETDTTVETWRVWVLGTIWVAISAFVNQFFSVRLPAITLDASVCQLLLYPCGRLLQYALPDWGFRFRGKRYTLNPGIWSQKEQLLATVMVTCANGTPYITSNVITQALPIFYNQKWASDYGYQFVFMLTTQMIGFGMSGLLKRVAVYPVKAMWPSLLPTLAVNKALLAPNRKESINGWKISRYNFFMVIFAVSFLYFWVPNYLMNFMQTFNWMTWISPRNADLAIVTGSIEGLGFNPIPTFDWNQATALLAPITLPLYTSVTGFCGALFGGLVILALYYSNNSWTGYISINSNRLFDNKGEVFNVTRILTDYRFDRDKYLAYSTPYYSAGNLVAYSANFSIFTFSFVYTILTDWRAMKDAIVDTAKAVRYIHRSNYYGKVDPYSRYMRKHKEVPDWWFYLVMIIMFVLSVVLVEVWPVDTPVWCIVFVIGLVAVFIIPFTVFLSYTATELTLNVLSELMIGYALPGRFMALNLVKALSVQIAQQAQAYTKDQKLTHYAHLPPRTIFWLQLWATLVNGVVAMGVIQFQLGQEKLCEPDNKMKFTCPEQTTFFTASVAWGVIGPKKMFNKYPVMKWMFLFGACAGLFFFFVQVTMPKLMVRWFPKHADRIDFYRRKFLYFNPLIFVMGIVDGWSPYNLTYKVGGLYLALVFNGYIKGRYLAWWRKYAYVMEAAIVTGIALSAIIIFFSVQYNPKDLDWWGNSVVNAGYDSEGIPPNVQVPEDPGYFGPPPSEW

SEQ ID NO: 28406 - protein, 626 aa, Yarrowia lipolytica CLIB122
MQMLNRTRKGSGLHGSDRWLVYKSKLGDRCGQSLRLHYSISMEKDYSDTPESAEFTETHTGQVETAHMSKWQRFKYGFGPADISHIDTEGLTPMEITALKTANSPLQRGLKGRHLQMIAIGGSIGTGLFVGSGSTLANGGPAALLIAYGIIGIMLLLTMHALGELAVCFPVSGGFCTYFTRFIDTAWGFAMAWNYVMNWFVVLPLELVAASMTVNFWNEMNGTHINAAAWVSVFWAVITCINLFGVKGYGEAEFVFSIIKVVAIVGFVIFGIVMACGGGPERGDFHHYMGGTLWQHPGAFAHGFKGVCAVFVTAAFAFAGTELCGLAAAETENPRKMLPRATKQVFWRICLFYIVSLTIVGLLVPWNNDQLLNGSSSADAAASPFVIAIRLAGVKGLPSVMNVVIMISVLSVGNASVYGFSRTMAAMGESGQAPKIFAYIDREGRPIFGILVVLAFGLFSFIAAAGAETRNEVFNWLLALSGLSSVFVWGSICLAHIRFRLALKYRGRGTDELTFRAAFGVWGSVLGLILNCLVLMAQFWIALYPLGAKTPNASDFFQAYLAAPVVIAFWIFWKVWKRDGFLGLKDLDIDTGRREMDLDKVRAEMAIEDEELSRRSFLYRTYNFWC

SEQ ID NO: 28407 - protein, 1032 aa, Yarrowia lipolytica CLIB122
MRKVRVKRHNLHLPEEHNGRVPFPGRAHGLAGHIHIDRGAGGSDSIPLLEEQDESLAGPSHDPIDDSFSISAEDPYNSYHSTPSDFLNNYNDYPDEPGIPLLPMEKDHTHEKGHSDEHVIIDTAEVLEDTCFYVAYKLGIATVDDEPFPESVSYIALKVDEMGDEEALAILKRHVEYHKDDRNIPESSMLLWRSLIRHSEEYAQGNISESGEANPSLSAKKNTESTVDRVATRATYEDGSADLDPANMSPNELSLAIRYHAAIFHYWSPYIEVRSVTDPFDDPNLPVETIRAYLAGIIWLIVGAGVNQFFSVRMPAISISTMVCQLLLYPTGKALEYILPDKGFTFRGTRHSLNPGPWNNKEQMLATMFISVAIGGTYITSYNLFVQILPMYYGVDYARQFGYTLTLTLASQFMGFGFAGLLRKFVVYPTKAMWPTLMPTLALNRALLVKQKREKVHSWTISPYKFFFVVVACAFVYFWFPSYIFQALSTFNWITWIAPDNLNINIVTGAQGMGVNPWPTFDTNNMFALFDPLVLPQFTVLNTYAGMILGASVILGLYYTNTKGTAHLPINSNRIFDNTGKSYNVSRVLTDGTFDDTKYRTYSPPFYTAANLMVYSSFFAIYTLGFVYIGLSEWFTMVESFRDVKQAFIDIFMTTKFYIMRITNRKATRHDMDSSQFTNRQDEPFSRMIAAYPEVQNWVFIGLLVVSFVLAVIAIRVWPTDTPIWGLFFCLGINLVFLIPLTLILAYTGFGFGLNVLVQLIVGYALPGHPQAMMILKAIGYQVDGQAQNFITDQKVSYYTHMPPRALMRSQLIGTLVGAFVCLGVLYYQLEIEGICTPEQATTTKFTCVSQNTFFSASVIWGALGPAKMFQIYPAMKYMFLLGAVVGLIFWAVQYPLPTFLAKKFPQHRERILSLQSTLKLFNPVIFVGGVLNFAPYNLSYATGGLYVSLLFSWIKRRYSAWWRKYTYVLDAGLITGIAFSAIIIFFAVQYKGVELEWWGNTVSYDNLDFKGAILKPLAAGETFGPSPENFP

SEQ ID NO: 28408 - protein, 462 aa, Yarrowia lipolytica CLIB122
MTLRLAFRSVGRAMATRTAYPSLARSLATHAPSTETFTASAPEGSLVAKAVEAVQNAPAGDERPIYLDMQATTPTDPRVLDVMLNYYTDMYGNPHSRTHSYGWETDTAVEKAREEIAALIGADPKEIIFTSGATESNNMVIKGIARFYKGRKRHIITTQTEHKCILDSCRYLQDEGFEVTYLPVLSSGLIDMKQLEAAIRPDTALVSIMAVNNEIGVIQPIAEIGALCRSKKVFFHTDAAQAVGKIPIDVNADKIDVMSISGHKLYGPMGIGACYVRRRPRVRLEPIITGGGQERGLRSGTLAAPLVAGFGEAARLCRQEMPYDTAHIKKLSDKLKNGLLAMEHTSLNGDAEHHYPGCVNISFAYVEGESLLMALKDIALSSGSACTSASLEPSYVLRALGADDALAHSSIRFGIGRFTTEAEVDYVLKAVQERVNFLRELSPLWEMVQEGIDLDSIEWSQH

SEQ ID NO: 28409 - protein, 882 aa, Yarrowia lipolytica CLIB122
MSFEKEKPVVTDEKDTAVGEVHDVCEVQPHIMDWIARQLGIPPNDIDGTYPPEVAFMAEKFSEMTESEAVEICTKALHSHRVDPNFKDAYKDQLADLLDALNGTNYSDEKDDLESPYNDPVERAMLLKYWATLFNWWSPYPEVRAVTDPIDEDNTTVMTWRVILLGTIWVAVSAFVNQFFEPRLPGISLSASVVQLLLYPSGRLLQYCLPDWGLTFRGNRYTLNPGRWSQKEQLLCTIMVNCAAGTPYVTSNIFVQYMPMFYNQSWAGGFGYSFLLMLVTQFMGFGLAGLLRRVAVYPIMSMWPTILPTLAVNKALLAPNRRESINGWTLSRYTFFFIVFIGSFLYFWVPNYLWQAFSTWNWMTWIAPNNADLAIVTGSFGGMGYNPIPTFDWNMITGGISPILMPLYTSINFVGGVFVSGLVIMAIYYTNNNYTRWIPINTNELYDNTGNPFDVKKILTNFVFDDEKYRKYSPPYYSAANLVTYGAFFAMYPMSFVYSILCHYETMGVALKDTWKSLRYIHRSNFEGLEDPFSRIQRKHKEVPDWWFYCILLIMFGLSIALVEHWPTDTPVWVIVLCLGLVVIFLFPFTIFASLTGVSLTLNVLAELIVGYALPGKFQALNTAKALTVQIAGQAQNYASDQKLTHYAHLPPRSIFSCQLWATLVNGLVCLGVLQFQMHDVKDICDPHNKLKFTCPGETTFFSASVIWGVIGPKRIFDHQYPALKWMFLLGAGLAMCFWAAQILIPNLLMKKYPIKTRKIQKIQRMLLSVNPILVVNAFIAGWAPTNLSYFTGGLYVALLFNGYIKNRFLAWWRKYAYVFSAAMDTGIALSGIIIFFAVQYNDYSISWWGNNVIAEGLDYNGVPPPPLPDVGYFGPGPDHYP

SEQ ID NO: 28410 - protein, 374 aa, Yarrowia lipolytica CLIB122
MLTDAQIKIIKDSAPFLAENGTDFAAKMYKYMFATYPEVIRFFNQSDQKNLAQPKILAHALVAYASNIDNLGVLSDFVEQIVVKHVGLQIQPEQYPIVAASIIHTLKEMLGEAATPEFIEAWTVAYTQLANILIDAEKKLYEKQASLAGGWEGFRDFVVTKVEDESSNVKSVYFKSADGKPVSTPIPGQYVTFLFTFNGQETMRSYTVSQKVTGDEYRISVRKVKGGLVSTYIHTEVKPGTQLKVAPPTGRFTYTDDGKKILFVAGGIGITPLISIIEETKGKEGNALIYCDRSPETQPFGKWLQDAGVKTTNVYSETADKRHISKDDFAGVDLSNVNVYLLGPPPFMTTVRKLLSELGFSGEIKTEFFGPVEV

SEQ ID NO: 28411 - protein, 836 aa, Yarrowia lipolytica CLIB122
MSQYSRHAFDTDSDSDTELTPIYIDDRYSSMVSNDSRAGLLRRGGDLERDAESEKTREEKEEELRNHSFSKSRDKTRETVADATLESSSCVDSQYDTVETTSIFSVGRKKAINSPYPEVRAAVPATDDPLMPQNTPRMWVIGIFLVTICSGLNILFTLHWPAFVISSFFAAMVAWPLGRIWDQFVPNWRIPLTNIYLNNSPFNIKEHCLIIVMANVSYGTGVSYVPVIVLTMKHRYNNTYFGWGFSIVSSICVQCLGYGMAGICRRILVYPASLIWPSNLVTTTFLTNIHMNVNHTADGWKISRLRFFLIVFSAYFVWNWLPGYLAPFLSNFAFVTYAAPDNVIVNQIFGSSSGLGLIPINFDWNVIAGYIGSPLVPPFFSIGNVAAGVVVIFWIITPILHYSNAWYGRYLPMSDSNSYDRFQRTYDAERVLKPLVKGGKKKFELDVEKYKEYSPLYLSTTFALSYGVSFAAITSTVVHTILFHGKEIMYYWKHSRKEPEDVHMELMRKYPEVPEWWYALVLAICFALACVTVSVWETDLPIWALIIALLIAGGLLIPAGMIAALTNVTMGLNVLTEFVVGYILPGRPVGMMFFKTFGYISNAQALNFLVDLKLGHYLKLAPRVMFCAQILATTWGSICQLAVVEWAQMAIPDLCEESQKTNFSCPQVQVFYSASVIWGLVGPGRIFGEGQLYHGLLWMFLVGAALPFFSWLWLKRHPNSRLKFIHWPVFFNGPSQIPPATPYNYASWCVVGYIFNWLIKRRWFNWWAKYNYTLSAGLDVGMAVSAAVIFVSLQLPNINPPSWWGTNIFTPTMDIQGNAFQEVLKEGESFGMKTWK

SEQ ID NO: 28412 - protein, 360 aa, Yarrowia lipolytica CLIB122
MSKAVNIAIIGTGLVGKAFINQLAAVKSSIAYNVVLIARSSKTLISKDFKPLSLTNWESELNSSPVGAMSFTEINDFLKKSPLPVILVDNTSNEALANEYPTFVNSGISIATPNKKAFSSDLKTWEAIFGGAEKSGALVYHEATVGAGLPVISTLNDLIATGDEVETVEGIVSGTLSYIFNEFSTLSGSDVKFSDVVTKAKQLGYTEPDPREDLNGLDVARKVTILARLSGFDVESPTAFPVQSLIPKPLETASSADEFLQKLPEYDADLAKLRDEAFAEKKVLRFVGSINKGTGKVEVGIQKYDASHPFASLKGSDNIIAFKTKRYPNPLVIQGAGAGDEVTAAGVLADVFKAAQRLAK

SEQ ID NO: 28413 - protein, 579 aa, Yarrowia lipolytica CLIB122
MATEHVEHAENAKQSPQPSFSGSESGRIGRYQIIKTLGEGSFGKVKLAYHLATHEKVALKIINRKTLAKSDMQGRVEREISYLRLLRHPHIIKLYDVIKSKDEIIMVIEFAGKELFDYIVQRGKMPEDEARRFFQQIISAVEYCHRHKIVHRDLKPENLLLDENLNVKIADFGLSNIMTDGNFLKTSCGSPNYAAPEVISGKLYAGPEVDVWSCGVILYVMLCGRLPFDDEFIPNLFKKISNGVYTIPPYLSAGAKHLLQQMLVVNPLNRITVQGIMEDPWFKQGIAEYLVPRDLKPDQVEIDDKVVGALSDTMGYDRDQVYEALKAPKSDGTEIRDAYDLMKENRQQLEKDSTVFDKVDESGKPKHQFSRKNPPALTFDSHHMPTIVDHSDLRTPNTTIAVLPSSLPAYHRANMMAHGPATLRKLNPISSRKSKTRWHFGIRSKSYPLDVMGELYRALKNLGAEWAKPSENDLWTIRVRWRYTPEKDESDSTTKPDSGLLKMQIQLYLLEQNSYLVDFKFDGWECETESGEIKTRDVAQVSNSKSANETFTFSAYPFLHLATRLIMELAVSSQKESEK

SEQ ID NO: 28414 - protein, 527 aa, Yarrowia lipolytica CLIB122
MLTSRTPGVGRLRLPLVFSRDYHKKRRQMKQKDLEKESRQDAVQRFFDKDQKRFAVMPYKSPYDAVKYHEAQQAVKDGSHFLDVRLVKCSAGKGGNGRVSFAREAMMPYGPADGGDGGEGGSVYIQAVDSIRTLKNLSFKYMAGAGKAGGSSHMYGHRGTDVLLQVPVGTVVKWCPDPKRDVEQDLIKVDPEEAARKYPPQFLENGEPVPDHKEVVGVEVAEGMFHMNRGYLRLNRATMADGEGWTYENPQVANWCNDPKNPPEFFTRTKEATKFDDAVLRSTEEATDVFPVDGLDLCEPGKPPQLLLKGGAGGAGNMRYHRDDIRNPKFAKLGRSGITATFMLELKLLADLGLVGLPNAGKSTLLGAISRASPRVGHWEFTTLHPTIGTISVGMDKPSFTVADIPGIIKGARINKGMGLDFLRHVERSNGLVFVIALDRPDPVSDLRVLIGELGPERMAGKSVLVVATKADVEESERRFIDLNAFVSNKNWAIVPCSAMNAENVQPVINEMAKVAGVYGTNTILEG

SEQ ID NO: 28415 - protein, 496 aa, Yarrowia lipolytica CLIB122
MLRQGIKRAVVHARAVQAVCKRTNMTITKKDLNPQVVNAQYAVRGKLAVRADEIKEQMRTNPSLFPFDKVINANIGNPQQLDQKPVTFYRQVLAMLQYPELMDRAADVGIPNDAVQRARKLLDDIGSVGAYSSSQGVTTVRNSVANFIQKRDGYAASASDIYLTTGASNAVTFLLTTLARGDGSDGFMIPIPQYPLYTATLTLQNSNPVPYYLDEAKEWGTNMAALNDAVESSKHKLKAVVVINPGNPTGACLGVKEIKDILLLAQKEGIAVIADEVYQANIFASGQFHSFKKVWSILKEENPDFNVPLASLHSTSKGKIGECGQRGGYMELVGFHEDVIEQIYKLCSISLCPVVTGQALIECMVNPPVEGDESYPLFNKETNHIMDTLTQRANRLYEAFKEMPKVSCEPPQGAMYLFPSIELPAGAIAEAERHNEQPDEFYCMKLLEQTGICVIPGSGFGQKDGTYHFRTTFLAPGDDYGEKIVNFHKKFLAQYE

SEQ ID NO: 28416 - protein, 600 aa, Yarrowia lipolytica CLIB122
MTATSATASTKKDGNVHLGEYLFSRIKQLGIDNILGVPGDFNLHLLDYIYRVPDLNWVGCCNELNAAYAADGYGRVKHLPGVLVTTYGVGELSALNGVSGAFAEQAPLLHIVGTTGRPIQEESWLVHHVLPKENSLQEPDHLVYQGMSEKVRCCSAFLNDKETAAAEIDRVLTTICQKSLPGYLFIPVDMTWQPLDAARLDSKLDYSVKNEDPKLENEIVDSILSEIYASKNATVFADVLTARHRATDLVRELAKKTNFPNYTSPLGKGILNENEDRFVGVYNGQLSLEGVAKSIEASDCVLFTGPLLSDSNTGGFSHNLKDENTIYLSPDYVKVKGKLYEGVHFFPVLKKVVEQLDVEKISAESKTAAMPTISPPPVIDSPLPISQTFLVDSMSKMMRPDDLLIVETGTFQFACSDVKFNTNNSLLTQIFYSCIGFTLPATLGAALAKREDAAAKNDKGRVILVEGDGSAQMTIQELGTMVRQGLNPIIFLLNNDGYSIERAIHGPEQSYNDICPKWKWTKLLEAFGGTEGVDSFSTTVKTREELEALIGDEKFMNSDKAQLVEVIMDVNDYPWRLNEQIKLMGGKNMKVFAEYQKKNP

SEQ ID NO: 28417 - protein, 583 aa, Yarrowia lipolytica CLIB122
MTERLCTIAALLNPNVYPFCLSNSSVIFSPGEVPYDVLASTELNPLIQYTRSAEPPTVSVNMLRSSKRYMTTMSNRQPVASRRALYGLASGLVLATAYMGHQYLMDPIALDSRGINTNAAGGYDPFGRRMNIMNPERVNARLREHEQSHFVERGRGVLRYDMAQLPSNSPIEDDYSDRVVSVALNEAGNANASSDWMFWGLYDGHGGWTTSAKLREELINYVIRQLDAGYSDAGKTLGDNIRRTPSPETIDLAIKRGFLALDDEICIHSINRLLKNPQKGQSPETLAPAVSGSCGLLAFYDTLSHTLRVAVTGDSRAVLGSKSSSGWTARALSVDQTGSNQREADRIRKEHPGEEDRVIRRGRVLGGLEPTRAFGDARYKWTRDLQDKVARAFFGRSTPPELRSPPYVTAEPEVTTTKVKSGDFLVMGSDGLFEMLSNDEVVSLVVQWMETHPITESSTAASAKSGGMWDKMFGSKDSTKVVDLTVDQDAMKPPFRHQGAVLKPTVEDENVATHLIRNALGGADREQLSMLLSIPAPQSRRYRDDLTVTVVFFGDEKAPENGGIRGNVAATSGGVGTQEKAKL

SEQ ID NO: 28418 - protein, 305 aa, Yarrowia lipolytica CLIB122
MSDKSNFLVDFLMGGVSAAVSKTAAAPIERVKLLIQNQEEMIKQGRLSRPYKGIIDCFKRTAADEGIASFWRGNTANVIRYFPTQALNFAFKDKFKKMFGFKKSEGYWWWMAGNLASGGLAGATSLAFVYSLDYARTRLANDAKSVAKDGKAAGERQYNGLIDVYRKTIASDGIAGLYRGFGVSVVGIIVYRGLYFGLYDSLKPVVLVGPLEGNFLASFLLGWTVTTGASTASYPLDTVRRRMMMTSGTGVKYSSSMACMASIIKNEGVGALFKGCGANILRGVAGALVISMYDQMQMIMFGKKF

SEQ ID NO: 28419 - protein, 322 aa, Yarrowia lipolytica CLIB122
MMFDTFSPITPPSEAAPNAVLASAQTVLRAQAATIAHITDLYDTDPEVQQQFAKGIQYLHNAVVGGNKVVLTGMGKSHKIACKLSATMNSLGMHATPLHPTEALHGDLGIVKPGDVVVMITASGNTPELKQLLPHLDATLLTLTCEPNSSLGHLSHAVFACPVPDSHKEKNIYGMAAPTTSTTACLVVGDSICIALCESLQLDKAERNRTFGRNHPGGVIGEAFKNELPPVQSVCSYSTSSHNEMLLLRTTSGNQWVVVDNTWLVPTRNILGLIDAGFTDQMETQIRLEELEKVDQSRLAGVPPGQRVVVVKEDEIVGVYER

SEQ ID NO: 28420 - protein, 571 aa, Yarrowia lipolytica CLIB122
MSDSEPQMVDLGDYLFARFKQLGVDSVFGVPGDFNLTLLDHVYNVDMRWVGNTNELNAGYSADGYSRVKRLACLVTTFGVGELSAVAAVAGSYAEHVGVVHVVGVPSTSAENKHLLLHHTLGNGDFRVFAQMSKLISEYTHHIEDPSEAADVIDTAIRIAYTHQRPVYIAVPSNFSEVDIADQARLDTPLDLSLQPNDPESQYEVIEEICSRIKAAKKPVILVDACASRYRCVDETKELAKITNFAYFVTPMGKGSVDEDTDRYGGTYVGSLTAPATAEVVETADLIISVGALLSDFNTGSFSYSYSTKNVVELHSDHVKIKSATYNNVGMKMLFPPLLEAVKKLVAETPDFASKALAVPDTTPKIPEVPDDHITTQAWLWQRLSYFLRPTDIVVTETGTSSFGIIQTKFPHNVRGISQVLWGSIGYSVGAACGASIAAQEIDPQQRVILFVGDGSLQLTVTEISCMIRNNVKPYIFVLNNDGYTIERLIHGENASYNDVHMWKYSKILDTFNAKAHESIVVNTKGEMDALFDNEEFAKPDKIRLIEVMCDKMDAPASLIKQAELSAKTNV

SEQ ID NO: 28421 - protein, 509 aa, Yarrowia lipolytica CLIB122
MTWIVQKFGGTSVGKFPKNICNDIVQQYSQSYDVAVVCSARSTGTKAEGTTTRLIAAADSALLGSDAYNPIIESIREDHLAAAKRDVKNPELLENLNADINGECDQLLRILAAAEIISEISPRTLDSIMAIGEKLSCMYMTAVMRDAGVNARYFDLSHAVTTTNAEDPKFYSDLGRVLGEIITLPGSPNTDSAPVKGNMVPVLTGFFGPVKGGLLSQIGRGYTDLCAALVAVGLDAKELQIWKEVDGVFTADPRKVSTARLLPIITPEEAAELTYYGSEVIHPFTMEQVIKAHIPIRIKNVENPLGGGTIIYPSADGSGNLKTKNNVQDLASSTDSLTSLSSGSFTPQVSAPVDDEKKPTAVTTKSNITVLNVHSNKRTKSHGFLNKIFATLDQQKLVVDLISTSEVHVSMAFHAPDSNLKQAVEELRKYGTVDVKRGMTIVSLIGTRMKAMVGCAGMFFSTLAQAGINIEMISQGANEINISCVIEEKDALKALNVIHQGLLCPRRKI

SEQ ID NO: 28422 - protein, 800 aa, Yarrowia lipolytica CLIB122
MLPEIITPTAARALNVPISGRVINCVTTLPYEIYREGATYKIRPRRGNSALYSALDYMQSGDGDTTWTSSLVAWTGEIALPAATSLPDLELYQKLTEQDKHMLERELTEAQGGTPTHPIWTDSGDTVSTGYNEQLSPTRRYAENILWPILHYIQGEPTDGRDEKKWWSDYEDLNRKYCDKVLDIYNEGDVIWIHDYYLFLLPKMIREKLPDARIGFFMHAPFPSSEYFRCLAKRQELLQGVLASNLISTQSEAHKRHFMSACSRIVGAETATPTSVYAYGQSVSVVALPIGIDTAKVEADAFTDEITEKVRAIRQLYPDKKIIVGRDRLDSVRGVVQKLYAFDVFLKRYPEWRDRVVLVQVTSHTATGTRKVEKKVAELVSSINGRYGAIHFSPVHHYTKHIAREEYLALLRVADLCLITSVRDGMNTTALEFIVCQNGNNSPLILSEFTGSAGNLPGAILVNPWDAVGVAEQINRTFRMGQDEKLAIEQPLYQRVTANTVQHWVNRFVSQVISNTFRTDQSHLTPILDNHKLVERFKMAKKRVFLFDYDGTLTPIVTDPAAATPSDGLKRDLRALAKDPRNAIWIISGRDSTFLDKWLGDIAELGMSAEHGCFMKNPGTTDWENLAANFDMSWQKDVNDIFQYYTERTQGSHIERKRVALTWHYRRADPEFGLFQARECRAHLEQAVVPKWDVEVMSGKANLEVRPKSVNKGEIVKRLISEYSSEGRPPQFVLCMGDDQTDEDMFKALKDVPDLDSESIFPVMIGPPEKKTTASWHLLEPKGVLETLNELAKLEGESKM

SEQ ID NO: 28423 - protein, 558 aa, Yarrowia lipolytica CLIB122
MFPFDVEKNKGTSSESIHSIHVSEIHSDVRSESIIGAPEEEESPLGQHVGKFTVVALNFSQMIGTGIFVTPGSILKGVGSIGASLMLWLAGIIISFSGFAVYTEFASMYPKRAGADVAYLEKAFPKPKYLMPVVFAVISVLLSYSASNAIVFSEYVLVAANQEVTEWTQRGIAIAAIAGVCLMSWVSNKWSMRLQNVIAYVKVIILFFVAITGLVVLGGHTRVKNPRDNFKDPFKGTTGNANVWANALVKIIFSFAGWNNANNVLNEIPDAVRTVKIYGSVALALVSVLYMLCAVAYFAAVTKEEIKHSNLLTAALFFKNVFGESAGQRVLPALVAVSSIGNLLAVTIGHSRIVREVGRQGVLPWPNFWTNTWPFGTPGGALLVKFILTVIVIVAPPPGDAFNFVVDLQSYPSNIFLCLLVVGLFIVRRRRQKAGLGRAPFRAYTVVAVFYFLVSLFLLAAPWVPPPGGANGGDVSFWYATYCVVGIGIILLCGIYYYIWAVVWPKFGGFKHVEQIITLPDGSTYTKINRVKNDVQHSDESEGESETKSARVEEKEIV

SEQ ID NO: 28424 - protein, 557 aa, Yarrowia lipolytica CLIB122
MSIIDGIETRRDSGASSASAASSSSKNSISKSPIFTTESTPLVRGIVEGRNTHDPEADGKSESVSPLGRHVGPLTVVALNFSQMIGTGIFVAPGTILNSVGSIGASLVLWMFGIVVSFCGFSLYTEFASLYPSRSGGEVVYLEKAYPRPKFMVPVTFAICTVLLSYSASNAIVFAQYFMVSLNIKHTDGMEQFVAVATSVAVCIIAIVDTKWSMRLQSVIAYIKVGILIFVATTGLAVISGVTKIEKPLDNFKNPFSGTSTSPNVWAAALVKVIFSFAGWNNANNVLNEIPNPVKTVKIYGSIALALVSVLYMVCAVGYFAAIPKQEIKDSKLLTAALFFTKVYGDESTTRILPSLIAISSFGNLLSVTIGHSRVVREVGRQGVLPYPAFWTNTWAFGTPAGPLLVKLLLTIIVIMVPPPGDAFNFVIDLQSYPSNVFLVLLVIGLFLIRKRRRTQGLPSAPFEAWDCVLYLYLGVSLFLLVAPWIPPPGGKYGGDVSFFYATYCIVGIAILAVCGLYYFWWAVIWPKLGNFKHVEVLERLPDGSVFTRIVRQKNSF

SEQ ID NO: 28425 - protein, 331 aa, Yarrowia lipolytica CLIB122
MTQKVLFLDEIHDATKDYAALAQKCDIQHVGTTSREQFLKECKEGKYDGFVAIYRTFTTLGKVGRFDKELCDALPASIKAVCHYGAGYDQVDVAPFTERGIQVSNVQGAADAATALTNVYLMLGCLRNFGHAAISLRQGNWIGDVPLGHDPDGKVLGIMGMGGIGRQVRDYVKPFGFEKIIYYNRSRLSPELEGGCHYVTLDELYAQADVISVNVPLNAATRHMINSESISKMKDGVIIVNTARGPVIDEQALVDGLNSGKISSAGLDVYEHEPKINPGLLKNPQALLLPHFGTFTIETHRKMEEAVLNNIETFLKTGKVATIVPEQNGKF

SEQ ID NO: 28426 - protein, 496 aa, Yarrowia lipolytica CLIB122
MDDSDDDYIENISGDEYQGAPRRSRRNQAPKGAGGSVENMKMANGGYSWEDEYHRSWDVVQEDEGGSLAGSVAGLVEARKKRHIKDATPFQRGIIRNLILVLDFSFAMKESDLRPNRYQFVINHAIEFVTNFFDQNPISQLGILGMRNGQAISISTLGSNPNDHINALTAAKKLEPQGDPSLQNALEMARGLLFHVPSHCTKEVLVVLGALLSADPGDIHVTIDKLVIDKVRARVIGLAAQVAICKELCVKTNFGDASYYGVVLNEQHFQELMDEATTPLAESQQSQSANPASLVLMGFPSKVSEAAPSLSASDAALTQGGYVCPQCKVKVSSLPTVCPCCGLTLILSTHLARSYHHLFPLAPFIEVPCKNAHKSEFCAGCQSKFPVVARDAKNIQADGSMTSRYECPTCHSHFCIDCDVFCHEILHNCIGCQARSYSLYQVVVTKHKDAAPSLKLVMKRPDPDGEESSRPVKVRVVNDNEGPAWNEGGQAPTWGE

SEQ ID NO: 28427 - protein, 590 aa, Yarrowia lipolytica CLIB122
MPQKNTDHSEVEELQGNVEEVQYDVPELHIPTTNELLDSTEPFQIYYHYAAMQRAREDALPGSRFRSIFSKYTRKTDEKQSESDPCYDTPSDDGTGVSDVDPEKHAAQSSGGIISQIPGASQELAIANMSARTATWMSVFFLTTTDILGPSSAPWAISQLGWFPGVMLFTVLGVAAVYTGWLIYKMFLKLDSPEFPMKTFGDLALRVYGKGFRWGVDILQSLQLLCNVAVIILGNGQGLSQIYSPLCFSVWCIIFMVAGILLGQIKRLSNFSYVANAAIWMNLFVVFATMGIAATKPPNYVGGAQQNNLPNSTDPVRTKAIEEYAFQDQLGAVMNIVYSYGGAMVFVEFLSEMRKPREFLKGMLSAQGVIFVCYLLYGLLVYAYQGQYTVNPGNQGLGSHNWQIAVNVISVVSSLIAAGLYGNVGIKVVYITLIRRAIPALPGLDDGIKGRIAWALMVFIYWAVAFVIASAIPQFSSLTSLVGAACILQFSYTFPPFMYMGLTIREEASKLDTVDLETRTVIKYDSWRSMARWKRGIMSRPWWVLVNFVLFLASLATAILGIYSSIYSLVEAFDAPGAATVSFGCKPPVA

SEQ ID NO: 28428 - protein, 725 aa, Yarrowia lipolytica CLIB122
MLPRVARLSPLWHARSPLRPLPVRSLFLRPSSPSVYPTLAARPFSSYLPILNQNKSKGISDDDATPVNVSPSERAKAAGDINLQAKLTSRNSDKNQGVGDIFRLFRLVKDEVWPLIGAFTLLFLSAAISMTVPLSIGKIMDVVSEDEKDPEDADQRKVFGLPLKQFYIALGGLFIIGAMCNMGRVYCLRVISERLSARLRAQLYKRTVTQDAEFFDANRVGDLISRLSTDAQVVAKSVTNNMSDGVRSIISGVVGLGMMSYVSLKLATFMMLVAPPVAIIAVIYGKKLRHISRELQTAVGGLTKVSEERLGNIRTAQSFGGEIQEVRLYNSKIRAVFDIGKKDAMANGMFHGFFSLSGNMTILALLVMGSQMVSTGQLSLGDLTSFMLYAGYTGGAMHSVSSFYSELMKGAGAASRLFELNDREPAINATKGPHLESARGNIDFNHVAFAYPTRPSLPIFTDLNFSIPAGSNVCIVGPSGGGKSTITSLLLRFYDPTKGYISIGGNNIRDFNVRSLRKQIGVVSQEPVLFSGTIASNIRYGKPEATRDEIIEAARKANCTFLADFPQGIDTQVGARGTQLSGGQKQRIAIARALIKNPAILILDEATSALDTDSESSVNEALQRLMDGNSTTISIAHRLSTIKRADRVIVLSNEGTVAEQGKFTELYANHDSALSNLLRAKEEEEVAEPKITEGEKATIEGEIESEISEEEAKDIEENRGNLIKN

SEQ ID NO: 28429 - protein, 396 aa, Yarrowia lipolytica CLIB122
MDSEYGDLSVEQKPIKDHSHSHHHHDHGHGHGNGHVEVEYLNLPGNNFYEDLDAELNGPLYAGIQTFAHLGHVSCFDPTNFASEQFDIALVGAPFDTAVTFRSGARFGPAGIRKGSRRMSPGQVSPYREGFMLYDDWAKFVDCGDVAMHPLDNRYALNQLYRGMRAIHNHTTSTLNATHIPRAILMGGDHTTTLSALQAIYEKIGPVSVIHFDSHIDTWDPMVLGGNVSSYMQVNHGTFLHYAAERGYLNHGHNLHVGSRAPYVRKHGDIEHDKHCGFAIVNAREIDEVGIAGVVQKIKDRVGNTNVYISVDIDVLDPVYAPGTGTAEPGGYTTREFMQILDGLEGINIVGADVVEVAPAYDGPGDVTLLAAAQVIDSLASLMVMNGPLSTRQSTK

SEQ ID NO: 28430 - protein, 309 aa, Yarrowia lipolytica CLIB122
MAKSRYEYVKNFEQENHLLPDCHIVVRVDGRGFHKFSKFYNFEKPNDLRAIELMNKCAELIVSQFDDVIMAYGDSDEYSFLLRRKCSLFERRESKLVSTFASTFTSYYVALWGRYFNGNESRDETRETTEERKEEDMKEEERKEEERKEEERKAVKSEPRDDSRDSRSNELVIHMLPTFDARCVVYPNAQSIRDYFSWRQVDCHINNLYNTTFWTLVQQGNMTTQEAEQRLSKTVSKDKHELLFTEFGLNYNNEPDVFKKGTTIVKEFDTTGLSQRQVERKMKKMGRVRVMHCDIIRDGWWDERKWILE

SEQ ID NO: 28431 - protein, 738 aa, Yarrowia lipolytica CLIB122
MSYPDRRASFGSSPRQSAIQRLGTPVQVGSPNSNPGSVTGSFKDSMRESMKRFEEQADANKNVEEVTFNKRTPEEQHKNGSDSSKGGLKGLMDKGKEKDDASNKTDSNTNTTTKTTPSNSSKNNSNTKTNNNSNSNSSNDTKKDQSASPANPPNPADADTQSIHSVDIDNPNPEVVKAVGRHLVSDDKTRNYGATESENFDSLKLQGGDITRQLYKWQKEHEEGGLKRSKSFDAGEGASSSATQELGQDINSIKAPGGFRRNFIAQKVQQENGQDKPPTFLTRNFIEFLSIYGHFAGEELEEDDDDDDDDDYDGDDEVDENDYDEETPLRRRARKQRGAKPGHPPQGNASATKAVMLLLKSFVGTGVLFLPKAFFNGGLLFSACVLTMVAALSYWCFLLLIQCRMKTGVSSFGDIGGALYGPKMRSLILFSIVISQIGFAAAYIVFTSENLQAFILSVTKGETFVKIETLIFLQLIIFLPLSMIRDIAKLSGTALIADLFILLGLVYLYYWSGMIVATEGVADVKMFNPNSWSLFLGTAIFTFEGIGLIIPIQESMKKPEQFTPVLAGVMVGITALFVSMGAICYMAFGSEVKTVVISNLPQDSKFVNGVQILYSAAILLSTPLQLFPAIRIIENGLFTRSGKYNSTIKWQKNIFRFFLVFVTAFVAWGGADDLDRFVALTGSFACVPLVYIYPPLLHYKGVARGTTARTADVCIFIFGLCAMGYTTANTVGSWIGGN

SEQ ID NO: 28432 - protein, 397 aa, Yarrowia lipolytica CLIB122
MRLTLPRLNAAYIVGAARTPVGKFNGALKSVSAIDLGITAAKAAVQRSKVPADQIDEFLFGQVLTANSGQAPARQVVIKGGFPESVEATTINKVCSSGLKTVALAAQAIKAGDRNVIVAGGMESMSNTPYYSGRGLVFGNQKLEDSIVKDGLWDPYNNIHMGNCCENTNKRDGITREQQDEYAIESYRRANESIKNGAFKDEIVPVEIKTRKGTVTVSEDEEPKGANAEKLKGLKPVFDKQGSVTAGNASPINDGASAVVVASGTKAKELGTPVLAKIVSYADAATAPIDFTIAPSLAIPAALKKAGLTKDDIALWEINEAFSGVALANLMRLGIDKSKVNVKGGAVALGHPIGASGNRIFVTLVNALKEGEYGVAAICNGGGASTAIVIKKVSSVE

SEQ ID NO: 28433 - protein, 335 aa, Yarrowia lipolytica CLIB122
MSSRDVIRALAPLIPPEECALEMVAVARRKHRQGWIKLFVSSVCGGIMQSIGAFVSITVQGNSISGQHVGGANDWLPKVPEAGAYSIGLILITMFGLDLFNSNILFFTVGCATRKLSPWALLKSWVVSWFGNLGGALFVSYIFAYSTGLARSEGMVNASYVSVNNKLTNPTWAQLFARAVACNALVCMGIYLSFMCRTFVAKYIAILIPVFAFVYIGFDHVVADMFLISLGLFNGSPHSVGLFIHKSLVGVSVGNIVGGSVFALVVPWYLHYFTVSALHIKDSIAGVNADGVQIGTEVGEEEPKEEPSSSSAGESFNPPQAPASARIAPHAQSPV

SEQ ID NO: 28434 - protein, 678 aa, Yarrowia lipolytica CLIB122
MTGENTPLLHKVTISEPGTPPRPGTPTLRPNLIRHISNNSVKPSSSSSNDDDHHRLVPPPTPKALRPKMKSYWAYYIPAMEWIPHYTATKFWGDFCAGVSLASFQIPLSMSYATSLAHLPAVAGLYGLVIPPLVYAIFGSVPQMIVGPEAAISLVVGHALKPYLHPDSDNVIKPIEANGIIAGATGAILLFAGLVRFGFLDSVLSRALLRGFISAVGIVMCIDQSLGLLKLNGLFAELSPNNETTFSKLVFVITHWHQAHKLTAAIGLSALVVLVILRSLKKRLREKISWMLFVPEILIVVVVCTVLTDVFDWDREGVLVLGKVKPGKLHLRFPLTPSTWTDFKATFSASFILAVLGFFESTIAAKSLGTTFDVAVSTNRELVALGLCNFFGSLFCALPAFGGYGRSKINALSGATTQMSSAVLAIITMLCTAYLMPYFFYLPSCVLSAVITVVGLSLLEEAPGDIAFYWKVGGYQELFTLFLTLSTTIFWSVETGIAVGVGLSVVRVIHHATRPRIQILARKPGTNDFFNADLSLDNEDGTHSELEDIHGCLIVKIPEPLTFANTGDLRTRLGRLELYGSMKVHPSHPRIRDDDMTQFVIFDLNGMTEIDVSAAQILMEIVSRYKDRGLEVYFTRVPNDHKIRQLLDKSGISKLVADDNAVYYNSIEEALRHIDSEA

SEQ ID NO: 28435 - protein, 670 aa, Yarrowia lipolytica CLIB122
MKFSMPSWGVVFYALLVCLLPFLSKAGVQADDVDSYGTVIGIDLGTTYSCVGVMKGGRVEILANDQGSRITPSYVAFTEDERLVGDAAKNQAANNPFNTIFDIKRLIGLKYKDESVQRDIKHFPYKVKNKDGKPVVVVETKGEKKTYTPEEISAMILTKMKDIAQDYLGKKVTHAVVTVPAYFNDAQRQATKDAGIIAGLNVLRIVNEPTAAAIAYGLDHTDDEKQIVVYDLGGGTFDVSLLSIESGVFEVLATAGDTHLGGEDFDYRVIKHFVKQYNKKHDVDITKNAKTIGKLKREVEKAKRTLSSQMSTRIEIESFFDGEDFSETLTRAKFEELNIDLFKRTLKPVEQVLKDSGVKKEDVHDIVLVGGSTRIPKVQELLEKFFDGKKASKGINPDEAVAYGAAVQAGVLSGEDGVEDIVLLDVNPLTLGIETTGGVMTKLINRNTNIPTKKSQIFSTAVDNQSTVLIQVFEGERTMSKDNNLLGKFELKGIPPAPRGVPQIEVTFELDANGILRVTAHDKGTGKSETITITNDKGRLSKDEIERMVEEAERFAEEDALIRETIEAKNSLENYAHSLRNQVADKSGLGGKISADDKEALNDAVTETLEWLEANSVSATKEDFEEKKEALSAIAYPITSKIYEGGEGGDESNDGGFYADDDEAPFHDEL

SEQ ID NO: 28436 - protein, 469 aa, Yarrowia lipolytica CLIB122
MPNVLVISNRLPVTISREEDGTYKYTMSSGGLVTALSGLKQSTTFQWFGWPGLEIPEKDKPRLINDLETMFSCVPVFMDDDLADLHYNGFSNSILWPLFHYHPGEMNFDQVAWEAYTQANRLFAKKVASIVKPGDIVWVHDYHLMLLPEMLREECENNSALDGLKIGFFLHTPFPSSEIYRILPVRKEVLTGVLSCNLIGFHTYDYARHFLSSVSRILDLETMPNGTYYKGRHVVVGAFPIGIDVNKFLEGCKRPAVQERIAQLQDKFKGIKVVVGVDRLDYIKGVPQKLHAFEVFLSEHPEWIGKVVLVQVAVPSRGLVEEYQNLRAVVNELVGRINGMFGTVEFTPIHFMHRSVDFNELIALYSISDVCFVSSTRDGMNLVSYEYVACQTEKHGSLILSEFTGAAQSLNGALIVNPWNTEDMAEALYDSLTFSPEKKAENHRKLFKYVSKYTSQHWGEAFVSELKRC

SEQ ID NO: 28437 - protein, 883 aa, Yarrowia lipolytica CLIB122
MTDKDQYPTTVSEVANFSTNNDKEQYVTDVTEVDSSVLAWMAEQLQIPPSDDDGSYSPEVHFMAARFEEMNFEDACKLVRENMKYHDNDNNFRDEYRREIRDLMEALDSVGGGDDEKMSLDDPNNKVMMVRYWATIFHWWSPYPEVRAVTDPQDDTECTSETWRVWVLGTIWVGIAAFINQFFSPRMPSIGLGAGVIQLLLFPCGRFLEYVLPDKGLTFRGTRYSLNPGRWSQKEQLLTTIMVSCASGTPYITYNLMTQILPSFYGQEWARSFSFGFVFMLSTQMMGFGLAGLLKRCAVYPVKAVWPSLLPTLAVNKALLAPNRKETINGWTITKYKFFLILVACSFAYFWLPNYLFEALSYTNWMTWIAPENETLARVTGSLQGMGYNPIPTFDWNMATAAYSPVAMPLYTVLNDYIAVFISGLVILGLYYTNNFWTSYIPINTNRLYDNQGKPYQVMKILTNNRFDDEKYQAYSPPFYGAANLVVYSSFFAIYPLSFVYVTLMEWAATKEALVETAKALRHIHRSNYEGRVDPFSRYMRKYKEVPDWWFYIIMVLMFVLSVVMVQVWPVDTPVWTLVFVIGLVLAFIIPFTIFAAYTANSLSLNVISELIIGYALPGSFMALNHIKALSVTIQMQAQNYASDQKLTHYAHLPPRSIFWMQIWATFVNGLVCLGVLSFQVDMPDICEPTNKYKFTCPGDTTFFTASVAWGVIGPKKMFDKYPAMKWMFLLGALLGVLFYLLQVTLPAFLAKKYPSKEKTIDKIRRQLLYINPIIVCGGFMAWAPYNLSYRTGGLYLALLFNMYIKSRYLAWWKKYAYILEAGMGTGIAICAIIIFFAVQYNPVIVDWWGNNVPYVGVDGTGLSIIEPIPDVGYFGPAPGNYD

SEQ ID NO: 28438 - protein, 414 aa, Yarrowia lipolytica CLIB122
MDRLNNLATQLEQNPAKGLDAITSKNPDDVVITAAYRTAHTKGGKGLFKDTSSSELLASLLEGLVKESKIDPKLIGDVVCGNVLAAGAGATEHRAACLVAGIPETVPFVALNRQCSSGLMAVNDVANKIRAGQIDIGIGCGVESMSNQYGPNSVTPFSNKFQNNEEAKKCLIPMGITSENVAAKYNVSRKAQDAFAAKSYEKAAAAQAAGKFDQEILPIKTTVLDDDDNEKEVTVNKDDGIRPGVTAEKLGKLKPAFSAEGTTHAGNASQISDGAGAVLLMRRSVAEKLGQPILAKFVHCKTVGVPPELMGIGPAYAIPAVLEDLGLTVNDVDVFEINEAFASQALFSIQHCGIDESKVNPRGGAIAIGHPLGATGARQFATLLSELKESGKKVGVTSMCIGTGMGAASLVVAE

SEQ ID NO: 28439 - protein, 876 aa, Yarrowia lipolytica CLIB122
MTDIKPVDLDTKEYDIDTADVREITLHTEEWIAQKLLIPPSDVDGTYPRSVTVISQAFENMSEAEAIAIVKKAWDQHSSDANLTAEHKDVLQHLIEMIGEGKEGEDESVPPEDLEELKYQACLFHHWSPYQQVRSVTTPFDDQDEECETFRCYVIGIIWVGIAAFVNQFFSPRQPPIQLTVAVIQLLLYPSGRLWQFIFPDWGFKVRGVRYSLNPGPWTQKEQLLATLMASVANVPPYIDYNIFVQYLPKFYNQPFALNFGYMVMMMLTTQFMGFGMVGFLRKLAVYPAKAMWPTLLPTLAVNKALLAPNRKEKINGWTMTRYTFFLLVSAIAFIQFWVPNYLFQAISTFNWMTWIAPNNVVLAAITGGASGLGFNPISSFDWNQFTAAVFPVMFMPISSLVLGVSGMFVAGFIILAVWYTNTQYAGYLPINSADVFDNTGLPFNVSRILTNNEFDEAKYRAYSPPYYAAANLVVYGAFFAVYPMSFFYTVIMEWEIMKVSLRDLYDGFKHWKRSNYYGFDDYFSRTMSKYAEVPQWWYMVILLITFGMSIALIEHWNTKATVWMLVVVMLINFVCLFPFTIVMSYTGIQFTLNVLVELIVGYALPGKGIAMMILKAFSVQIQIQCQNFLTDQKVGHYGKLPPRSMFRVQMLATIVAGLVTLGVMQFQLNDVEHMCDVKYQTSHEKFTCPSETVFFSASVIWAVVGPKKIFDSQYPILRWCFLIGFGIALLFVFLQKFVPRMLKKRYPDRASEITKWEARFKEVNPSIICYGFLNYAPYNLTYVWSGVYLAFFFNVYIRKRFPGWWEKYTYVFCSAMNTGIALSAIIIFFALQYTNVNLTWWGNTVSFAGVDGAGGAGIVPIPDKGFFGPDSAHYP

SEQ ID NO: 28440 - protein, 803 aa, Yarrowia lipolytica CLIB122
MADKARINNAKAQLSESYNALLDHFHATELKVIGNYNVVRLIGQGSFGKVYLATHKFTNTKVVLKSSAKSAPNLVREIHHHRQFKHPHITRLHEIIVTETVVWMVLEYCPGDELYTYLVENGRLSVDETRKIFAQLCGAVTYVHNTKNCVHRDLKLENILLDRHHNVKLCDFGFTHGYESRVMLETICGTSAYMAPEMLLGKKYSGEAVDVWSLGVILYALVCGEMPFDEEDEEDTKNRIMNAEPDYAKHQLPADMLALLKGMLCKNPHQRPKLAEVLNNGFLGLEGMRQAEMLAAKEPKLFSTKMEKHVLKRMKALNISIENLYESVSKMKCDSLAGFWAASLEKAYKKERRKQSRRRSRSAFSYSFDIARKRPSEENIGDSMQMTAPHSPSSPLSKVRHFDGLGIRNRLSGDFRRPSSEQVSTPRQSLDFRPPHRSTTTGEAMTSPPAPDSPRSPRDTATNTPDTSVTLERPHTVGESPRLQASPFDNRSVTSDGSSLKKKGNFGKSLKNVMLKMVFIGKKKPTTEGNTQSEPSQSSGTGRSLPSSLHSYSIKNKSNTSLEEGIAPTETVPDVPPLPQSAPGLTSLNSQDNIEPMTSFRRTTRRERPISQISSFSGISQISGISAISSAPSVSSSLERSGSGSRRIVMRRPYFGRRSTSSSFSSIQSHRKTHSKASSTSSTDEYLGDDTTDPGSPGPSETPTTSYGRHSTSNKKAHSKQHDYNETAQFNTYKPPSRRRKSATKVSSPNMALFPSRSRPTNSKRPDRKGSVIEEEVEDEYVEESFDGDDGDGLDFDTRGRSF

SEQ ID NO: 28441 - protein, 486 aa, Yarrowia lipolytica CLIB122
MADATSTQAPLPTTGNGGDSLTQNLNVPFLGADMVWIMTSSALVWIMIPGVGLLYSGMSRKHHALSLLWASIMCCALVSFEWFFWGYTLAFSHKAGKFIGTMDNFGLMNVLAAPSVGSSAVPDILYMFYQGMFACITGMLMVGGAHERARLGPMMVYLFIWMTVVYSPIACWTWNPSGWLAVLGGLDFAGGGPVHMSSGAGALAYALWCGKRRDPAVEKLPHYRPSSVTSVVLGTVLLWFGWFGFNGGSSGNASIRGFYAAANTNLAAACGALAWMCVDFFRKGRKWSTVGLCSGAIAGLVGITPAAGFVPIWSAVPIGIITAVFANISGDLKNLLRIDDGLDVFSLHGVGGFCGSVLTAFFAADYIAHLDGATEIKGGWLNHHWAQLGYQLAGAFATLGYSFVVSSVILVIMNRIPYLNVRMTEEEEMLGTDMAQIGEFAFDWEDSGVLDLHGQNPNGMGVTPNVQTPKPSSINENKEAAESDSV

SEQ ID NO: 28442 - protein, 887 aa, Yarrowia lipolytica CLIB122
MNESEFTDRANKILKTSVELAQQHQQGTLQPIHLLAAMFDAEDDASDPYIKAVVERGKYDWDQFKRAVNKALVRLPSQSPPPDELSQSPAFSKVLQNAIKYKQRQKDEYVGQDHILMALLDDSSIESILKECGIKKDVMEANITAVRGKRRIDSRTADGADEFEFLNKYAIDMTKQAREGKIDPVIGREEEIRRCIRVLARRTKSNPCLIGDPGVGKTSIVEGVAQRIIDGDVPNVLANCQLFSLDLGALKAGAKYQGDFEERIKGVLKEIEDSKDMIILFIDEIHMLMGDGKGDAANLLKPMLARGSLHCIGATTNEEYRKHVEKDAAFERRFQKIDVREPTIRETVAILRGIQNKYELHHGVRILDSALVSAAQLASRYLTYRKLPDSAVDLVDEAAAAVAVARDSRPEHLDSLERELDLLMIEVKALERDQHADQGTKERLDAAKHRVADIEEELGPLRETFERERAGHVELNNLKHKVDELETKALDAERRRDTSTAADLRYFAIPDLKKRIVELEEENAAKEKSMIKDVVGADQVAETAARLTGIPVTKLTQAENTKLINMEKVLSREVVGQPEAVKAVSNAIRLSRSGLANPNAPASFLFLGLSGSGKTELAKKLAGFLFADEQAMIRIDCSELMDKHSGSKLIGAAPGYVGYEEGGILTEALIRKPYSVVLFDEVEKAAPEVLTVLLQVLDDGRVRSSAGKVVNASNCIIIMTSNLGAEFINRSTSTTIDQSTRDLVMEAVKGHFRPEFLNRITAMVVFNRLSKKSIRRIINIRLHEISKRFEHNNRNLKLHLDEDAMDYLVENGYSPDLGARPLNRLIQNEVLNKLAVMLLKHQIKDGEEVRIIRGDKGLEILPNHDGETDMELAEDSYDDFDDEMDLD

SEQ ID NO: 28443 - protein, 443 aa, Yarrowia lipolytica CLIB122
MLLRRVVHNTSSIRFYSSMTLQPLPKPARFAQTPKDVWSLINEAAAASEEASGKKVVNLGQGFFSYSPPQFAIDAAKKALDVPALNQYSPTRGRPSLLKAVSDAYSPYFGRTLDPASEIVITAGANEGMYAAFTAFLNPGDEVIVFEPFFDQYISNIELPGGKVVYVPLHPPKDSQHTSSAANWSLDIAEFEAAITPKTKMIVVNTPQNPTGKVFSKEELTQIGELAVKHNLIVLSDEVYDRLYFEPFTRIATLNEALARLTLTVGSAGKIFAATGWRVGWLIGNPDLIKYVAAAHTRICFCVNSPLQEASAQALIQAQTNSYYDDTIASIKKKHELLNSAFEYLGLPYSQAQGGFFVLVNFSKVKIPADYAFPSDLDGRAKDFRTAYWLIKEVGVVAIPPTEFFIPEHAHLAEDYLRFAVCKDDDLLEEAVERLKGLKKYIE

SEQ ID NO: 28444 - protein, 1049 aa, Yarrowia lipolytica CLIB122
MTLIVVSLFLPYTINFNLDEGQRPKVDVTTEPVAPSRPPISRSNSDLKTLPTVPKSGGVSALTLALERFPQEKPSQQNSGGSSLTSSVTQTPNPALPSMFHKAEPTGPAPAIVHPDEFFKPSPHAQASAIVQPPSAVAGALQVSSAGSPQQAGFLENELALQKMKHPTVPPSASEPSSVSSANSNPAEYPTLRPPRPQYNQPQSRASSPPPRVVDKRRPVSGQTAMRFIDRFGQQKPSDSFQSAKDWTVEKSHKGNGGLRNAVNRYCASTNHKKLWVGTLGMPSDELGDVSKVEIERKLTREYDSVPVFAPDNTFEAHYTHYCKGILWPTLHYQTPDSDKSKAYHDHSWEHYKALNQMVADKVIEVYKRGDVIWIHDYHLLLVPEMVRQQLPNARIGMFLHVTFPSSEVFRCLAARNELLTGMLGATCIGFQTAEYGRHFLQTCNRLLVVDASVDGVENNDGRFTAVVACPIGIDPPSLQKHFMDPEVDKWRRLIRARWPGKRLLVSRDKLDSLRGIKQKLLAYEHFLINNREFCDNVVLVQVCLSGNESDSLEGELVHIMDRINALTDDLSNQQVIFLHQDIEFEQYLAMLAEAEAYVALSLREGMNLTCHEFILCSKDNSGQLILSEFTGSASVLDNDDVLVVNPWNMRQVSDAYKTALTMDRGTREKHRGRLVEFVEGHTCLQWATTFLQHLEDAWVEHQKSKRLLPRLNIAYAKERYDIVAKQPGKYRLFLLNLEGRDFSSPHTSKPALSSSAAVYSSTHNRIPILTELVSDPYNVVYIISSDARHDIERLFRNVPNLGIIAENGGYLRPYRSDQWIRMCDEEDVHNWKDSVLEVLESIKERCPGSSIKSDETTITFQFTPQYSAEQEQDFSFDFAGECVSHINDAFSTQNITARFNDDRILVENQQLSRLAAVKRAVAIFEKTCKIGGDIESKGINSGHLTVAPSSPTLTRTRSYTISAPGPSYDATISYVFVAGNDQSDYPVIEWANSLGDVETVLTVGLHSEHSPAAVSVEGLNGLTLALRELAVGDRSDIKGDRDTRERTP

SEQ ID NO: 28445 - protein, 365 aa, Yarrowia lipolytica CLIB122
MSQTPLPCRYKTAKTLGQGTYSVVKEAMHIETGQYYAAKVINKKLMSGREHMVRNEIVVLKRVSQGHKNILTLVDYFETTNNLYLVTDLARGGELFERICSKGAYYESDAVEIVKNTLSGVAYLHSHGIVHRDLKPENLLFRTAAEDSDLLIADFGLSRIIDEERFRTLKTTCGTPGYMAPEIFTKAGHGKPVDMWALGVITYFLLCGYTPFDRDSSAEEMQAILAGDYAFEPEEYWQDVSEEARDFVNKCLCVDSDKRITATEAQEHPFLTRDLSKVAENETNLLPHVKSNISLRRLTGAMSGTSLSEQNKAISRLKESESMDGAYCFSPENNKPGVTPTGSVGVKSQRAELAELGLKPLTKMQ

SEQ ID NO: 28446 - protein, 319 aa, Yarrowia lipolytica CLIB122
MSSNSIKLLAGNSHPALFKLVSERLGVPLSNIGVFQFSNLETSVTIGESVRDEDVFVLQTGCGEVNDFLMELLIIIHACKTASARRITAVIPNFPYARQDKKDKSRAPITAKLMANMLQTAGCDHVITMDLHASQIQGFFNVPVDNLYSEPSTLRYIREHVDVSSAVIVSPDAGGAKRAAALADRLDLNFALIHKERQRANEVSRMVLVGDVKGMTCVLVDDMADTCGTLAKAAQTLKENGARDVIAIVTHGILSGPAVQRINDSELLKVVCTNTVPHDHLKAECPKLDTIDVSPTLAEAIRRLHNGESVSYLFRNAPM

SEQ ID NO: 28447 - protein, 371 aa, Yarrowia lipolytica CLIB122
MSMKQLETSMSSVSLQEKKPTRIKIALHPQSKSEQNETDRASKIPTGRISTTQPQTYYRPTNLTKTPASQVSRRSSYTTDPPSPLTGITGFRNYSLDDFEIGKALGKGKFGKVYLVKDKKTGFVSALKCMEKKELVEGNVEKQFRREVEIQSNLRHTNVLRLFGHFHDKDRVYLILEYVVHGELYKLLRNQKRFTESTASSYIYQMSEALLYLHGKNIIHRDIKPENILLHFNDTIKISDFGWSVHAPSNRRSTLCGTMDYLPPEIVQSRPYDKNVDVWSLGILMYEFLCGAPPFEEPGGAQATYRRIVKLDLRIPPYVSADAADLIKRMLTLDPAKRFKLKDMHKHPWIVRLRPTWKYKVPKTASHERSA

SEQ ID NO: 28448 - protein, 364 aa, Yarrowia lipolytica CLIB122
MVLSKYLDLPQHGAVLAEYIWIDAHFNIRSKCKTLDKKPTSIEDLPEWNFDGSSTDQAPGHDSDIYLRPAAIYPDPFRRGDNIIVLAECWNNDGTPNKFNHRHECAKLMSAHEKEVIWFGIEQEYTMFDESDNPVGWPKGGFPAPQGPYYCGVGTGKVFARDVVEAHYRACLYSGINISGINAEVMPSQWEYQVGPCEGISMADELWMSRYLLHRVAEEFGIKISFHPKPLQGDWNGAGCHTNVSTKSMREPGGMKHIEAAIEKLAARHKEHIAVYGEDNDMRLTGRHETGSIGSFSSGVANRGCSIRIPRSVAKEGYGYFEDRRPASNIDPYLVTGIMTETICGSIPDADMVEETKRGEEEGF

SEQ ID NO: 28449 - protein, 334 aa, Yarrowia lipolytica CLIB122
MLSSTLRSSVKALRPLRASRDLSYGFIGLGRMGLPMALNLQKKLPGVDADSKVNVFDMNKAALEQIAKDKDPKGAQLEVLGSAVDVASKSDVIFTMLPEPVHVRGVYTDLVNNLGDKTSKIFVDCSTIDTQTSIECGKLVTDKDASAAFVDAPVSGGVVGAEKGTLTFMVGCNKDKQQVYKQVEELLKLMGGRIVNCGTQGQGLAAKLANNYLLAVTNVATAEAFHLAEKLGCDLKLFSDIVNSSSGRSWSSEVNNPVPGVNPATPSSRDYVGGFGINLMRKDLGLAIDVAKQSGSSMLVADKTYEVYQNIEKGDNYQGKDMSVIYKFLQDQDQ

SEQ ID NO: 28450 - protein, 532 aa, Yarrowia lipolytica CLIB122
MPSQRWTQINQGPDRDSLELASLASSHSDGNEVHSPSSSRNLSPWDSPIGSDFGDDREPLHERTESGHTVESFQLQQSTDVGPQQALDKQKSLTYFNCLALVMGLQVGSGIFSSPGTVDHNAGSIGSAIIVWAVAGVLAWTGACSYTELGSTIPLNGSSQAYLNYVFGSLAGFLFAWAALMVLKPGSAAIIALVFGEYVVKMCIGTDTPAPFWAVTLAALGGLAFVTGLNCFSTKSSTRAGNGFLVLKLGLLLLIFIVGIVGVAKKETRSAQISENWFNGASTKLGNYAVALIAGVWAYDGWDNVNYVTSEMKNFRRDLPRVIHTAMPVVIFCYLLVNLAYFMVLDKEEVRSTQTVAVLLAGRVMGRAGEIIVSLLIALSCLGALNATTFTAGRLAYASAQEGHLPKLFSRLSARNTPIYCILMECTLAAVFIFFGGFESLVMFYGVSSYLFYFVTVASVLVLRFREPELDRPYKTFLTTPIIFCSVALFLISYGFFEKPRQALLSLLFIGSGIPVYFLRHYGYMGVSEPRA

SEQ ID NO: 28451 - protein, 723 aa, Yarrowia lipolytica CLIB122
MTSYAPSRIEVDEDDTNNPSMPPILSDYARELLAEKMRSTSGPPSAHNTSVPGRLRSYGREIRDPRELSSSSRRAPITTTPARAHHMAAASTTQDDIMDSDSPERPSPYSPQTPGVGLRTKTTHATSTAPNNHNNGHTQTTRVRRIGRGLGPPKRAPPPSEGGVPVPVGDEMVVEEVISNETGDLSPQMNRLRFSENHHGNGVSPNRSGLVRSDRSARSDRSMADRSGSSGMGGYKSSPLSGPRLHERQVLAPVSPNTLPPPRMDKLMHNEEQQWRERMAREEEREREWQRHERERQERERQESERLERIERERMEKEHMERVERERMELDRQRARERERERERERDRERERERERERDLERERERERDRERDRDRDLDISSVQAYDKRKITINGKQYVRLEKLGRGGSSVVYKVQAAGAKDVYAVKKVIFDDVDESVIKGFKGEIDLLMRLKHENRVVELMDYEMRSSQVYVVMECGEIDLAHILNNRLNQPLDISFVRYYATELLKCVDAVHRNGIVHSDLKPANFLLVKGILKIIDFGIANVVPDYTANVHRDAQMGTPNYMAPEALIETKNSNGVGPRIKIGKPSDIWSCGCIIYQMIYGKPPYADFQGMTRIVAIINEKTVVQYPAITPLGNVPVPPAAIEAIKGCLIRESNRRWTLEQVMDHGFLNPMAVQKDFIKNLLSNAIDYGQAHTEKVRGRELQKLVDSVWMSLSKEEINRK

SEQ ID NO: 28452 - protein, 879 aa, Yarrowia lipolytica CLIB122
MSFEKDEKETNLGEVHDIEEVEPSLLDWVAQKLGVPPNDIDGTYPAEVHFMAEKFAAMTEDEALVICKENLAYHQVDPNFREEYKIELEELLNSYHGSHDPTQQSVYVDEKEDHDVDPTERAMLLRYWATIFYWWSPYPEVRSVTDPFDDVNQTTLTWRVYVVGTIWVAVAAFVNTFFHPRQPAISLSGSVCQLLLYPSGRLLQYALPDWGFTIRGKRFTLNPGVWSQKEQLLCTIMVTCALGTPYITSNVLTQYMPIYYNQSWAGGFGYSFLMMLVTQYMGFGLAGLLRRVCVYPVKSMWPTLLPTLAVNKALLAPNRKEKINGWSISRYYFFFLVFCGSFLYFWIPNYLWEALSTWNWMTWIAPNNDNLAIITGSVGGLGYNPIPTFDWNIINFGIQPILLPLYTSINMYVGVFISGFFIMGIWYSNNNYTKWIPINTNTLYDNTGKKFKVTKILTDYVFDEEKYKNYSPPYYSAANLVTYGAFFAIYPLSFVYTVLCNYEMMWVAIRDTALAMKNFRRSNYEGLEDPFSRHMKKHKEVPDWWFYVILLIMFGLSIALVEHWPTNTPVWVIVLCLGLVFVFIIPFTLFLSFTGVPLSLNVLAELIVGYALPGKFQALNLAKALSVQIASQAQNYASDQKLVHYSHLAPRDIFATQLWATLVNGLVALGVMQFQMHDVKNICEPDNAMKFTCPSETTFFSASIIWGVIGPKRIFDHQYPTLKWMFLLGAGVGLLFWFIQVMLPKILLKYKPEKTQAILRYQRIVTKFHPVIFCQSCLNWAPYNLSYFTGGLYAAIFFNGYVKTRFLAWWRKYAYVFSAGMDTGIALSGIIIFFAVQYNDYSISWWGNNVPYAGVDTLGVTHPPLPDVGYFGPGPENYP

SEQ ID NO: 28453 - protein, 767 aa, Yarrowia lipolytica CLIB122
MDPGSVWSEIKYNACLFRHWSPYPQVRTVTDPFDDPEEECETLRVYVIGTIWVAIAAFVNQFFQPRQPPIQLSVTVVQLFLYPSGRLWQYIFPDWGFRYKGKRYSLNPGPWTQKEQLLATLMASVSNIPAYIDYNIFVQYLPMYFNQKFALNFGYMFMLMFTSQFMGFGMVGLLRKLAVYPAKAMWPTILPTLAVNRALLAPGRKENINGWTISRYLFFLIVTVGAFLYFWVPNYLFTALSTFNWMTWIKPQDLDLAAITGSISGLGFNPIPTFDWNVANGLVQVLFIPIPSLLNIYGGFAFGGLIIASVWYTNVYWAGYLPINSNAVFDNTGKEFDVSKILTNNLFDEKKYKEYSPPYYSAANLVLYGGFFALYPLSFFHLCFTEWHLMKNSLVDIYKSMRDWKKSNYYGFKDHFSTTMSRYPETPQWWYLAILLITFGMAIALIEHWDTKAPVWLLIVVIIFNFIFLIPFTVILSVSGAQLTLNVIIEMIVGYSIPGKAIAMMILKAYSVQIQSQAQNFISDQKTGHYGRLPPRAMFRAQMWATLCAGLVVIGVMQYQLTGIEHICDQKYQAEHEKFTCPGEMVFFSAAIVWSIIGPKKIFNKQYPMLRWCFLIGFGIAIIFAVIHKWGPDFYRKRRPDKKDQILKVQRRLQTFNPSVFVYGMLNYAPYNLSFMTGGIYAAVFFNMYVRNRWPAWWEKYVYIFGSAMNTGIAVSAIVIFFALQYTNVNLSWWGNNVSTAGIDLTGAGRLSIPKVGFFGPDSANFP

SEQ ID NO: 28454 - protein, 624 aa, Yarrowia lipolytica CLIB122
MSITSDELNYLVWRYLQEAGFEHTTYAFQREAGVHHLDKHFSNRIPLGALVNVAQKGIQFMEVEASVKEDGTIVDSDDKPFSLFGNDYVRSGTPEIEEEQTNALKGAATALLAAPSDITAGANVAVTKIDPGLPTTAPTLTAPANNNNIKKVVAATMTDRATNTQDTQNATSQKDMTREEVPIISLTPSVDVGSVSQCQWSPVDKNVLLTGAAGPVASLLVLNKGGEEEEGTAGTLLPTHGDEMDVDSEDTNSTKKMVKIASTTNLAHSPIPQGDKDITAVSWNRIGTLCVTAAFDGQLRLWTAQGKLRHILSLHRAPILSVRWNKTGSLVLSIDCTNTLVVWDTTSGEVRHHLSLTVAPPPASAAVSAVSAVVGDIQAALGGKDESHESAESITTGFDADWIDGLTFVMTGENHSIVVCRVGEKLPLLVFKGHSAGINDIQFDHVGLLLASASDDHSVRLWQGRSVASTATLLGHTAPVMVVRWLPLLNAANLVGGANIGTMSLVVSASLDGTARVWLPENARCLAVLALHESAIFAMEISPDRKWLATGGMDGVLVLWDLAGLEDNECTEEGAGRALARLEIGAPIDCIGWNLESDVICVGTSGKSYVVEWNEGMRETKVVA

SEQ ID NO: 28455 - protein, 782 aa, Yarrowia lipolytica CLIB122
MFRVNAKNVQRLRARPLAHASTRTQVQTRALSTAVRPTTSATTSCSTWGTIRTPTMIRAPGSLGSPRFITMTQNPGGEKSYLESYGVDLCEKAKEGKLDPVIGRDEEIKRTIQILSRRTKNNPALIGLAGTGKTAIMEGLAQRIVNGEVPESMKGKRVIALDVGGLISGAKYRGEFEERLKGILEEIDKAEGEVILFVDELHLLLGLGKGEGSVDASNLLKPALSRGKLQCCGATTIDEYRKYIEKDAALARRFQSVMVNEPSVEDAISILRGLKERYEVHHGVRLTDAALVTAAVYSNRYISDRFLPDKAIDLVDEACSALRLQHESKPDELQELERQTVTLEIELESLREEEDPLSVERRKKVEEKLEFKKGEIERLTKVWEDEKRAIDQIKETQKTLDGARTDLDTARRTGDFAAASKIQYQDIPELERILKDAESSDAGSSSLLHDSVTPNDIAKVVSRMTGIPTSSMMKGEKDKLLDMEVCMKSRVVGQDEAVDAVADAVRLHRAGLTNQKRPVASFIFLGPTGTGKTELTKGLAEFLFDDENAIIRFDMSEFQERHSIARLIGSPPGYVGYEESGELTEKVRRKPYAVVLFDEFEKAHPDVSKLLLQVLDEGTLTDSQGRKVDFTNTILVMTSNIGQEYLISDSPDSKKKVIEALKSHYAPEFINRIDETLVFNRLTKEALTEIIDIRLLEVQARLEDKRITLFVDDEAKQFLVDHGYDPMYGARPLNRLIQKKVLNPLALHLIQGRTRTGENVHVTVKDGDIYVPANHETGEIEE

SEQ ID NO: 28456 - protein, 453 aa, Yarrowia lipolytica CLIB122
MSEYELPDLVWVTTSGALVWLMVPGIAFLYSGLSRKNHALGALWTGMMTLGVSFFQWWLWGYSLSFSAKDNGQHFIGGMEHVVAQHVWTSRSASTPTVPDVVCYFYQGMFACVTAALMIGGGNERVRLGPLAVFLFIWQTIVYCPIAYWTWNPNGWAARLGSLDFAGGGPVHMCSGSAAMAFALVVGRRKSPACDFVPAFRPSSVAYIIMGTIMLWFGWLGFNGGSAGGASVRGIVAMVNTNLAASCGGLTWMMVDYFRHNGKWTAIGICSGAIVGLVGVTPAAGFVPAWSAVVIGIVSGVAANLGIGIKGVVYIDDGLDVFALHGIGGFTGSVMTAFFASDWVTKTDGVTVIQGGWVNGHYVQLGYQLASACATIGWSFAITYLILITMDLIPFLTLRMDAVDEQLGTDVTQLSNECPEQWEELTLYLRPWLENVEKEKQERMAQEAMHQVV

SEQ ID NO: 28457 - protein, 874 aa, Yarrowia lipolytica CLIB122
MDSPTEEKFNDKKSPFEKDAIEVDFEAAEVTDISFVDYVGEKLNFVPDENGEHTKNVRLMASFVAEMTEEEAEEILLKFIPLHEDDYNLRLEQKEYLKSLVKGEKEAPDPTTYSMDLRIEAAAIKHWSPYVEVRAVTDCWDDMDEPCETIRSYAIGLVWLLVGCFVNQFFIFRFPSISISSDVLQLLTYPCGEFLARVLPDWGFTFRGTRITLNPGPWTRKEQMFATFFLSGGDGSTYVSAYNLPTQLLPMYYDQKWATFGYQIMLTLSSQYIGFGFAGILRRFAIYPTKAMWPMQMPTLALNRALLDPERKQSINGWTISKYWFFLVVFAGSFVYYWIPDYLFAALSNFNWMTWIAPNNVNLALLTGQSGMGINPIPTFDLNVIGVGNVVTPWWSVVNILVGAILGTFTIIGVYWSNIRWTAYLPMNTPGIFNNKGGSYKVTKILTNGVFDEEKYQKYGPPLWGAANLVLYGSFFSLYTLGFVYTMLAYWRDMCTAAVDFYNGIAFWNGRKRTEVDSPFARQLKKYPDVPDWWFFLILLISIGFCIGTVKGWPTSTPVWGIFFVLGINVVFLVPICLLQAYTGNGFALNVLVEIICGYALNGRPTALNILKAYGVNVDSTSQGFVSVWKTGMYAYVPSRAIFRTQILSTLINAFVTVGILQYQLTLTDICTPAQRATTKFTCPNQNVFYSASVLFGAIGSKRVFGTGGGDGLYPFLKWCFLIGAVVALIFFAIQYTIPAYIGKRYPERKEAMVRLSERLGKINPVVINMGFLQFAPGNLSYITGGVYLAAFWTLYLKKRYTEWWAKYTYVMVAGVNVGIALAAIIVFFALQYSDIELSWWGNNVPYAGADGNETPLLTLAPGQLIGPQPGHFP

SEQ ID NO: 28458 - protein, 498 aa, Yarrowia lipolytica CLIB122
MEMLEKRGGDVWQYTYDTGDVAYITVSMCMILVMIPGLGFLYSGLARRKSALSMIWVCFMGAIVAQIQWYFWGYSLAFSPSSNRFIGNLDNFGLKNILKHEDGSRKYPELLFAGFQGMFCSVTVAIVVGGVAERGRLLPAMIFAFCWATIVYCPIAFWIWGPNGWAGAHWDVLDFAGGGPVEIASGIGGLAYSFALGRRKEQLLLNFRPHNVSLVTMGTALLWFGWLGFNGGSALGSNLKAVYAVWNSNIAACFGALTWCLLDFRLEKKWSTVAICSGIISGLVAATPCSGIIPLWASVPLGIVAAAICNFSTQIKYILKIDDSMDTFAEHGVAGIVGLIFNAFFGADYVIGLDGSTPHGGGWVSNNWKQIYKQICFVLAASGYTFVMTVVLCYAINFIPGCKLRASEEAELRGMDEDQIGEFAYDYVEVRRDWLAWTPPTKSHMHDEPEHSTDADAIEANADVLAGSSPNDQNSSMEQPPTSSQATSADDEKNGIHP

SEQ ID NO: 28459 - protein, 896 aa, Yarrowia lipolytica CLIB122
MENISDEVVYTTEPPQTTDEKKDQTDYDASIAEVSMTTVEWVAQQLLIPPSELDGSYPEDVHYMARKVEEMSNVTAASIIRANIDYHMNDKNLPAGMMDECRDLLEEYTHGPEGEKEDEMVGDYAGDDFQPENSLMMRYYAALFHDWSPYPQVRSVTTPIPADPNEHVETIRCYIVGTIWVAISAFVNQFFYPRQPAISLTTPVLQLFLYPSGVLLQYILPKWGFKLWGIDFALNPGPWSAREQLMATLMCSVAAVPPYINSNIIVQYLPMFYDQSWALGFGYMFLFMLVTQYMGFGLAGLLRRVAVYPTRAFWPTSLPTLAVNKALLDGHRKETVSGWKITEYQAFMMFGFGAFLYFWVPNYLFTALSTFNWMSWIAPNNINLATVTGSVTGMGFNPIATFDWSVITALVQPVYMPLYTIVTQYVGFVLSGLCILGVWYSNYYNTAYLPINSNDLFDNTGQPFEVAKVLTNSQLDEDKYHNYSPPYYTAANLVLYGIFFAIYPMSFFYYVANEWSVCKQSVKDIWLSIRYLNRSNYEGRDDPFSRQMAQYKEVPDWWYYAILIVMFGLTVAFVEHWEVQTPVWSIVLILCVTLVFLFPFTIVMSATGAQLTLNVILELIMGYTIAGRPIGINVAKAFAVQIQAQAQNLSSDQKIGHYMALRPRSMLRVQLWATMVNGLVTIGVIQFQLTKIEHFCDIKYQKEHEKFTCPNERTFFTASVIWGLFGPKRMFDNQYPVLRWAFLMGFGVFLLFWGVQTVLPWALVKKYPQKERKIRKWQDRLMMVNPVLVAFGGLSWAPYNLSYMTGGLYIAVLFSYYLRKYYTAWWKKYTYVINAALTTGTALSGIIIFFAVQYTNKDLSWWGNNVPFAGQDGAGPPLMDIPADPGYFGPPPSHYP

SEQ ID NO: 28460 - protein, 312 aa, Yarrowia lipolytica CLIB122
MGGSSDTQHFWIDFLMGGVSAAVSKTAAAPIERVKLLLQNQEEMIKQGRLSRPYKGIIDCFRRTWGEEGLASFWRGNTANVIRYFPTQALNFAFRDKFKAMFGYNRKKDGFWLTLYGNIASGGMAGATSLFFVYSLDFARTRLANDAKSVTKGPDGKPVEGQRQFKGLIDVYVQTIKSDGVQGLYRGFVPSVIGIVVYRGLYFGLYDTLKPIVLVGPLEGNFLASFLLGWVVTTGASTASYPLDTVRRRMMMTSGQKVKYKSSIDAFSKIVAAEGVGALFKGCGANILRGVAGAGVLSIYDQLQMIMWGKKF

SEQ ID NO: 28461 - protein, 785 aa, Yarrowia lipolytica CLIB122
MKFYIDDLPVLWPYPRIYPEQYAYMCDIKKTLDVGGNCILEMPSGTGKTVSLLSLTVAYQQHYPEHRKIIYCSRTMSEIEKALAELKNLMKFRTETLGFEEDFRGLGLTSRKNLCLNPNVRYEKKGYIVDEKCRAMTSGIAKQKLAAGEDVTLCEYHENMNDIEPHNYIPPGVFTFEDILAYGEEHKTCPYFTVRRMMAFCNVIIYSYHYLLDPKIADRVSKELSKDCIVIFDEAHNIDNVCIEALSVDITEDSLKRATRGANHLAKKVSEARSSDSEKLKNEYNKLVDGLRDLESGEQEDTFLANPVLPEDLISEAVPGNIRKAEHFVAFLKRFIEYLKSRMKVLHVISETPASFLKHLRDLTYIERKPLRFCAERLSYLVRTLELTHVDDYTALKEIAVFATLVSTYDTGFQLILEPFETDQATVPNPILHLTCLDASIAIKPVFDRFSSIIITSGTISPLDMYPKMLNFETVVQESYTMTLARRAFCPLIVTKGSDQVAISSRFEIRNDPSVVRNYGNLLIEFSKITPDGLVVFFPSYLYMESIISMWQTMGILDEVWKYKLILVETPDAQETSLALETYRTACSNGRGAVMLCVARGKVSEGIDFDHQFGRTVLMIGVPFQYTESRILKARLEFLRDNYHIRENDFLSFDAMRHAAQCLGRVLRGKDDYGVMVLADRRFAKKRNQLPKWINQAILDADTNLSTDMALAAAKKFLRTMAQPMNKEDQEGVSVWSLEQLQEYQGSKKDGGYRLAPEDAMDIDEKDLEEGLREVEQAKKEIAAR

SEQ ID NO: 28462 - protein, 151 aa, Yarrowia lipolytica CLIB122
MAFMQRSIFALRAATPAMRAPAFRIAPSMRRFISTETKDAIETAIGTAPVVLFMKGTPEFPQCGFSRATIQVLGHQGVDPQKFAAFNVLEDEELREGIKEFSQWPTIPQLYINKEFIGGCDIVMSMSQSGELAEMLQQQDLLAPEEEEHME

SEQ ID NO: 28463 - protein, 159 aa, Yarrowia lipolytica CLIB122
MEYQEGFASREYDNGLVYQLPNAQQVPRQQPGGPQLQQQHHSPGDTPPQMVTKYHTQIDVAAAAAAAAASEPDPEPETEQPFYVNAKQYHRILKRRVARAKLEESLKVARGRKPYLHESRHKHAMRRPRGQGGRFLTAAEIAEKERQEAEEAQAQGENK

SEQ ID NO: 28464 - protein, 329 aa, Yarrowia lipolytica CLIB122
MTSNSIKILSGDINQGLAEKVAARLGLPLAKINIFRDSNRETSITIGESVRDEDVYIICQVGCGEVNDRILEMLIMINACKTASARRITAVLPNFAYARQDRKDKSRAPITAKLMANMLQTAGCNHVITMDLHASQIQGFFDVPVDNLYAEPSVVNYLKSEIMHNVNGQPGDHTNTIIVSPDAGGAKRAAALADRLDLNFALIHKERARANEVSRMVLVGDVKDKVCVLVDDMADTCGTLAKAADTLFEHGAIKVIAIVTHGILSGRAIEIINNSKLDRVVCTNTLDLQTKMDQCPKLGIIDISGVLAESIRRLHNGESVSYLFRNVPL

SEQ ID NO: 28465 - protein, 883 aa, Yarrowia lipolytica CLIB122
MSSKDSFNIDPSIHESPDVLGWIAYQLGIPPSEDTGDYPLEVHFMAEKFQEMTEAEAIDIVRKNLKYHSNDHNFSDHDRVLLTHLVAVVGGANQPHESEEHSHEETGSDEKADPEKDPTSENEDVKLLRYWATLFHWWSPYPEVRSVTDPYDDTECTTETWRVWVIGTIWVGISAFVNQFFSLRMPHITLTVSVCQLLLYPSGRLLQYCLPDWGFKVRGRRLTLNPGVWSQKEQLLATIMVSCASGTPYVTSNVLVQYLPRFYNQPWANDYGYMFLLMLVTQMLGFGFGGLMKRVAVYPVKAMWPTLLPTLAVNRALLAPRRKEIVDGWKVSRYTFFLAVFLFSFLYFWVPDYLMKFFSTFNWMTWIAPKNLDLAVVTGSIGGLGYNPISSFDWNVAVSRFQPVFTPLFSNLNTYIASLISGLIILAIYYTNNNWTGYIPINSNRLFDNKGKSYDVKRILTDYKFDDKKYREYSPPYYSAGNLVSYGSSFCVYPLMFLYTVLMDWDIMKDALMEMVKSIRHITRSNYEGRDDPFSRRMRQYPEVPDWWFYLILIIMFGLSIALVEHWPMQTPVWTLVFIIGLVGIFLLPLTIIQGYSGVQMSLNYLSELIIGYALPGQFMALNFVKAMGVQISTQAQHYANDQKLTHYAHLPPRSIFWLQLWATLVNGLICMGVVKFQITSIDDLCDPKNKDRFTCPGDTTFFSASVAWGIIGPKKMFDHQYPILKWMFLLGTVLALVFYAAQELIPNLMMKKYPHKTVQIENFKRKALMFNPILFCHGCIDWAPYNLSYKTTGIYIAIFFNYYLKNRFMNWWRKYAYVFSAGMDTGIALSAIIIFFSVEYVKHELKWWGNTVSNAGADNNGPPARLPIPKIGYFGPDSAHYP

SEQ ID NO: 28466 - protein, 336 aa, Arabidopsis thaliana
MQDIHDFSMNGVGGGGGGGGRFFGGGIGGGGGDRRMRAHQNNILNHHQSLKCPRCNSLNTKFCYYNNYNLSQPRHFCKNCRRYWTKGGVLRNVPVGGRSRKAKRSKTKQVPSSSSADKPTTTQDDHHVEEKSSTGSHSSSETLLSPLLTLPPSPPSPSPRRQVASSVIPGFDMPNMKIYGNGIEWSTLLGQGSSAGGVFSEIGGFPAVSAIETTPFGFGGKFVNQDDHLKLEGETVQQQQFGDRTAQVEFQGRSSDPNMGFEPLDWGSGGGDQTLFDLTSTVIMHTGVKVNGRRLTKIRVVSTFLDSDHSFFFLTQKYIFYTHKVKFDEVVFLIFI

SEQ ID NO: 28467 - protein, 480 aa, Penicillium griseoroseum
MLSPKPAFLLLLLHAVFGSAYRWFNWQFEVTCQSDAYIAPHNEHAAAEFLKEQYPKSSHIKVVGNGHGFGNLTTCVDNALTEKPTYIVSLTNLKKLHIDKKNLTVTFGAGWDVDDLIQELKANDLSFSNLGVERVQNFVGAASTGTHGSGSDLGNIATQIIGLRVLDSQGGLRVINEKHNAEELKAFRISLGALGLITELTIKVQPTQLLKKTTKVLNATSDYSKMYNELAQLYKEHDRMTVWGPHFDWNAKSQSWDLEPTYFLSYWEPTNYTGVRNCTLNYCANGCGDCKKEYICYDEVTDAASCSPQGVCSRGFYAEIEHFLPIEYFAEAATNYTIFQQGQTSRMKAPYNKQMVMQHRSLKGDDTYLSPVNTYNLGPDLSGVFGVIEIDWIQEYNNFTTLWQNQELAHEFLPQFGETYNARSHWNKMSAPNATYTLEKFPKLPEFLAIQKRQDPKCQFVNEFLVEQLGITRCANYISV

SEQ ID NO: 28468 - protein, 399 aa, Salmonella enterica subsp. enterica serovar Typhimurium
MAINAGSSSLKFQLLEMPQGDMLCQGLIERIGMADAQVTIKTHSQKWQETVPVADHRDAVTLLLEKLLGYQIINSLRDIDGVGHRVAHGGEFFKDSTLVTDETLAQIERLAELAPLHNPVNALGIHVFRQLLPDAPSVAVFDTAFHQTLDEPAYIYPLPWHYYAELGIRRYGFHGTSHKYVSGVLAEKLGVPLSALRVICCHLGNGSSICAIKNGRSVNTSMGFTPQSGVMMGTRSGDIDPSILPWIAQRESKTPQQLNQLLNNESGLLGVSGVSSDYRDVEQAANTGNRQAKLALTLFAERIRATIGSYIMQMGGLDALVFTGGIGENSARARSAVCHNLQFLGLAVDEEKNQRNATFIQTENALVKVAVINTNEELMIAQDVMRIALPATEGLCVPA

SEQ ID NO: 28469 - protein, 188 aa, Helianthus annuus
MAFAGTTQKCMACDKTVYLVDKLTADNRVFHKACFRCHHCNGTLKLSNYNSFEGVLYCRPHFDQLFKKTGSLDKSFEGTPKIVKQPKTIDGEKPMANKVSSMFVGTKDKCLGCKNTVYPTEKVSVNGTAYHKSCFKCSHGGCTISPSNYIAHEGHLYCRHHHTQLIKEKGNLSQLEGERSARVGETAP

SEQ ID NO: 28470 - protein, 404 aa, Blastocladiella emersonii
APAPASPSSPSTAAGAGSASSTASSTTTAAASGNLSIPSPLVAGSTTSSSISHAQKMATAAHTNSDYSPSPAATPSAPLDAVAERRRRKTTLADLELRQTLGTGSFGRVHLVRLRSTGKYYAMKVLKKAEVVKHKQVEHTLNEKGILEQIDHPFLVALHSSFQDSANLYMVMEYVTGGELFTYLRRSQRFSNNVAKFYAAEVVLAFEYLHSKDIIYRDLKPENLLLDAQGHVKITDFGFAKHVPDITWTLCGTPDYLAPEIIQSRGYGRAVDWYALGVLIFEMLAGYPPFYDEDHVRMYEKILQGKVKWPSHFDPAAKDLLKRLLTTDLTKRYGNLKGGSKDIKMHKWFAGLDWTKLFNKQIPPPYTPPNRGDGDTSNFDAYPEETEPYGKVQPDPYAQLFKDF

SEQ ID NO: 28471 - protein, 210 aa, Papaver somniferum
MSIIPSFFSNQRSNVFDPFSLDIWDPFQGFPFSTGALTANWQGGSDTARETSQLANTRIDWKETPEAHVFRADLPGVTKEEVKVEVEEGRVLQISGERRSRESEEKNDKWHRVERSSGKFLRRFRLPENTKMDEVKATMENGVLTVCVPKVEQRRPEVKSIEISGASEGSTQVPMETPVLRLHKTRLLRDVAMTGNLQASYVVSCLVLFS

SEQ ID NO: 28472 - protein, 872 aa, Oryza sativa Japonica Group
MEEGDPQPSISLARTPSEGAAAAVDLDLLEQLLSADNAWLEVAANTSRSPNFFATPSNCLTDASVATTTPANSWWIQPSGASTSVRERFDQALAYIRETQSDADVLVQLWVPVKGNDGQLVLTTSGQPFTLDQRSNSLIQFREVSTKYQFSADVASGSSPGLPGRVFIGRLPEWSPDVRYFTSYEYPRINHAQYLDVHGTMGLPVFERGNYSCLGVIELIMTKQKLNFTSELNTICSALQAVNLTSTEVSSIPRAKLNSASYKDALPEILEVLRAACITHKLPLAQTWVTCAQQGKRGSRHSDENYKYCISTIDAACYVNEPRMQSFHEACSEHHLLRGQGVAGKAFTTNQPCFLPDIGSSTKLEYPLSHHAKIFNLKGAVAIRLRCTRTGIADFVLEFFLPTDCEVLEEQKAVLDSLSGTMRSVCQTLRVVTDKEMEDEAMREMNELNSFSPRGKNKVEELSFGDNTRGDREEASWTTLVGTSQKGSDLAELHTHGMLSHGGHGSSQAGDQTSKEGSKVKRRTKTEKTVSLQVLRQYFAGSLKDAAKSLGGQPSHAPYSQNVSIVITLFFRDSCYCMKVQVCPTTLKRICRQHGINRWPSRKIKKVDHSLRKLQQIIDSVHGAETAFQLNTLYKDLTNTSVSSDNNLSGSVTVPLANQNNLDFEMHQHHRLSSNIPSTSLSHSSCSQSSDSSPSCSGGATKHSPQVGADQVRSGCLPQHSPVQTLQTEAASINEHFSGQEAPIDLLQDVAEKANGEQHMSQSPSSPKQTANVGMRVKVTFGSEKVRFRLKPECDFQELKQEISKRLSIADMNSLIVKYLDDDSEWVLMTCDADLHECFHVYKLADIQTIKISVHLAASPTTRITIGHTGFS

SEQ ID NO: 28473 - protein, 394 aa, Vibrio parahaemolyticus
MLSNQTIEIVKATAPLIAETGPKLTAHFYDRMFTHNPELKDIFNMSNQRNGDQREALFNAICAYAANIENLPALLGAVEKIAHKHTSFLITKDQYQIVGKHLIATIDELFNPGQEVLGAWAEAYGVLANVFIQREEQIYQANASQEGGWRGLREFELVGKQLESEHICSFVFKPTDGSKVTKYKPGQYLGIYINSDKFENQEIRQYSLSSSVQENTYRISVKREQGGKVSNYLHDELNIGDKVKLAAPAGDFFMDVDTNTPVVLISAGVGLTPTLSMLESLTEHHAPVTWVHATENSKHHAFKEHVNQLVTAKENMNALIWYNQPTAEDKIGEDFHFTGFVNLHEIEAALKQDNVQVYFCGPVGFMQHVAKQLQELGVPQEQFHYECFGPHKVV

SEQ ID NO: 28474 - protein, 634 aa, Synechococcus elongatus PCC 7942
MAKVVGIDLGTTNSCVAVMEGGKPTVIANAEGFRTTPSVVAFAKNQDRLVGQIAKRQAVMNPENTFYSVKRFIGRRPDEVTNELTEVAYKVDTSGNAVKLDSSNAGKQFAPEEISAQVLRKLAEDASKYLGETVTQAVITVPAYFNDSQRQATKDAGKIAGLEVLRIINEPTAAALAYGLDKKSNERILVFNLGGGTFDVSVLEVGDGVFEVLATSGDTHLGGDDFDKKIVDFLAGEFQKNEGIDLRKDKQALQRLTEAAEKAKIELSSATQTEINLPFITATQDGPKHLDLTLTRAKFEELASDLIDRCRIPVEQAIKDAKLALSEIDEIVLVGGSTRIPAVQAIVKQMTGKEPNQSVNPDEVVAIGAAIQGGVLAGEVKDILLLDVTPLSLGVETLGGVMTKLIPRNTTIPTKKSETFSTAADGQTNVEIHVLQGEREMASDNKSLGTFRLDGIPPAPRGVPQIEVIFDIDANGILNVTAKDKGSGKEQSISITGASTLSDNEVDRMVKDAEANAAADKERRERIDLKNQADTLVYQSEKQLSELGDKISADEKSKVEGFIQELKDALAAEDYDKIKSIIEQLQQALYAAGSSVYQQASAEASANAQAGPSSSSSSSSGDDDVIDAEFSESK

SEQ ID NO: 28475 - protein, 413 aa, Aspergillus fumigatus
MPLTPEQVQIIKATVPVLAEHGTTITTVFYKNMLTAHPELNNVFNTTHQVTGHQARALAGALFAYASNIDNLGALGPAVELMCHKHASLYIKPDDYKIVGKFLLEAMGQVLGDALTPEILDAWATAYWQLADIMIGREAQLYEQAEGWTDFRDFVVALKVPESSEITSFYLKPADGKPLPAFQPGQYISVQVHVPELNYLQARQYSLSDMPRSDYYRISVKKESGLNPAEPGAKAHPGHVSNILHASVNEGDTIKVSHPFGDFFLSDAKAAHPVVLLSAGVGLTPMTSILNTLTSQAPERKVSFIHGARNARARAFKNHITSLEQKLPNLKSTFFTSHPTEEDKEGDDYQFRGRVDLSQLDSNRDLFLDDATTEYYVCGPDTFMTDMLNVLKSKGVSEDRVKLELFGTGGVPH

SEQ ID NO: 28476 - protein, 614 aa, Bacillus subtilis subsp. subtilis str. 168
MCGITGWVDFKKQLVQEKQTMDRMTDTLSKRGPDDSNVWGEHHVLFGHKRLAVVDIEGGRQPMACTYKGDTYTIIYNGELYNTEDLRKELRARGHQFERTSDTEVLLHSYIEWQEDCVDHLNGIFAFAVWDEKRNLLFAARDRLGVKPFFYTKEGSSFLFGSEIKAILAHPDIKARVDRTGLSEIFGLGPSRTPGTGIFKGIKEIRPAHALTFSKDGLNIWRYWNVESEKHTDSFDDTVANVRSLFQDAVTRQLVSDVPVCTFLSGGLDSSAITAIAAGHFEKEGKAPLHTYSIDYEENDKYFQASAFQPNDDGPWIEKMTEAFGTTHHKCVISQKDLVDHLEEAVLVKDLPGMADVDSSLLWFCREIKKDFVVSLSGECADEIFGGYPWFHTADVESGFPWMRSTEERIKLLSDSWQKKLNLKEYVNAKYEETLAETPLLDGETGVDKARRQLFYLNMLWFMTNLLDRKDRMSMGASLEVRVPFADHRLVEYVWNIPWEMKMHDNREKGILRKALEGILPDDILYRKKSPYPKTHHPEYTKGVSEWLKTIRSQKDSVLHTLLDRKQLDQLLETEGSSFKVPWFGQLMKGPQLIAHLAQIHTWFEAYRIDIDER

SEQ ID NO: 28477 - protein, 379 aa, Bacillus subtilis subsp. subtilis str. 168
MERIYLDHAATSPMDERVLEQMIPHFSGSFGNPSSIHSFGRESRKWVDEARAQIAAEIGAAEQEIIFTSGGTEADNLAIMGTALARKDLGRHIITTKIEHHAVLHTCEKLEGDGFDITYLDVDQNGRVSAKQVKEALRDDTILVTVMYGNNEVGTVQPIEEIGELLKEHKAYFHTDAVQAFGLLPIDVKNSHIDLLSVSGHKLNGPKGTGFLYASKDVKLSPLLFGGEQERKRRAGTENVPGIVGLKEAIKLSSEERDEKNEKYQSFKAIFADTLRDAGVAFEVNGDKEHSLPHVLNLYFPGVSVEALLVNLDMAGVAVSSGSACTAGSVLPSHVLTAMFGEESDRLTSSIRISFGLGNTAEQVKTAAKHVADVVKRLT

SEQ ID NO: 28478 - protein, 386 aa, Bacillus subtilis subsp. subtilis str. 168
MTSYLSDYVQQIKPSGIRKFFDLAATMEGVISLGVGEPDFVTAWNVREASILSLEQGYTSYTANAGLYSLREEISRYLSNRFDLSYSPDNELIVTVGASQALDIAIRAIVNPGEEVIIPEPCFVAYDALVSLAGGIPVHVHTTADKGFKATAADFEAAVTEKTKAILICSPSNPTGSVYSKEELNEIAEFAKKHDVIVLADEIYAELTYDEEFTSIAALPGMKERTVVISGFSKAFAMTGWRLGFAAAPSLLRDAMLKIHQYAMMCAPAMAQFAALEGLKNGMEDVEKMKKSYRRRRNLFVESLNEIGLSCHHPGGAFYAFPSIKSMGMSSEQFAEELLTQEKVAVVPGSVFGPSGEGYIRCSYATSIEQLQEALVRMKRFLHKTT

SEQ ID NO: 28479 - protein, 233 aa, Propionibacterium acnes KPA171202
MANVVATAATQPFFATLGAASAARIMAMCEASVCPRNTVIFEAGDSADNLYLVVEGKVKLTRSTTADDLTPRDSLLWLMGPSDMFGELSLVDGGTRSTTATTVTRCSLLKTPGAQMRELVKGRHDVALAMLGRLSERLRRADDNTAHFVSGDVPSRLAYTLLDLARRFGTANPSTGHIVVRHDLTQHELAQAVGSSRETVNKALTDFAARGWIAARPKVVTIMEPEKLASRAN

SEQ ID NO: 28480 - protein, 218 aa, Propionibacterium acnes KPA171202
MSHLSALIASLGRDDPDFSVGRRPGGGRSSAVLALISEEGNDIVLTRRPLSLRHHAGQVALPGGRAENTDETIVDTALREAHEEVGLDRRLVTVRGVLPTAHVAASGSDVTTVIATWSGAGTVGVVDPAEVAMVQRVRLADLANPAARATTRHPSGYRGPAFVLPDIFVWGFTAHVLDALLDRGGWSRPWDRERMVEIPEGYLGARRLPEEMTPNDIP

SEQ ID NO: 28481 - protein, 482 aa, Propionibacterium acnes KPA171202
MQEGDSVTPHTSTTVDKGDAGYDKALKNRHLQMIAIGGSIGTGLFLGTGGRLAQGGPGLAISYAVCGIFAFLMVRALGEMAIRRPSSGAFVSYAREFMGEKGAYATGWFFFLDWSVTVMADITAVALYLHYWTPLRAIPQWVLALIALGVVFTLNMLSVKMFGEAEFWFAAIKVAAIILFMIAAIWAIVTGARVGNYTAGLHNIAQHGGFFPAGLAPVFALTLGVIFAFGGTEMVGVAAGETKDASKILPKAINSMILRIFVFYVGSIILMALVLPYTAYSSNESPFVTFFTGIGIPYAGDIIQVIVLTAALSSLNAGLYSTGRTLRSLAVAGEAPKAAAKLNRHHVPSGGIAMTAALGLLGVALNAFLPDSAFEIVMNLAGIGIAGTWAMVLLAHTRFVSAVRRGKDNRPEYRMPGAPVTNYISLAFLLIVVLSNVTSESGRWTLALFALVAIAMVAGWYAVRNSIKPDLLDNVVPSDEGM

SEQ ID NO: 28482 - protein, 322 aa, Propionibacterium acnes KPA171202
MSGTTRPNNKHLMICSGRAYPELAEQIAAELGVELVPSRQVTYANSEIYVQFQESVRGCDAFVIQSHSAPVNEAMMEQLIMIDALKRASAKRITVVSPFYPYARQDKKHLGREPISARLMADLYQAAGADRIMSVDLHAAQIQGFFDGPVDHLWALPVLADYVTSKYDNSDMVVVSPDAGRVRLADMWTDKIGCQLAIIHKRRDPNKANETTTHEVVGEVEGKTCLLVDDMVDTAGTMCQAALALKKHGAKRVIAAATHPILSDPAAERINNSPIEELIVTNTLKIRDDIDIPAMTLLSIAPLIAKAIQEVFEDGSVTSLFR

SEQ ID NO: 28483 - protein, 554 aa, Propionibacterium acnes KPA171202
MRWVTASGVRHFSLHIAPNLGKRATPVSWVRTFGRKVTIMIIGIPRELLPGENRVAATPTTVPALLKLGYEVVVEAGAGEHAAQPDRAYEEAGARIVEPGEAWKADLVLAVNEPTDDQISLMRAGAVLVTFLHPRQDLALTEKLAAAGVTGLSMDMVPRISRAQSMDALSSMANISGYRAVVEAAFAYGRTFGGQVTAAGKVPPAKVFVIGTGVAGLAALGAANSMGAEVYATDVRPETAEQVQSMGAIFLHVRTGDSDQGVSSDGYAKETSDDYNARAAELYMEQAGKDDVIITTAAIPGKPSPKLITAEMVYAMKPGSVIVDLAALGGGNCELTRPGESYVTDNGVTIIGYTDLPSRLPGQASQLYGTNLVNLLKLATPEKNGELVLNFDDEVIRTMTVCHEGQVAFPPPPVQVAAAPKPVAKAEIASAPATPEKKPRPWPQTFGIVAVLSIALIALLTFSPMEFVALFGTFAIAVVVGYYVVWNVTHALHTPLMSVTNAISGIIIVGAITQLGSESWGIRIVAALTVLIASINIFGGFTVTQRMLKMFRKA

SEQ ID NO: 28484 - protein, 505 aa, Propionibacterium acnes KPA171202
MAIPSFVDRATLTAVAGKGGHGCASVKREKFKPLGGPDGGNGGHGGSVILRVDPQVTTLVDYHWQSTRKATNGESGRGDNQAGANGSDMILAVPEGTVVSDADTGELLGDLVGVGAELVVAAGGRGGLGNAALANSARKAPGFALLGEAGEERKILLELKVVADIGLVGFPSAGKSSLIAAISRAKPKIADYPFTTLVPNLGVVVAGETTYTVADVPGLIPGASVGKGLGFDFLRHIERCRAIVHVIDCATYEPGRDPVSDLDVIEGELIAHGGLEDRPRLVVLNKVDVPDAADLADIIFDDVAERGWPVSRVSTKSGEGLNSLKFAMAELVEKARDNEPEPEPERIVIRPEPKNERQAFSIKRQGDGEGGFLWRVTGDKPTRWVAQTDFNNPEAVGYLSDRLNRLGVEEELLAMGAIAGDAVAVGGEDAVIFDFAPQIESGAELLSRRGEDQRLKSERPSATRRREMDREYHRAREEYGQVGRDLRGESWRARVAEEEWFEGRD

SEQ ID NO: 28485 - protein, 340 aa, Propionibacterium acnes KPA171202
MSDDEMPSLADLMDGDDEDISDVDYVTARVAESTRAGFHSGFVCFVGRPNAGKSTLTNALVGSKIAIASSKPQTTRHVIRGVVTDEKSQIVVIDTPGLHKPRTLLGQRLNDLVFDTWTQVDVIGVCLPSNQRIGPGDTYLVSQIAELPRRPTLVALATKSDLVSKARMAEHLATIDKLQGEVGIEFVEIVPCSAVSGEQVDEVRDVIASLLPEGPAYYPDGEVTDEPTETLVAELIREAALEGVREELPHSLAVEIVEMGPREGQPEDRPLLDVYASLIVERDSQKGIMIGHHGSHIKQVRTHARRQIAALLGTPIHLDLQVKVLPNWQSDPKYLNRLGF

SEQ ID NO: 28486 - protein, 467 aa, Propionibacterium acnes KPA171202
MSETVQDKVDFLVIANRLPVDRKVDDDGSVSWKSSPGGLVTALEPVMQRKGGAWIGWHGAPDVVVKPFHHDGYDIHPVPLSAQEVEEYYEGFSNATLWPLYHDCIVEPVFHREWWDAFQKVNKRFAEQAAEQAAEGATVWVQDYQLNLVPKYLREMRPDLRIGFFLHIPFPPIELYSRLPWREELVEGLLGADLIGFQTPGAAANFQRLARHRPGVTAARGRAHTPDGRTVVIRDFPISIDSRGFHELATSEKVKAEAAKLREDLGHPGTIIFGVDRLDYTKGLRQRIRAVGELFKEGKLDPHEVVFLQLATPSRERVEEYKILRDDINLLVGQINSKVGSIANRALVYRNESVPREVLAAMYQMADLMLVTPVRDGMNLVAKEYIACRSNDDSALVLSEFAGAARELKQAYMVNPYDIDGMKATIMKALTDSPKIKARKMRSMRRQVFDKTIDVWADNFLTELEGQ

SEQ ID NO: 28487 - protein, 379 aa, Propionibacterium acnes KPA171202
MSQLKPGSVHHDRAYFDHAATSPLRREAREAMACTVPGNPGAIHGSGRAARALLEDAREEIASLLGVGPLEIVFTSGGTESDMLAVMGAVRDGHALVSAVEHPAVGGLVSPWLLGKRCELLPVNHAGLVDPDEVGGHSGNLDVVSVMAVNNETGACQPVSRVAEAAHQAGALMHTDAVQALGHIPVDLDGWGVDLASFSAHKIGGPVGIGALWVKRGVELHPVSPGGGQQYGMRSGTQPVALACGFAAALRACVDEFDTMTARWQSWRRRVIAWCRQQPEVTVDDAPMTSPSIIHLSVAGARGTDLVMLADRDGIDLSAGSACHAGVSRPSPTMLAMGRDDDAASSGLRISMGYTTTDVDIDRLLVTLPATIRKASGAR

SEQ ID NO: 28488 - protein, 441 aa, Propionibacterium acnes KPA171202
MTNTTDSASAQPIRVALLGCGVVGSQVARMIESRTEDIAARVGRQVELAGIAVAHPDRPRQGLDSRLFTDDPTVLVNRDDVDIVIELIGGIDPARQLLTAALGKGHSVVTANKALLAAHGTELHAVAESNGVDLYYEAAVAGAIPIVRPLRESLVGDQITRVMGIVNGTTNYILDQMTTTGARFDEALAQAKAQGYAEADPTADVEGYDAAAKAALLSSLAFHTQLRGDQVYREGITEITPDDILAAHDMDCVVKLLAVCQAGPDGISARVHPALVPATHPLGSVSGAFNAVFIEAREAGRLMFLGPGAGGSPTASAVMGDLVTVARNLVRGVAGPPQDVYGEFPILPMSEVHTRFHLRLQVRDEPGVLAEVAKIFASHRVSLQTVQQSAVEGTDRADGWSATLKVLTHEARECDVDECVNELTGHHYVNSDPRVIRVEGM

SEQ ID NO: 28489 - protein, 417 aa, Propionibacterium acnes KPA171202
MIPPIETPATGRACPLHKLAVMKALLLENIHDEAVRTLKKAGYEVERVSEALDEDDLISALDGVDLLGIRSRTRVTRRVVEACGDKLHAVGAFCIGTNQMDLDALAEAGVPAFNAPYSNTRSVVELVMAEIIALARRLGDRNTQMHNGVWRKSAIGSHEIRGRRLGIIGYGNIGQQLSVVAEAMGMQVFFYDIADVLPMGNAHKCDSMEELLGSVETVSLHIDGRPSNTDLIGDREFAMMRPRSLFLNLSRGKVVDINALVDNLRTGHIAGAGVDVYPEEPASGKEPFISPLREMDNVILTPHIGGSTQEAQVDIGRYVAGKLIDYVDNGATGMSVNIPEITPSPRTGARIGHLHRNVPGVMATLNRLVADQGGNVTYQALATKGELGYCILDIAETDSGLLANVTVLEGTIRARIL

SEQ ID NO: 28490 - protein, 561 aa, Propionibacterium acnes KPA171202
MRGKVIDGVSNAYLRWSTPDVALNDVTRTTPGLDGPTHEEAKTLTETTVSVPTSFADLGVREDICQALEGVGIVSPFPIQAMSIPIAVEGTDLIGQARTGTGKTLAFGITILLRITLPGDEGWEELTTKGKPQALVMCPTRELALQVSKDISTAASVRGARVLTVYGGVGYESQIDALKAGVDVVVGTPGRLLDLSQRKDLDLSHVRIVVLDEADEMLDLGFLPDVENLIGRTPASRQTMLFSATMPAPIMALARSQLHRPVHVRAEGADTQATVPDTQQFVYQAHPLDKIEIIGRILQANDVEKVIIFCRTKRACQRLSDDLDDRGFKTRAIHGDLTQVAREKALKKFRHGDATILVATDVAARGIDVTGVSHVINHECPEDEKTYVHRIGRTGRAGAKGVAVTLVDWADVTRWKLINKALNLELSEPVETYSTSPHLYTDLDIPEDAQGQIIDLEKAASEKKRRQHRHGHDGSHHEKATRRRSRDASKDGDKARRKRIRRRNGKVVRGSSLNPAPHQKADQNRHAANSHHHDIVAGPREARPRHRRARNALHNRPSNRL

SEQ ID NO: 28491 - protein, 502 aa, Propionibacterium acnes KPA171202
MTHTTQRSHEDNPQGPKVSVTRDDPRAATIEEIQPIVDRGDQGYAETLTNRQVQMMAIGGAIGVGLFLGAGSRLRSAGPAVLISYAFCAVIAFLVMRALGELVIHRPSSGSFVSYARELLGDRWAYAVGWMYMLNWMTSGIAELTAIGTYLQFWWPSLPMWVPSLVALMILVSVNLISVKAFGEFEFWAALLKVVALTAFIIVAIGLVASHVNVGGHRAAVSNLWRFDGGFAPQGVLPLILVIQGVIFAYATIELVGTASGETQNPRKVIPKAVHAVVFRLVVFYLGSLALLAMLLPYKEYSADESPFVTAFSAMGVGWIGDAMNIVVITAAFSSVNSGLYATGRVLKSLAAAGEAPKFAGTLNRFKTPAGGILMTASVFLLGVGLEYVVPERAFEISINTAAVGVIWTWATIFWCQLVLRRRVNEGRITDSGFHMPGYPITGIFGIVSLAGVTALMVLDPQNRIVLAAALVYIAVMLVAWPAVKRNKARHPELNAQEDITF

SEQ ID NO: 28492 - protein, 579 aa, Propionibacterium acnes KPA171202
MNVAEQLVQQLLDAGVRRIYGIVGDSLNPVVDAVRKTGGSVKGGIDWVHVRHEEAAAFAAAAEATLTGELAVCAGSCGPGNLHLINGLFDAYRSQVPVLAIASHVPSVQIGMSYFQETHPDRLFVECSDYCELVSTPEQAPRVMNSAIRHAVAGSTVSVITLPGDISDKKAAAPSPVFIPSRRPTIEPNPEDVRQLVKLLNDVRKVAIFAGAGVEGAHDEVLALADKLKAPIGHSLRGKDFIQYDNPFDVGMTGLLGYGAAAEGMNDADVLILLGTDFPYNQFLPDTLTVQVENRPEKLGRRTDVSFPIHADVKALCDAVTPLLKQHDDKFLKAAVKRHAKIMKAPVGSYTRNVEHMKPIHPEYVAHVLNEVADRDAIFTADTGMCNVWTARYIDPLGTRRLIGSFLHGSMANALPHAIGAQASHPGRQVISVSGDGGLSMLLGELVTARMLNLPIKVVAFNNSTLGMVKLEMLVNGLPDFGTDVHDVDYAGLAKAIGFHAERVDDPRNIRRALTDAMDFDGPALVEVITDPNALSLPPEIKGEQMIGFATAMSKIVLNRGAGEAVSMATSNMRNIPRF

SEQ ID NO: 28493 - protein, 255 aa, Propionibacterium acnes KPA171202
MATLQINDLHVDVETEAGPKQILKGVDLTINSGEVHAIMGPNGSGKSTLAYTLAGHPKYTVTGGSVTLDGEDLLAMTVDERARTGLFLSMQYPVEVPGVSVANFLRTARTAIEGRAPKLRTWVKEVNEALTRQELDPDFAERSVNEGFSGGEKKRSEMAQLELLHPRFAILDETDSGLDIDALKVVANTVNRYMTDPEHGLMLITHYTRILRYVKPTQVHVYVDGRVAATGGPELGEELEAEGYEKYLSAAKANA

SEQ ID NO: 28494 - protein, 475 aa, Propionibacterium acnes KPA171202
MLPMTVKNQHSAAEEQHLRRSLSNRHIQLIAISGAIGTGLFMGSGKSISTAGPSIVVAYLVIGAMLFFVMRAMGELLLHNLQWKSFQDFAADLLGPWAGFFLGWTYWLCWVVTGMADVIAITSYWSFWTHDRAWAFILTATTLLLLLALNLLTVKLFGELEFWFALIKIVAILTLIAVAIVLIVMGFTSASGYKASVSNLWSYGGFAPRGWSGFFGGFQIAVFAYVGIELVGTTSAETANPPKTMPKAINAVPVRVLVFYVAALLAMMCVTPWNLIQTDSSPFVQMFGLIGFTAAAGIMNFVVLTSAASSANSGVYSTSRMLYGLAHKGMAPRAFGKLSRHGVPGWGLFCTIILIGSALILAAKDSVMGAFTLVTTVSAVLFVFVWSMILISHIVHVRRNPQAHAKSIYPMPGASFMPWVVLAFFVFVIVLLTGADDTLQALLAAPIWFVVLGIVWAIVRRRSHHDDLETDLPAD

SEQ ID NO: 28495 - protein, 700 aa, Propionibacterium acnes KPA171202
MSNKKRNPKSFKADGSPKRRWTAAERAARGHKPRTRGGVRNGHTDSRGRNFEAWTPREDVRRDDAGGSRDRRFSQDRRNHEWSDGRQDRRYDRRDWDRRDDRRWPDDGEFRSHKSRRPGHHANRDWKRDDRRGSSWDRDDWREDRRGQRRDRDDHWDRRNGGRDFDRRDSRNWREDRHSWRDDRRDDRWPDRSDHRRDDWSRDDHDDDNMDWEATELTDLDVTGIDHEGGFSALGVPDEIVAALAKTGITDPFRIQIAAIPDAIAGRDVLGRASTGSGKTLAFGVPLLSRLSATPREDNRPRALILSPTRELAMQIADALSSLASSMGLSTILIAGGMSYGPQTKAFKRGVDLVVATPGRLVDLLETGDADLSGVAVTVLDEADHMAELGFMEAVGSILDAIPADGQRLLFSATLDGAVNKLVRRYMHEPVTHEVDPDKGSVATMTHHAFQIKPHEKVGLMCEIANRSGHTIVFARTQRGASRMAEQLREAGVMAGALHGGLTQGARARVLAAFKDGSLPVLVATDVAARGIDVDDVTLVLQVDPPMNFKDYLHRSGRTARAGHDGAVVSLVLPHQRRTMARLYRQAGVKPVEAQVTRGDDHVAEVAGCSPALGAPIDEKDYEALVAPKQQRGKKARDGKPRRGKGGRNRGGRGFDGGRHRGHDSRDHHDRGHDSRGHNFRGRDRRDIEAKYGRSGNDTW

SEQ ID NO: 28496 - protein, 565 aa, Propionibacterium acnes KPA171202
MAEPTGNPAESSSDFIHQVVRADIQQDTYGGRVQTRFPPEPNGYLHIGHAKAIVTDFGVAEDFGGTCNLRLDDTNPGTEETEYVESIIADIEWLGYSPAHVVHASDYFEQLYEWAKYLVREGLAYVDDQSPETIREQRGGYGKPGIESPYRNRPAEESLNLLRRMRAGEFPDGSRCLRARIDMQAENMWLRDPVMYRIRHQAHHSTGTEWCIYPTYDWAHGQSDAIEGVTHSLCSLEFNSHRPLYDWFLSHLPLDGPAPKQREFARLELTHTITSKRRLKSLVTNNIVDGWDDPRMPTLRGMRRRGYPAAAIRAFCQAVGTTKNNSVKAIEEFESFVRRELNATAQRRMAVLHPLKLVLDGWPTDDDGNPVVEWFQLVNNPENPDDGTRRVPFTGELWIEADDFREDPPRKFFRLSPGHEVRLRGAYLVTATDVVKNPDGTIAEVHASYDPQSRGGTAPDGRKVKSTMHWVSAGHAIPVTANLYDRLFSAEIPGSQTGEALDDLNPHSRETLTEVMAEPALANVAPGEVVQFERLGYFAADHDTAVFHRTVGLRDEWAQLQKRQA

SEQ ID NO: 28497 - protein, 857 aa, Propionibacterium acnes KPA171202
MDTNLTTMSRDAVTAATRHALAHGNPSVEPSHLLHALFTIPDNTVSPLVAGLGIDPQQVDAVATAAMRSLPSSTGASVAQPQLSGAFARVIADAQNRAEAMGDSFVATEHLLISLTAVPSDVQNGLAGLGLKPDSLAAAFNEGRGDRRVTSEESEGGESALAKYSVDLTERARAGKLDPVIGRDQEIRRVVQVLARRTKNNPVLIGEPGVGKTAVVEGLAQRVVAGDVPDSLKGRRVVSLDLSSMVAGAKYRGEFEERLKAVLNEIKEAEGQIITFIDELHTVVGAGASGEGAMDAGNMLKPMLARGELRMIGATTLDEYREHIEKDPALERRFQQVFVGEPSVEDTIAILRGLRERYEAHHKVRITDGALVAAASLSHRYITARQLPDKAIDLIDEAASRLRMEIDSSPEEIDTLRREVDRMKMEIFAVEKEDDPASQQRLTRLRADMADKEETLRGLESRWEAEKAGLNKVGELKTRIDELRTAADKYQREGDFGRASEILYGQIPGLEKEMEAAAKAEEETPRMVSEEVGTSDIAEVVSSWTGIPVGRMMQGEQEKLLHMEERLHERLIGQDRAVKTVSDAVRRSRAGISDPNRPTGSFLFLGPTGVGKTELAKSLAEFLFDDETALVRIDMSEYMEKHSVSRLVGAPPGYIGYEEGGQLTEAVRRRPYSVILLDEVEKAHSDVFNILLQVLDDGRLTDGQGRTVDFRNTILVLTSNLGSQFLSDASLDDHAKREAVMGAVRQAFRPEFLNRLDDVVMFDPLSMADLGRIVETNLAKLNSRLAERRITIAVTDAGKDWLAMAGFDPIYGARPLRRLMQTTIDDQLARKVLSGQVQEGDTATFDINEAGDGLVIL

SEQ ID NO: 28498 - protein, 452 aa, Propionibacterium acnes KPA171202
MTEPDQQLHRSLRNRHIQLIALGGAIGTGLFYGAADSIAAAGPAVIVSYLIGGVVIYLIMRALGEMSVHNPTSGAFSEYAHQWWGDLPGFISGWNYWFNYIFVSMAELSVVGIYINYWFPVVPRWVSAAVLLAIVTTVNLLHVRAYGEVEFWFAIIKVVAIIAMIVLGLWIIFFGTGSTPATGIGNLWRNGGFLPHGVTGMLAGIIVVMFSFGGTELIGITAGEAEDPQRSIPRAINRVVGRILLFYVGALIVMVAIVPWTKIDGNASPFVQIFDLVGIPGAAAILNLVVLTAAISAYNSGLYANGRMLHALAHQGDAPAFLGKVNKAGSPWAGVLLSSAVTAIAVVVVGLLPEQAFVYIMSIAMIAAIINWATIIITQMLFRRRLDPESRSELRFTMPGAPVTNWIVLAFLVLMVVVMTTMPPYRIAVAIGPIWLAVLGLGWRVSRRRQTL

SEQ ID NO: 28499 - protein, 424 aa, Propionibacterium acnes KPA171202
MTRVVQKFGGSSVADAASIKRVARRIAATKQAGNDIVVVISAMGDTTDDLMDLALEVSPQPAPRELDMLLTTGERQSAALLAMALSDVGIPARSYTGSQAGVITTAAHGNARIIDITPGRIEKSLEAGDLVIVAGFQGVSQTTKDVTTLGRGASDTTAVALASSLGADFCEIYSDVDGVFTADPRIVKGARRIPEISYEEMLEMAACGAKILHLRCVEYARREDVPVHVRSSFSDKPGTWVKDPTDITKGSDMEEAIISGVAHDRSEAKITIAGLPDAVGRAAQIFEIIAHADINIDMIVQNASRVMNGRTDLSFTLPMNDGPTAVRALTAVKDELGYEQILYNDQIGKVSVVGVGMRTHPGVTSTFFRALADCGINLQMISTSEIRISVVVDADQVDEAVRVAHTAFGLDAEGEAVVYAGTGR

SEQ ID NO: 28500 - protein, 474 aa, Propionibacterium acnes KPA171202
MVAVSKVITQLPVGERVGIAFSGGLDTSVAVAWMRENGAVPCTYTADIGQYDEPDIASVPGRALDYGAEISRLVDCKAALVEEGLSAIACGAFNVRSAGRPYFNTTPIGRAVTGTLLVRAMHTDDVSIWGDGSTYKGNDIERFYRYGLLANPQLRIYKPWLDENFVAELGGRDEMSAWLTAHNLPYRDSKEKAYSTDANIWGATHEAKKLESLHVSIESVNPIMGVKFWDPDVKIDTEEVTVSFEQGLPVAINGKEYDDKVALVLEANAIGGRHGLGMSDQIENRIIEAKSRGIYEAPGMALLHIAYERLANAIHNEDTLETYHNEGRRLGRLLYEGRWLDPQSLMIRESLTHWVASAITGSVTLKLRRGWDYSILDTTGPNFSYHSEKLSMERVEGAAFGPTDRIGQLTMRNLDIADTREKLELYSAQGQLASHADLVGQLETGGASAIASNGDDDDDSQKTLDAAAMEVGVN

SEQ ID NO: 28501 - protein, 321 aa, Propionibacterium acnes KPA171202
MARIIVTAPQLMSVVNEELPGHEVVGGDHFMDRQELSRQIATADAILTSLSDPLDAEMIGQGKNLKVIGQCAAGFNNIDLDAAKQAGVVVTSTPGVLHEATADLAFTLLLEVTRRTGEAERWVRAGRAWRYDHTFMLGAGLQGATLGIVGLGQIGEAMARRGAAFGMNVIYNARHEKDVAAIDAVNLNTQPTRRVELDELFATSDVVSLHCPLTDETRHLVDADALAAMKKTAYLVNTARGACVDEAALVEALKTGAIAGAGLDVFEEEPTITADLLTMENVVLLPHLGSAALPTREAMSRLAARNIAKVLDGKPAETPVE

SEQ ID NO: 28502 - protein, 370 aa, Propionibacterium acnes KPA171202
MRVGVPTEVKNSEFRVAVTPAGVHALVGRGHEVLVQAGAGVGSGIPDSDFVGAGARVVGDVESVWGDADLVLKVKEPVAEEYGRLHEGLVLFTYLHLAADEALTRELLGRGVTSIAYETVELADHSLPLLSPMSEIAGRLAAQVGANCLLQSAGGRGVLFGGGSGVRRGRVSVLGGGVAGLCAARVAAGMGADVTVFDVDVARMRYIDEVWGGRIGTRFSSPLAVREACGESDVVIGSVLVPGARTPHLVDHEMVLGMVPGSVLVDVAVDQGGCFEDSHPTTHADPTFVVGGSVFYCVANMPGAVPHTSTYALTNATMRYVLLLADEGWRGACGSRDDLRRGLATCDGKLVSAPVGEALGIECVPVSEVL

SEQ ID NO: 28503 - protein, 504 aa, Propionibacterium acnes KPA171202
MTGFNQIPDRERYPHALASNEHRGLTAQEPESSPSSPHPEAHLHRNLNNRHIQLIAIGGAIGTGLFLGSGKAIRAAGPSIIVSYLIIGTMLYFVVRAMGELLMYNLDYKSFQDFAADLIGPWAGFFLGWTYWLCWIVTGMAELIGITTYWDFWVKNRGTAALLAAATLFLLLCLNLLTVRMFGELEFWFALIKIIAIISLIVLAIVLAVMKFQFPSGSMASVANLWNRGGFMPNGWSGFFAGFQMAAFAFVGIELIGTTAAETRDPEKTLPRAISAVPARILIFYVGALLAIMTAVPWDEVRADSSPFVQVLGLVGFAGAASVMNFVVLTSAASSSNSGIYSISRMLFGLAHKRMAPKVFGGLSKNGVPRWGLVITVLVLSTALLLAASESFVEAFTLVTTISSVLFIFVWSMIVISYMKYRRVAPAAHAASKYPMPGGRGMCWAVLVFFVFVLVLLAQEADTARALALTPIWFVILGVGWFFDRHHATHDDVGTDEAHPKGDS

SEQ ID NO: 28504 - protein, 359 aa, Propionibacterium acnes KPA171202
MLNPLVILSLGGALHTMGHAIMVPLYWAVSGLLVLFHYLWSPLFGRDSGISWTLAIVCLTIFIRLLLVPLFVKQINSARSMQLIQPKMKAIQEKYGDDRERAGQEMMNLYREEGVNPAASCLPVLLQMPIFLALFRVLDGASRGIPRGHFFAKNPGLMESLQHAKFFGAELAGRFLPMNNGFGGTQVVALVLIIIMVATLFYTQLQLMRKNMPPESLTGPMAQQQKMMIYLFPLMYLFSGVSFPIGVMLYWCTSNLWTLGQQEILIRNNPTPNTPAYIDWRERMIAKGKDPDEIERARREKRRRKVVAPTPVATIEDSEKPMVARQGVTRQTVRKDASGGRQVVRRQQPAKQTRAQRKK

SEQ ID NO: 28505 - protein, 555 aa, Oryza sativa Indica Group
MTTSSSGSVETSANSRPGTFSFASASFTDLLGGNAGAGGGGVSRYKAMTPPSLPLSPPPVSPSSFFNSPIGMNQADFLGSPVLLTSSIFPSPTTGAFASQHFDWRPEVAAAQSADQGGKDEQRNSYSDFSFQTAPASEEAARTTTFQPPVPPALLGDEAYRSQQQQQPWGYQQQPAGMDAGANAASFGAAPFQATSSEMAPQVQGGGGYSQPQSQRRSSDDGYNWRKYGQKQVKGSENPRSYYKCTFPNCPTKKKVERSLDGQITEIVYKGTHNHAKPQNTRRNSGSSAAQVLQSGGDMSEHSFGGMSGTAATPENSSASFGDDEIGVGSPRAGNGGGDEFDDDEPDSKRWRKDGDGEGISMAGNRTVREPRVVVQTMSDIDILDDGYRWRKYGQKVVKGNPNPRSYYKCTTAGCPVRKHVERASHDLRAVITTYEGKHNHDVPAARGSAALYRPAPPAAAATSSHPYLPNQPPPMSYQPTGPQPYALRPDGFGGQGPFGGVVGGSSFGGLSGFDDARGSYMSQHQQQQRQNDAMHASRAKEEPGDDMFFQNSLY

SEQ ID NO: 28506 - protein, 442 aa, Oryza sativa Japonica Group
MAFVAAGNILLEYCIGGAAVARAWTSYFATLLNHHPNDFRIHAASLAADYSRLDPIAVAVIAIICLLSVLSTKASSRFNYVLSVLHVAVIAFIIVAGLTKADAANLTRDFMPYGPRGVFAASAVLFFAYIGFDAVSTMAEETRDPARDIPVGLVGAMALTTALYCALAVTLCLMVPYGEIDPDAPFSVAFADRGMGWAKYVVAFGALKGMTTVLLVSAVGQARYLTHIARTHMMPPWLARVHPGTGTPVNATVAMLLATAVIAFFTDLNVLSNLLSISTLFIFMLVAVALLVRRYYVSGETSRADRNRLAACIAAILASSVATATCWGLDRGGWVPYAVTVPAWLAATASLWALVPQARAPKLWGVPMVPWLPSASIAINVFLLGSIDSKSFMRFGIWTAALLVYYLFVGLHASYDTAKALAADAVAGKVEDGDAKTSAPPM

SEQ ID NO: 28507 - protein, 437 aa, Streptococcus pyogenes MGAS10394
MSMFLDTAKISVQAGRGGDGMVAFRREKYVPNGGPWGGDGGKGGSVIFRVDEGLRTLMDFRYNRKFKAKSGEKGMTKGMHGRGAEDLIVFVPQGTTVRDAETGKVITDLVEHGQEVVIAKGGRGGRGNIRFATPRNPAPEIAENGEPGEERQLELELKILADVGLVGFPSVGKSTLLSVVSSAKPKIGAYHFTTIVPNLGMVRTKSGDSFAMADLPGLIEGASQGVGLGTQFLRHIERTRVILHVIDMSASEGRDPYEDYVSINNELETYNLRLMERPQIIVANKMDMPEAQENLKAFKKKLAAQYDEFDDLPMIFPISSLAHQGLENLLEATAELLAKTDEFLLYDEADLVDEEAYYGFAETEKDFEITRDDDATWVLSGEKLERLFVMTNMERDESIMKFARQLRGMGVDEALRERGAKDGDLVRIGKFEFEFVD

SEQ ID NO: 28508 - protein, 416 aa, Streptococcus pyogenes MGAS10394
MVYNMEYEVYETMKIIEKSSKLEHVAYDIRGPVLDEANRMIASGEKILRLNTGNPAAFGFEAPDEVIRDLIVNARLSEGYSDSKGIFSARKAIMQYCQLKGFPDVDIEDIYLGNGVSELISMSLQALLDNGDEVLVPMPDYPLWTACVSLGGGKAVHYLCDEEAGWYPDIADIKSKITSRTKAIVVINPNNPTGALYPKEILEDIVALAREHQLIIFADEIYDRLVMDGKEHIAIASLAPDVFCVSMNGLSKSHRIAGFRVGWMVLSGPKDHVKGYIEGLNMLANMRLCSNVLAQQVVQTSLGGHQSVDALLLPGGRIFEQRNFIYEAINAIPGLSAVKPEAGLYLFPKIDRQMYRIDDDEEFVLQLLKQEKVMLVHGRGFNWKDPDHFRIVYLPSVEELEDVQEKITRVLYQYRR

SEQ ID NO: 28509 - protein, 775 aa, Xanthomonas campestris pv. campestris str. 8004
MRPTQPMSNDDFKQAALDYHRQQPAGKIKVTATKPMLTQRDLSLAYSPGVAFACEAIVEDATQASELTARGNLVAVITNGTAVLGLGNIGPLASKPVMEGKGVLFQKFAGIDVFDIEINENDPDKLVDIIASLEPTFGGINLEDIKAPECFIVERKLRERMNIPVFHDDQHGTAIIVGAAVLNALVVTGKKIEDVKLATTGMGAAGISCVNMLVSLGLKSENILALDRDGVIHTGRTDLDPDKQRYARDTDKRTLAEIVEGADIFLGLSAAGILKPEMVATMARQPVIFALANPNPEITPEAAKAVRPDCIIGTGRSDYPNQINNVLCFPYLFRGALDVGATGINEDMKIACVKAIAAMARREASDLGAAYGGETPSFGPEYLIPRPLDPRLLVELSSAVAQAAMDSGVATRPIADMAAYRDRLSQFVYRTSLMMKPVYDRARADKQRVVYAEGEEEVVLRAVQNVIDEGLALPILIGRPDVIEARIQRMGLRIRAGEDFEITNIHDDPRFNDYWQYYYALTERRGVTVTAAKELMRSRPTLIAAVMVARGEADAMLSGVVGRFHKKLGYARSVIPLEPRVSSTSAMTGVINQQGVFFFLDTHVQEDPTVEQVVEATLQAAYRLKLFGIEPNIALLSHSNFGSHDSRDALKMREVREALLKRKPELNIDGEMQGDTAWDEALRKQIMPNSTLKGRANLFVLPNLEAANIAYNLVRVFTDGVAIGPILMGISKPVHILTTSATSRRVMNMTAIAAVDAQIRKQRDAEKHNAEKNGG

SEQ ID NO: 28510 - protein, 486 aa, Streptococcus pyogenes MGAS10394
MKFTIITNYDTLSRKSFTIEGDNMTIFRKKKKYSNKTEMQRHFKVIDLVFLGLGSMVGTGIFTVTGIGAAKYAGPALTISIIISAIAIGILALFYAEFASRMPSNGGAYSYVYATLGEFPAWLVGWYIIMEFLTAISSVAVGWGSYLKGLLANYNIVLPNALNGTFNLKNGTYIDILPVLVMFFVTGIVLMNSKLALRFNSFLVILKFSALALFIFVGIFFIDHNNWSHFAPYGVGQITGGKTGIFAGASVMFFAFLGFESISMAVDEVKEPQKTIPKGIILSLIIVTALYIVVTTILTGIVHYTKLNVPDAVAFALRNIRLYWAADYVSIVAILTLITVCISMTYALARTIYSISRDGLLPKSLYTLTKKNKVPQNATLVTGLLAMICAGIFPLSSLAEFVNICTLAYLIILSGAIIKLRRIEGEPKANEFKTPLVPFLPMLAIIICLSFMSQYKAFTWIAFAIATIIGTLIYLAYGYTHSIENK

SEQ ID NO: 28511 - protein, 324 aa, Streptococcus pyogenes MGAS10394
MEEKMSYSDLKLFALSSNKELAEKVASAMGIQLGKSTVRQFSDGEIQVNIEESIRGHHVFILQSTSSPVNDNLMEILIMVDALKRASAEKISVVMPYYGYARQDRKARSREPITSKLVANMLEVAGVDRLLTVDLHAAQIQGFFDIPVDHLMGAPLIADYFDRHGLVGEDVVVVSPDHGGVTRARKLAQFLQTPIAIIDKRRSVDKMNTSEVMNIIGNVSGKKCILIDDMIDTAGTICHAADALAEAGATAVYASCTHPVLSGPALDNIQRSAIEKLIVLDTIYLPKERLIDKIEQISIADLVAEAIIRIHEKRPLSPLFEMGN

SEQ ID NO: 28512 - protein, 372 aa, Streptococcus pyogenes MGAS10394
MEELFCIGCGIQIQTEDKEKAGFTPAAALKKGMETGELYCQRCFRLRHYNEITDVHITDDEFLRLLHEVGDSDALVVNVIDIFDFNGSIIPGLSRFISGNDVLLVGNKKDILPKSVKDGKVTQWLAERAHEEGLRPLDVMLTSAQNKYAIKDLIERINELRNGRDVYVVGVTNVGKSTLINAIIQEITGNKDVITTSRFPGTTLDKIEIPLDDGTFIFDTPGIIHRHQMAHYLSPKELKIVSPKKEIKPKTYQLNPEQTLFLGGLSRFDFINGERQGFTAFFDNQLELHRTKLAGANAFYDKHVGTLLTPPGKKELTAFPKLVRHEFTIDQKMDIVFSGLGWIRVNGQKDSKAIVAAWAPEGVAVIVRKAII

SEQ ID NO: 28513 - protein, 380 aa, Streptococcus pyogenes MGAS10394
MIYFDNAATTIPYGEALKTYQEVATKIYGNPSSLHQLGTNASRILEASRKQIAGLLGVKSEEIFFTSGGTESANWAIKGIAFEKTAFGKHIIISAIEHPAVSESVKWLLTQGFEVSYAPVTTQGVVDVNALAELIRPDTILISIMAVNNEMGAIQPIRAISNLLANQPTITFHVDAVQAIGKIPLCDYMTNRVDLASFSGHKFHSVRGVGFLYKKAGKRLNPLLSGGGQEQELRSTTENVAGIASMAKALRIVTEKQVSVLPKLTAMRDVIYKALSAYPDVTVFSAQEGFAPNILTFGIRGVRGEVIVHAFEKYEIYISTTSACSSKAGKPAGSLVAMGIPVKTAQTAVRISLDDDNDMGQVEQFLTIFKQIYDKTQKVR

SEQ ID NO: 28514 - protein, 375 aa, Streptococcus pyogenes MGAS10394
MTYFDNAATTPLSPNVIRAMTAAMQDNFGNPSSIHFYGRRANKILRECRQAIARNLGASEQQIIVTSGGTESNNMAIKGYALAHQAKGKHLITTTIEHHSVLHTMAYLEERFGFEVTYLPCQNGQINLSDLKQALRDDTILVSIMYANNETGDLLPIKDIGNLLKDHQAAFHVDAVQAVGKLKIIPSELGIDFLSASAHKFHGPKGCGFLYSNGQPIDPLLHGGDQEGKRRASTENMLGIIGMAQALTDAMTCLDQSTDHIICLRHHLISLLEGLPYYINQGTHYLPHVLNIGFLGYQNTILLTQLDLAGIAVSTGSACTAGAVNPSHVLAAYYGDDSSRLKESIRISFSDQNSIEDVNQLAQTLKNILGGTDGF

SEQ ID NO: 28515 - protein, 326 aa, Streptococcus pyogenes MGAS10394
MTERYADKQIKLFSLTSNLPIAEKIAKAAGIPLGKMSSRQFSDGEIMINIEETVRGDDIYIIQSTSFPVNDNLWELLIMIDACKRASANTVNIVLPYFGYSRQDRVAKPREPITAKLVANMLTKAGIDRVVTLDLHAVQVQGFFDIPVDNLFTVPLFAERYSKLGLSGSDVVVVSPKNSGIKRARSLAEYLDSPIAIIDYAQDDSEREQGYIIGDVSGKKAILIDDILNTGKTFAEAAKILERSGATDTYAVASHGLFAGGAAEVLETAPIKEIIVTDSVKTKNRVPENVTYLSASDLIAEAIIRIHERRPLSPLFSYQPKGKNNA

SEQ ID NO: 28516 - protein, 331 aa, Streptococcus pyogenes MGAS10394
MSIRSLFGGLREKILGKNMKIVFPEGNDERVVRAAARLKFEGLLEPIILGQSEEVRNLLTKLGFADQDYTIINPNEYADFDKMKETFVDVRKGKATLEDADKMLRDVNYFGVMLVKMGLADGMVSGAIHSTADTVRPALQIIKTKPGISRTSGVFLMNRENTSERYVFADCAINIDPTAQELAEIAVNTAETAKIFDIDPKIAMLSFSTKGSGKAPQVDKVREATEIAKGLNPDLALDGELQFDAAFVPETAAIKAPDSAVAGQANTFIFPDLQSGNIGYKIAQRLGMFDAIGPILQGLNKPVNDLSRGSSAEDIYKLAIITAAQAIESQG

SEQ ID NO: 28517 - protein, 293 aa, Streptococcus pyogenes MGAS10394
MIMTSPFLLKGLAFFREIDILKCVFVNIVTKGDIMKTPEQILEATIHIGEHKVTKTFLAKSILGFIGGAMISLGYLLYVRIAASGLETFGAFSSIVGACAFPIGLIIILMAGGELITGNMMAVSAALLAKKIKFSELAKNWLIITLFNVIGAVFVAFVFGHFLGLTSAGIFKEEVIEVAHAKIAASPLQALVSGIGCNWFVGLALWLCYGANDAAGKFLGTWFPVMTFVALGFQHSVANAFVIPAAIFEGGATWLDFVTNFIFVYSSNIIGGAIFVSFLYFKVYYHPQKSKTQ

SEQ ID NO: 28518 - protein, 330 aa, Streptococcus pyogenes MGAS10394
MKKSFIHQQEEISFVKNTFTQYLIAKLDVVEVQGPILSRVGDGMQDNLSGTENPVSVNVLKIPNATFEVVHSLAKWKRHTLARFGFNEGEGLVVNMKALRPDEDSLDQTHSVYVDQWDWEKVIPDGKRNLAYLKETVETIYKVIRLTELAVEARYDIEAVLPKKITFIHTEELVAKYPDLTPKERENAITKEFGAVFLIGIGGGLPDGKPHDGRAPDYDDWTTETENGYHGLNGDLLVWNDQLGSAFELSSMGIRVDEEALKRQVEMTGDQDRLAFDWHKSLLNGLFPLTIGGGIGQSRMVMFLLRKKHIGEVQTSVWPQEVRDSYDNIL

SEQ ID NO: 28519 - protein, 395 aa, Streptococcus pyogenes MGAS10394
MKNIVIVEALRTPIGAFGGSFKSVSAVELGTTVLKKILDKTQVKPEMVDEVILGNVLHAGLGQNVARQVAIHSGIPEDKTAFTLDMVCGSGLKAIQLAAQSIMLGDADIVIAGGVENMSQAAYVSTQHRFGQRLGNSQLIDTLVHDGLTDAFNNYHMGITAENVAQKYGISREEQDQFALESQEKAAKALENHRFADEIVPVSVPQRRKDPLIVTTDEYPKVDTSLEKLQQLRPAFFPKEGTVTAGNASGINDGAALLMLMTEEKALELGLTPLVTIESYASAGVAPELMGTGPIPATQKALKKAGLTISDLDLVESNEAFAAQSLAVLKDLKLNPEIVNVNGGAIALGHPIGASGARILVTLIHEMKKRQVTRGLATLCIGGGQGTAVIVKNNT

SEQ ID NO: 28520 - protein, 222 aa, Streptococcus pyogenes MGAS10394
MEYMLDTLDLEAIKKWHHILPLAGVTSNPSIAKKEGEIDFFERIREVRAIIGDKASIHVQVIAQDYEGILKDAAEIRRQCGDSVYVKVPVTTEGLAAIKTLKAEGYHITATAIYTTFQGLLAIEAGADYLAPYYNRMENLNIDPEAVIGQLAEAINRENANSKILAASFKNVAQVNKSFALGAQAITAGPDVFEAGFAMPSIQKAVDDFGKDWEAIHHRKSI

SEQ ID NO: 28521 - protein, 69 aa, Streptococcus pyogenes MGAS10394
MYMAQGTVKWFNAEKGFGFISTENGQDVFAHFSAIQTSGFKTLEEGQKVAFDVEEGQRGPQAVNITKLA

SEQ ID NO: 28522 - protein, 299 aa, Streptococcus pyogenes MGAS10394
MAKIVECIPNFSEGQNQAVIDGLVATAKSIPGVTLLDYSSDASHNRSVFTLVGDDQSIQEAAFQLVKYASENIDMTKHHGEHPRMGATDVCPFVPIKDITTQECVEISKQVAERINRELGIPIFLYEDSATRPERQNLAKVRKGQFEGMPEKLLEEDWAPDYGDRKIHPTAGVTAVGARMPLVAFNVNLDTDNIDIAHKIAKIIRGSGGGYKYCKAIGVMLEDRHIAQVSMNMVNFEKCSLYRTFETIKFEARRYGVNVIGSEVIGLAPAKALIDVAEYYLQVEDFDYNKQILENHLLG

SEQ ID NO: 28523 - protein, 447 aa, Streptococcus pyogenes MGAS10394
MASNHMNEQEREQAKFSLSGATLYGINAVIGSGIFLLPRAIYKGLGPASIAVMFGTAILTIMLAVCFAEVSGYFGKNGGAFQYSKRAFGDFIGFNVGFLGWTVTIFAWAAMAAGFARMFIITFPAFEGWHIPLSIGLIILLSLMNIAGLKTSKIVTITATIAKLIPIVAFCACTLFFIKNGLPNFTPFVQLEPGTNLLGAISNTAVYIFYGFIGFETLSIVAGEMRDPEKNVPRALLGSISIVSVLYMLIIGGTIAMLGSQIMMTNAPVQDAFVKMIGPAGAWMVSIGALISITGLNMGESIMVPRYGAAIADEGLLPAAIAKQNQNGAPLVAILVSGAIAIVLLLTGSFENLAKLSVVFRFFQYIPTALAVMKLRKDAPDANVIFRVPFGPIIPILAVIVSLVMIWGDNPMNFVYGAVGVIIASSVYYLMHGRSHQMDQMPPKEQI

SEQ ID NO: 28524 - protein, 331 aa, Streptococcus pyogenes MGAS10394
MTRMLEDYYPSTTSYYHGGIDDDLYTAKWGMVMTFLDLNDSSLTPFEGTHFALIGFKSDKGVYINNGRVGAVESPAAIRTQLAKFPWHLGNQVMVYDVGNIDGPNRSLEQLQNSLSKAIKRMCDLNLKPIVLGGGHETAYGHYLGLRQSLSPSDDLAVINMDAHFDLRPYDQTGPNSGTGFRQMFDDAVADKRLFKYFVLGIQEHNNNLFLFDFVAKSKGIQFLTGQDIYQMGHQKICRAIDRFLEGQERVYLTIDMDCFSVGAAPGVSAIQSLGVDPNLAVLVLQHIAASGKLVGFDVVEVSPPHDIDNHTANLAATFIFYLVQIMAQHS

SEQ ID NO: 28525 - protein, 68 aa, uncultured proteobacterium eBACred25D05
MPQGKVKWFNTTKGFGFIEPSDGGNDVFVHISAVQKSGLKGLAEDQLVNFELVEGRDGRQMADELSLA

SEQ ID NO: 28526 - protein, 618 aa, Leifsonia xyli subsp. xyli str. CTCB07
MFGGTPAKKAEHFWPSFNRLIGLLRTERLAMVWVTLLVVVSVALTVIAPKILGNATDVIVNGVTGARQANGQPAPGPGVDFTDLGRLLMIVLAMYIAASLLQWWQGYILNALVMRVVYRLRAEIEDKLNRLPLSYFDTRQRGDLMSRVTNDVDNIQTALQQAFSQLIQSVLMVIGIGVMMFIVSWQLALIALISIPLSGIIAGVIGTRSQKLFKQQWNSTGALNGHIEESYSGLDLVRAFGRDEVMLERFDERNGKLWSSMVGAQFVSGMIMPAMNFVSYLSYVLIAVVGALRVTAGQLSIGDVTAFIQYSREFSQPIGQIAGMANMLQSGVASAERTFEFLDSDEQTPEHETEHLPERANGRVELDSVDFSYDPETELIRDLSLSVEPGHTVAIVGPTGAGKTTLVNLIMRFYELNGGAIRLDGIDTTDLSRSELRGQVGMVLQDAWLFSGTIRENIRYGRLEASDEEVVAAAKATMVDRFVRQLPDGYDTVIEADGGNVSAGERQLLTIARAFIANPSLLILDEATSSVDTRTELLVQHAMAALRSDRTSFVIAHRLSTIRDAHTILVMEKGRIVEQGDHKTLLAKKGAYYDLYMTQFRGAAEESGQEEPEGVAAR

SEQ ID NO: 28527 - protein, 561 aa, Leifsonia xyli subsp. xyli str. CTCB07
MIPPLLTQRAFDDGLFPKTGRPDLPMLIETVALMVVVFVSSALLGVWQTYLTASVGNKLMMGALRVRLFSHLQSMELSFFTKTKTGIIQSRLQNDVGGVANVLTNTVSSVLGNTVTVIAALVAMLLLNGQLTIVAVILMPLLVIAQRRVGQARARIVTKTQESLSDMTAITQETLSVSGILLAKSFNRQRAEVERYSDENRTQIRLQVSQAMSGQWFFAMVNIFLSSIPAIVYLVSGWLVLGGATDITAGTIVAFTTVQARLLFPLLALMRVALDLQTSGALFARIFEYLDLKPAIVDRPDAAPVDSGRELGRIEFDRVAFRYPDARQGERNTLDDVFFVIEPGQFAAFVGPSGAGKTTVSYLIPRFYDATSGRILFGGTDLRALRQESLVSHIGVVSQETYLFHATIAENLRYARPDATQEEVESAARRANIHDTIVGFPDGYETVVGERGYRLSGGEKQRIAIARVLLKDPAVLILDEATSALDSISERVVQQALDTASRGRTTIAIAHRLSTIVAADVIFVVDRGRIVERGNHRQLLEAGGVYALLHGEQLEGSLLDS

SEQ ID NO: 28528 - protein, 709 aa, Leifsonia xyli subsp. xyli str. CTCB07
MARSLYITSAEGHTGKSTVALGVLEALRHSVERVAVFRPIARSTVERDYVLDLLLTRVTAQIGYEEAVGVSYEDVHADADAALGEIVRRFRAVEAKADAVVILGSDYTDVGSPTELGYNARIAANLGAPALLVLGGRVGQGFGERLGQADPRSPEELRQLAELAVAELRAEHAGLLAVVANRADSDRLETIVEAVGEAVAAGAPAQGARPQVWAIPEDPFLVAPSIRSIMEVTAGELLAGDRELLAREALGVVVAGMSMNNVLPRLVEGAVVVVPGDRTEVLLAVLMANASGTFSSVAGIVLNGGFELPEPIERLLAGLRSPLPIVYTWLDTYETVVRITHARGRLAADSQRKYDTALALFERHVDAGALLARLDVTRHEVVTPLMFEYDLIERARAADKHIVLPEGEDDRILRAAATLLARGVARLTILGEPFEVRSRAIEIGLDISGAEVLSPFDDVLRLRFAHEYAELRAHKGITVDQASDTVTDPSYFGTMMVHAGLADGMVSGAANTTAHTIRPAFEIIKTSPSVSVVSSVFLMALADRVLVYGDCAVIPDPTAEQLADIAVSSARTAGQFGIEPRVAMLSYSTGDSGTGADVDKVRTATALVRDRAPQLPVAGPIQYDAAADAAVGAAKMPGSEVAGRATVFVFPDLNTGNNTYKAVQRSAGAVAIGPVLQGLRKPINDLSRGATVDDIVNTVAITAIQAALS

SEQ ID NO: 28529 - protein, 397 aa, Leifsonia xyli subsp. xyli str. CTCB07
MSAVLVVNSGSSSLKYQLIDAKSEEALATGLIERVGEGEGRIRHRGPGGSAEYTLVIPDHTAAFRAMLAAFGTDGSSLVEHPLDAVGHRVVHGGKRFFEPTIVTPLVEANIDDLADLAPLHNPANLDGIRAARQAFPAVPHVAVFDTAFHQTLEPAAYTYAIDAALAEEHRVRRYGFHGTSHKYVSGAVAELLGRPLGELKQIVLHLGNGASACAVDGGRSIDTSMGMTPLEGLVMGTRSGDIDPAVLFHLSRRAGLGIDELDELLNRRSGLLGLTGHGDMRDVRRVAESGDAVARLALDTVAHRLKHYIGAYTALLGGLDALTFTAGVGENDPDLRAAACKGLGVLGIQLDPERNAARSPGARIVSADGSPVTVLVVPTNEELEIARQALQAVAAG

SEQ ID NO: 28530 - protein, 428 aa, Leifsonia xyli subsp. xyli str. CTCB07
MALIVQKFGGSSVSDAESIKRVAKRIVETRKAGNEVVVAVSAMGDTTDELVDLAHEVTPIPAPRELDMLLTAGERISMALLAMAIKSMGSDARSFTGSQAGMITDAVHGSARIVDVTPGRIQDALSEGAIAIVAGFQGFSRESRDITTLGRGGSDTTAVALAVALGAEVCEIYTDVDGVFTSDPRQVPLARKIDRITSEEMLELAAAGAKVLHIRAVEYARRHDVTLHVRSSFSNREGTYVLNEAAAAAAAKKDGIVEEPIIAGVATDLSEAKITVVGVPDVPGKAAQIFKIVAKANANVDMIVQNVSAAATSLTDISFTLPKSEGQRVLTALTAEKYEVGFQSLQYDDQIGKLALVGAGMRTNTGVSAKLFEALFDAGINIEMISTSEIRISVVTCADTVAEAARVVHSAFRLDGDQQAIVYAGTGR

SEQ ID NO: 28531 - protein, 227 aa, Leifsonia xyli subsp. xyli str. CTCB07
MTSRILVVDDDTALAEMIGIVLRTEGFDPVFCEDGSEAVGIFRESKPDLVLLDLMLPGLDGIEVCSSIRAESGTPIIMLTAKSDTADVVKGLESGADDYMVKPFNPKELVARIRTRLRPAPVAPPAEQLCIGDLLVDVAGHEVRRGEARIALTPLEFDLLLALAAKPQQVFTREMLLEQVWGYHYKADTRLVNVHVQRLRAKVERDPDNPKIVMTVRGVGYRAGTAT

SEQ ID NO: 28532 - protein, 451 aa, Leifsonia xyli subsp. xyli str. CTCB07
MIEYRNLRVALLGAGSVGSQVARLLLDQGDEFAARVGAKLELVGIAVRDLHAKRNADLPRDLYTTEASALILGADIVVELMGGIEPARGYVHEALTSGADVITANKALMATHGPELFEVAEQVGAQLYYEAAVAGAIPIIRPLRDSLAGDRVNRILGIVNGTTNFILDRMDTTGETLADALATATARGYAEADPTADIGGYDAAQKAAILASLAFHTTVPLDRVYREGITSVTKEQVDAAREAGAVIKLLAICERLIDPETGEEGVSARVHPALIGRDHPLAAVHGAHNAVFVQAAAAGDLMFYGAGAGGVETASAVLGDVVSAARRHVVGGPGVAESTHADIPVLDIGRVITRYQITLDVPDQPGVLAAVTRILSDGGVSVETMRQSAPTGTGVVVLPGTAPIHGAGAPTATLVIGTHEAEEAALAATVEALAASDAVFAISSVLRVEGY

SEQ ID NO: 28533 - protein, 514 aa, Leifsonia xyli subsp. xyli str. CTCB07
MATFVDRVTVHLRAGNGGNGCVSVRREKFKPLAGPDGGNGGNGGDIVLVADPQVTTLLGYHRRPHRSSGNGGFGMGDHRSGHTGEDLELPVPVGTVVKSSEGAELADLTEPGMRIVAAPGGIGGLGNAALSNPKRKAPGFALLGTPGWEGDILLELKTVADIALVGYPSAGKSSLIAALSAAKPKIADYPFTTLHPNLGVVQVGDVRYTVADVPGLIEGASEGRGLGFEFLRHVERCSALLHVLDCATLEPGRDPLSDLDVILAELAAYPVPEGQLPLLERPQLIALNKIDVPDARELADFLRPDLEARGYRVFEISTVSHEGLRPLSFALAELVERARKEQAVLDETRPRIIVRPKTVDDSGFVVKVEGGSEGPVYRVLGAKPERWVAQTDFQNDEAIGYLAARLAKLGVEDQLVRVGAVAGSTVVIGRENGVVFDWEPTLTSAAELISSPRGTDARIGVNARPTRAQRREDYFDRMDAKAEARAELLREREAGLWKDDDAAVQGGSEETGRE

SEQ ID NO: 28534 - protein, 423 aa, Leifsonia xyli subsp. xyli str. CTCB07
MFHTAADYAEAGTVNSLWLLVAAALVLLMTPGVAFFYGGMVRAKSVVSMMMMSVGAMAIVSVLWVVYGYGLAFGTPLIPHVLGAPDWFLGSLMGKDGMTPDLSGLAFAGFQATFAIITVALISGAIADRAKFGAWMVFAAMWVTVVYFPVAFWVFNLSQGWIASVLHVNDFAGGTAVHINAGAAGLALALVLGKRVGFQKGMSKPHNVPLTLLGAALLWFGWFGFNAGSEAAVDGVAALAWINTLAAPAAATIGWLVVEKVKDGKPTSIGAASGAVAGLVAITPACNILTPFWAILLGLVAGAVCAIAVDLKFKLGFDDSLDVVGIHLIGGLIGTLWIGFFGFTHIDGDASKPFSSLLYGGSFVQLGAQAIGAFAVLIYSFVLAFVIGSVIQRTMGFRIKNEDELAGVDTVVHGEEGYSLETV

SEQ ID NO: 28535 - protein, 396 aa, Leifsonia xyli subsp. xyli str. CTCB07
MMAATSQQVDALLLLVFGALTLLAVPSLGFLSGGLGGRQGVARAVLFGLTGTAVVVLLGVAGGFGMVTGRALVPHLLGHPDPWLVAAAKQGVYGLARAGSALALCAVATSLLGVAVASRITLRAWLLFAVLWSALVLAPVGYGALALSDGWAVAGLGAINFGGALLVLAAGASAAGVLLACGRGEHIAPGARHLRLVAIGGALLLAGWFGLTAASEGAVDSYTALIVVNSFLAAAGGCLMWLLVDRVFLRRPTIASAFCGALSGLVAVTAGSGVLTLGWSLLLGALAALACATMVDLAARARLGVAMTVIVIATVASLVGLLFPGLFASGAGMVDSGNFDLFMAQAVAGLSVLIGVFLVSAGLALVLRLTIGLTRVRSGVKRPERDREPPAPHCDG

SEQ ID NO: 28536 - protein, 1525 aa, Leifsonia xyli subsp. xyli str. CTCB07
MALTPPHHRFGALPGKQGLYDPAHEKDACGLAMVATLRGTAGHDIVAAALEALRNLEHRGAVGSDAGTGDGAGIVTQVPDAFLRAVSGTALPGAGEYAAGNAFLPVGAEERERVKAAVEAIAAEQDLTVLGWRPVPNRPDELGDLARAAMPVIEQLFVSSTRTAEDGDPVAGIALDRQTFFLRKRAERELDIYFSSLSSRTIVYKGMFTTLQLEPFYPDLSDQRFASKLALVHSRYSTNTFPSWQLAQPFRMIAHNGEINTVQGNRNWMRARQSQLESELLGELGPVLPIVTPAASDSASFDEVVELLSLTGRSLPHSVMMMVPEAWENQTEIDPVRRDFYEYHSMLMEPWDGPAAIVFTDGSLVGATLDRNGLRPGRYVITNDGLVVLASEIGVLDIEPSRVVRKGRLRPGRMFLVDTVAGRLIEDEEIKSELAAGAPYGEWLQQGRIHLKDLPEREHIVHTPASITRRQRTFGYTEEEVRVLLKPMAATGAEPLGAMGSDTPVAVLSERPRLLFDYFAQQFAQVTNPPLDSIREEVVTSLALGVGPERNLLTAGPEHARQVVLDFPVIDNDELAKIQHIDPRPGSRLTTTVRGLYRFDAGEDAMRRRLAEMCAEADEAIESGAQFIVLSDRDSTKDLAPIPSLLMLAAVHHHLIRAESRMKVGLIVEAGDVREVHHVALLIGYGASAVNPYLAMETCEELVRSGMITGVTSEKAVGNVIKALGKGVLKIMSKMGVSTVSSYAGAQAFEAVGLSQEFVGEYFTGTTSKLGGVGIEVIAAENLARHFAAYPAESAIIAHERLATGGEYQWRRDGAPHLFNPETVFRLQHSTRTRRYDIFREYTTIVDDQSETLMTLRGMFKLKTGERPAVPIDQVEPVESIVKRFSTGAMSYGSISREAHETLAIAMNRLGAKSNTGEGGEDLERLLDPERRSAIKQVASGRFGVTSMYLTHADDIQIKLAQGAKPGEGGQLPPAKVYPWVARTRHATAGVGLISPPPHHDIYSIEDLKQLIFDLKRANPRARIHVKLVSESGIGAVAAGTAKALADVILVSGHDGGTGASPVNSLKHAGTPWELGLTETQQTLMLNGMRDRVVVQVDGQLKTGRDVIVGALLGAEEFGFATAPLVVSGCVMMRVCHLDTCPVGVATQNPELRARFSGKPEFVVTFFEFIAQEVREHLAELGFRSLEEAVGHAELLDVDRAIEHWKASGMDLSPILLGPELPEDAPRKHGRDQDHELAEHVDNSLIEAAQHVLENGGRLELSLPIHNTERAVGTMLGHEVTVRHGENGLPTGSIDITLTGSAGQSLGAFLPAGITLRLEGDSNDYVGKGLSGGQIVVRPPRDSAFAAEDNVIAGNVIGYGATQGSLFIRGIVGERFLVRNSGATAVVEGVGDHALEYMTGGLAVILGGTGRNFGAGMSGGTAYVYDLTPARVNREALGSGELELLPLGSDDIEIVRDLLEKHRTETGSALADRLLADFDATVARFVKVLPRDYAAVLQMRQEAADEGLDPDGDVVWNRILEVTGG

SEQ ID NO: 28537 - protein, 264 aa, Leifsonia xyli subsp. xyli str. CTCB07
MSVLEIRDLHVTVETDQGVKPILNGVDLTIREGEIHAIMGPNGSGKSTLAYTIAGHPKYIVTQGSIALDGEDVLAMSVDERARAGLFLAMQYPVEIPGVTNTNFLRTAKTAVDGQAPAIRTWVKDIRESMANLRMDSSFAERNVNEGFSGGEKKRNEILQLELLKPTFAVLDETDSGLDVDALKVVSEGVNRAKENTGLGILLITHYTRILRYIEPDFVHVFVAGKVAEEGGPELAERLEEEGYDRFVGAPESASGVSSEQAGA

SEQ ID NO: 28538 - protein, 371 aa, Leifsonia xyli subsp. xyli str. CTCB07
MKVTIPREIKNNEFRVAITPAGVHDLVGAGHEVYVEMGAGAGSSIPDEFYAASGATLLPDAAATWAAGDLILKVKEPVASEYGHFREGLVLFAYLHLAADEALTRALIASGMTAIGYETVQLPNRSLPLLAPMSEVAGRLAPIVGANTMLKPNGGPGLLVPGVPGTHPAVVTVLGGGVAGTNAISVAVGLGADVTVLDTNIVRLRELEALYAGRIKTIASNSFEIDRAVVASDLAIGSVLVPGAKAPTLVSDDLVSRMKPGSVLVDIAVDQGGCFAGSHPTTHAAPTFTVHQSVFYCVANMPGAVPHTSTYALTNATLPYARSIANRGWAEALRDDASLALGLNVHAGQVTNRGVAEAHGLPESEIAAALA

SEQ ID NO: 28539 - protein, 530 aa, Leifsonia xyli subsp. xyli str. CTCB07
MTKPVVLIAEELSPATVDALGPDFEIRDVDGTDRSALLSAVVDADAILVRSATKVDAEVIGAAPKLRVIARAGVGLDNVDIKTATSAGVMVVNAPTSNIISAAELTVGHILSLARHIPAAHSALAQGQWKRSKYTGVELYEKTVGIIGLGRIGSLITARLQAFGVKVIAFDPYVTSARAQQLGVQLVSLDELLAESDFVTIHMPKTPETTGMISDDQLAQMKPTAFLVNVARGGLIDEDALHRALASQSIAGAGLDVFVSEPPTDSPLLGLENVIVTPHLGASTGEAQEKAGVSVAKSVRLALSGELVPDAVNVAGGIIDPYVRPGIPLVEKLGQVFSGLAHSPVTSVDVEVRGEIVEFDVSVLKLAALKGIFTNVVSETVSYVNAPLLADQRGIEVRLLTDSVSEEYRNLITIRGALSDGTQLSVSGTLTGTKQIEKVVEINGYDVEVPIAEHLIVMVYDDRPGIVAVYGREFGEAKINIAGMQIARTSAGGKALSVLTVDSSVPEGLLEKVRVAIDADLLQEIDITES

SEQ ID NO: 28540 - protein, 606 aa, Leifsonia xyli subsp. xyli str. CTCB07
MSSDANHTTASPSTVALSASTGTAAPEQLTGSESVVRTLELLGVTDVFGLPGGAILPIYDAIMDSDTIRHILVRHEQGGGHAAEGYAAASNKVGVAMATSGPGATNLVTAIMDAHMDSVPVVFITGQVFSTLMGTDAFQEADIVGITMPITKHSFLVKSAEEIPVTIAAAYHIAGTGRPGPVLVDITKDAQQSRAPFVWPLKVDLPGYRPVTKAHGKQILAAAQLLAEAKKPILYVGGGVIRSRASQELLELAETTGLPVTTTLMARGAFPDTHAQHLGMPGMHGTVPAVLALQESDLIVSLGARFDDRVTGKTSLFAPHAKIVHVDVDPAEISKIRVADVPIVGDAKEVIVGLTVAYRDVAKDGEPDLAEWWTYLNGLREEFPLGFTPTSDGLLAPQHIIQRIGELTGPEAIYAAGVGQHQMWAAQFIKYERPNSWLNSGGAGTMGYSVPAAMGAKVAQPDCVVWAIDGDGCFQMTNQELATCTINDIPIKVAIINNSSLGMVRQWQTLFYDGRYSNTDLNTGHDTVRVPDFVTLAEAYGALGIRVTKEDEVDDAIRLALETNDRPVVIDFVVSADAMVWPMVPQGVSNSYVQYARDHSPSFGEE

SEQ ID NO: 28541 - protein, 492 aa, Leifsonia xyli subsp. xyli str. CTCB07
MIVSNRLPVDRVVDETGESSWRPSPGGLVAALKPVMRAEDGVWIGWAGVAGEEVEPFEVDGIAILPVPLSEQDLQEYYEGFSNDTLWPLYHDVIAPPSYHREWWETYVAVNRRFAAAAAAVAAKGAVVWVHDYQLQLVPEMLRESRPDLVIGFFNHIPFPPYGIYSQLPWRRQIIDGLLGADVVGFQRVADASNFSRAVRRLKGYETRGPIIDVPIESDDPEAGSHRHVTANRHGGLVRTVLARAFPISIDVEQYQELARRPEIRARAAAIREELGNPETIMLGVDRLDYTKGIGHRLKAFGELLRDGRLDVEKATLVQVASPSRERVETYRQLRDEIELTVGRINGDYSTLGHTAVAYLHHGYPREEMVALYLAADVMLVTALRDGMNLVAKEYVATRVDEDGVLILSEFAGASDELRQALLINPHDIEGLKDAIAQAVEMPRRDRTRRMRALRKKVLTNDVARWSASFLDALIRRAHGDHPLQNSPVNRR

SEQ ID NO: 28542 - protein, 481 aa, Leifsonia xyli subsp. xyli str. CTCB07
MSLQRPRTAPEGETLSSTSAPSTPRNGTLKRTLGLWAIVGLGLGYMTPTVVFDTFGMVSRETNDVVPSTYLIALTVMMLTAVSYGKMAGALPSVGSAYTYVRESVHPNVGFMVGWTSLIDYMLLPMVNCLIIRSYLEALFPGVPGWIWVVVYCAVVTSIIFLTMRGTSNLNMLLLVFSIVVIAVFVVLVIAQLAQGEAAGTVASLHPFLHDSVTIGAVLTGATIVCFSFIGFDAVTMYAEEATSPAIMPRAILFTVVTGGAIFLVAAYITQLRFPSSSAFPVEAIEDSTLPQIGFQVGGPVLQAALTAAGFCATLASGLASHASVSRMLLVMGRNNVLPRRLFGHIDPKTHTPTFNIVLVGLISLLAAAFTLKLIAAFINFGALIAFTFVNVSVIAWFAIQKGRRRTAKDIVTFIALPGVGMVLTGVLWANLHVDALVGGLVWAAIGFVYLVVLTRGFRRPVTAFDENQPVTGFNKAIAKD

SEQ ID NO: 28543 - protein, 392 aa, Leifsonia xyli subsp. xyli str. CTCB07
MPVYLDHAATTPLRPEAAEALVAALGVVGNPASIHSQGQQARRMLEEARETVAATLGCDPVEVVFTSGGTEAINLAVKGMYWSRNTGRKRPRILLPGGEHHATTDTVEWLERAEGARPEWLPLDAAGRILPPEFEGGEDIALLSFLAVNNEVGTVQPTAELVALSRAAGVPAHVDAVSAYGHLPIDFAALGADALSVSAHKIGGPVGIGALVLARTAAVVPLLHGGGQQRQVRSGTQDVAAAVAFAAAARAAESEREAESSRLTALTARLVAGVRAAVPSARLSGPEPASGERVAGNAHFVFPGAQGDSLLFLLDRAGVSVSTGSACTAGIPEPSPVLLAMGRGEADARSALRFTLGRTSTAADVDALLAALPDVCARATRAGLAERATRLV

SEQ ID NO: 28544 - protein, 297 aa, Leifsonia xyli subsp. xyli str. CTCB07
MTDYRAGFVSFVGRPNVGKSTLTNALVGEKIAITSSKPQTTRRAIRGIMHRREGQLILVDTPGVHRPRTLLGERLNTLVESTLGDVDVIGFCVPADERIGPGDRFINERLDDYPRAKKVAIVTKIDSARKTQVAEQLLAVSALREWEAIVPVSAVNSIQLDTLTTELMRLLPVSPGPLYPDESVTDEGVEDRIAEYIREAVLDGVEDELPHSLAVTIDDLVERDDKDLLEIYANLFVERDSQKAIVIGKGGSRIREVGATAREPIEALLGRHVFLSIRVKVAKDWQRDPKQLGRLGF

SEQ ID NO: 28545 - protein, 381 aa, Leifsonia xyli subsp. xyli str. CTCB07
MIYLDAAATSAVRRDVLEAMWPYLTGDFGNPSSHHSLGETAARALGEARSAVAAWLGCRASEVVFTSGGTEADNLAVKGIALANPRGRHLVTTPIEHEAVLASADHLVREHGFSVTLVPVGRDGLVDTADFAAALRPDTTLASVMLANNEVGTVQPVAELAALAHGHGIPFHTDAVQAAGWLPLDVRALGVDALSVSGHKIGASKGIGALCVHGRVPLEPVLHGGGQERGRRSGTENVAGAVGFAVAAQATATGRDDRATAAQAARDAFVAAVLEAAPGAELTGHPSLRLPGTASFVFPGTSGEAVLLELERNGVVSSSGSACAAGSEEASHVLLALGYPAELARTAVRFSWGPETGAAELAGVALAVGAAVRRVAGLRGE

SEQ ID NO: 28546 - protein, 325 aa, Leifsonia xyli subsp. xyli str. CTCB07
MSGITATGQKRLVLISGRAHPELAQQIAACLGSELVPTDARTFANGEIYARFDESVRGSDAFIIQSHTSPINEWLMEQLIMVDALKRASAKRITVVAPFYPYARQDKKGRGREPISARLVADLFKAAGADRIMSVDLHAAQIQGFFDGPVDHLFAMPVLLEHMRRELDPSTLTVVSPDMGRVRVADIWSDKLGVPLAIIHKRRDPLVPNQVSVHEIVGDVSGRVCLLVDDLIDTGRTIVKAAEALKASGATGVVVAATHAVFSDPAVELLQSEFIDSVVVTDTLPLPEHKRWDKLTVLPIAPLLADAIEQVFTDGSVTSMFDGAA

SEQ ID NO: 28547 - protein, 72 aa, Leifsonia xyli subsp. xyli str. CTCB07
MKWFNAEKGYGFITVDSNVDGGEQNVTVHQDVFVHYSAIDMNGYKVLEEGQQVEFEVGTGSKGPQAESVRPL

SEQ ID NO: 28548 - protein, 349 aa, Leifsonia xyli subsp. xyli str. CTCB07
MSAHRSPLVIGHRGAPGYRPEHTAAAYELAFELGADAVEPDIVATRDGVLVLRHENELSGTTNVAEHSEFAARRTTKEVDGVPLTGWFAEDFTWVELSGLRSRERIPSLRQGSATFDDRYPLLRLADLLDLIDRASVAAGRQLGMVAELKHATYFEAAGLPLDELLVTELAAAGWSEHPGLIVESFERTVLTRLYERGFRGKRVYLVESDGAPADRVAALGTDAPGYSSDLTLRGLYALSSAPAAAERVDGISVGTELILRAGSVSLGLFGEDEGGTDIGSVTSDLVDLAHLADLSVYCWTLRPENSMLPEPFRGPGRRVGRLATAVHRPVAVGCGRGLRRSSRPRCRR

SEQ ID NO: 28549 - protein, 667 aa, Leifsonia xyli subsp. xyli str. CTCB07
MNVKKIFRGPILYVVLAIITVWVGSSLLTMSGFKGVSTQKGFELLSQGKVSSAKIVDGENRVDLTLKAADASLGTQVQFYYVTPRGADVVKAIDDAKLPKGYDDEVPQPNWLVNILGFLIPALLIGVFFWIMISGMQGGGNKVMQFGKSRAKMVTKETPKVTFEDVAGSDEAIEELEEIKDFLKEPAKFQAVGARIPKGVLLYGPPGTGKTLLARAVAGEAGVPFYSISGSDFVEMFVGVGASRVRDLFQQAKENSPAIIFIDEIDAVGRHRGAGLGGGHDEREQTLNQLLVEMDGFDPKANVILIAATNRPDILDPALLRPGRFDRQIGVDAPDLLGRKKILEVHGRGKPIAASVDLEVLARKTPGFTGADLANVLNEAALLTARSNAQLIDNRALDEAVDRVIAGPQKRTRVMKDQEKLITAYHEGGHALAAAAMRHTDPVTKITILPRGRALGYTMVMPLEDKYSVTRNELLDQLAYAMGGRVAEEIVFHDPTTGASNDIEKATSIARKMVTEYGMSADIGSVKLGQANGEMFLGRDMGHQRDYSERIAERVDAEVRALIEKAHDEAWQVLNDNRAILDRLAAALLEQETLDHNQIAEIFADVNKLPERPQWLSSDKRPISDLPPIEFPKAPIGAGAVDGGVDSAPPSPKPKRSPAIKPRPATS

SEQ ID NO: 28550 - protein, 596 aa, Leifsonia xyli subsp. xyli str. CTCB07
MKKTLTSLFAPAGVCLALSLGASPAAAVTITPDAGPTAGGTRLQIGPVGVTFTAVSAGSLSAYALGDDGNVYAWGDNEYGQLGTGDTVNAHTPVKVMLPAGVKFTALSAGSLSAYALGDDGHAYAWGDNEYGQLGTGDTVNAHTPVKVMLPAGVKFTALSSGGPSAYAVGNDGKTYAWGFNGYGQLGTDTTADAHVPVAVAVPAGVSFTTLSGGSLSAYALGNDGKTYAWGFNGYGQLGTDTTADAHVPVAVAVPAGVSFTAVSAGVSSAYALGDDRKTYAWGDNEYGQLGRGDTANAHAPVAVTVSAGETFVSVSGGAGSVYARGQNGDTYAWGDNDYGQLGRGDTANAHTPIEVAAGVEVTGVLFGSLPGTAVSSQGGKTWTVTSPAHRSGTVSLSVSYTQFGERKSLPAGSFTFGKAPVITENPASQTVSSGDSLTLTAAADGDETPTVRWQSQTSDGNWADIPDATATQYKTDPIRASQSYRAVFANALGSATTTPAIITIATPTPTPTPISPPVPLAVTTTGDLAATGSEIGLLAPLTALLLLAGIAVCHAARPTETFDESAPCRSAGFPGDQPTGLSARRSRAAGVASRS

SEQ ID NO: 28551 - protein, 612 aa, Leifsonia xyli subsp. xyli str. CTCB07
MCGIVGWVSFDRDLTEHRESVDAMTATMACRGPDAEGVWLDRHGALGHRRLAIIDVEGGSQPMSAHTDDGAVTLTYSGEVYNFSELRGELMRRGHRFETRSDTEVVLHGYLEWDEAVAERLNGMYAFAIWDARAEKLVMIRDRMGVKPLYFFTTDDGVLFGSEPKAILAHPLADRAVDLDGLREVVSFAQTPGSAVWCGMREIVPGGVVTVCRAGLREYRYWTLTTRPHTDDLPTTIARVRSLLEDTVGRQLVSDVPRCTLLSGGLDSSAITAFSAAQLAGHGEKVRSFAVDFVGREDDFVADDLRSTPDAPYAREVASHVGSQHETIVLDNDAIADPAVRRAVIAARDNPLSLGDLDASLYLLFQAIRAHSTVALSGESADEVFGGYRWFHQPEVQAAPTFPWMALPVSGSPTRVRDRFTAKITAALDLPAYLRERYTSAIAEVQPLENESAHERRMREICYLHLTRLVRMLLDRKDRISMAVGLEVRVPFCDHRLVEYVYNVPWAMKTFDGREKSLLRAATADLLPESVLQRTKAPYPTTSDPGYARTLIQQSRDLLSADDRVFGLVDRGRLEEITRQDPATMTLDVRNGMETALDLSTWLEIYQPELRM

SEQ ID NO: 28552 - protein, 515 aa, Leifsonia xyli subsp. xyli str. CTCB07
MTTSHDPADELENRLEHLGDVSQAVQDFASEQEGYRKSLSARQVQMIAIGGAIGTGLFLGAGGRLQQSGPLLVFVYAVCGFFAFLVLRALGELVLHRPSSGSFVSYAREFFGEKMAYVAGWMYFLNWAMTAIVDSTAVALYVKYWSLFSSVPQWLLALIALVIVVSLNLISVKVFGEMEFWFALIKVGALATFLVVGIVVLAAGWPTDLGPTGIPMLAENGWLLPNGIATIAMAIVLVQGVVFAYAAVELVGIAAGETEHPEKIMPRAINSVVFRIAVFYCGSVLLLALLLPASAYSGSESPFVTFFSHFGGPQLSAVVGSIMNFVVLTAALSSLNAGMYSTGRILHSMAQTGAAPRFTSRMSKQGVPYGGILLTAAIGVFGVFLNLVVPAQAFNIVLNVAALGIVTSWAMIVLCQMRLRRWSLRGTMKRPAFSLIGAPFTAYLTLAFLLAVLVLMTFDYPTGTWTVASLVVIAPLLVIGWFAQRGRILAIAARREGHTGAYPVIAARPLRRERE

SEQ ID NO: 28553 - protein, 478 aa, Leifsonia xyli subsp. xyli str. CTCB07
MSKVLSSLPVGERVGIAFSGGLDTSCAVAWMREKGAVPCAYTADIGQYDEPNIEEVPGRATEYGAEIARLVDAKRALVEEGLIALQCGAFHIRSGGKTYFNTTPLGRAVTGVMLVRAMRDDDVEIWGDGSTYKGNDIERFYRYGLIANPRLRIYKPWLDTAFVEELGGRTEISEWLVARGFPYRDATEKAYSTDANIWGATHEAKRLEELDAGLDIVEPIMGVAAWREDIEVAPETVSVSFEYGRPVALNGIEFADPVALVPEANAIGGRHGLGASDQIENRIIEAKSRGIYEAPGMALLHIAYERLLNAIHNEDTVANYHTEGRRLGRLMYEGRWLDPQSLMLRESLQRWVGSAITGEVTLRLRRGDDYTILDTTGPALSYHPDKLSMERVGNAAFGPADRIGQLTMRNLDIADSRSRLEQYAATGLIGGPTAELVGELQEGSARSILELDVSPEDDALSREIDASSEGAAFDAGTD

SEQ ID NO: 28554 - protein, 73 aa, Leifsonia xyli subsp. xyli str. CTCB07
MKEEKTPTSTVKWFNSKKGFGFIAPDDGSTDVFVHYSEIAATGGYRNLDENQKVEYDLAQGPKGPQAANIRPA

SEQ ID NO: 28555 - protein, 385 aa, Leifsonia xyli subsp. xyli str. CTCB07
MTHTVGVLREAEPGERRVALVPEVVPRLCAQGFDVVVQSGAGECCGFDDATFRAAGARIGSADAIASADVVVGIGAPDMDTVELHEGQVVLGLLDPLGQPERVAALAAAGVTALAFELLPRTLSRAQPADALSSQSSAAGYRAAIVAAEAYAQFLPMMSTAAGTFRPARVLVIGAGVAGLQALATARRLGAITFGYDVRPTSRAEVESVGATFVTSAVADARGVGGYARALTVDEHHRQADELADIVRHADVVITTAKVPGGRPPLLVNAGMLATMASGSVCIDLAVGPRGGNIEGARDGDRYRTANGVTVIGHHDLATELSVAASAMYARNVLAVLQMLTSEGELVVRDDDVIGPMIAVRDGRVRDGHCADLVTQEQPVVGARI

SEQ ID NO: 28556 - protein, 734 aa, Leifsonia xyli subsp. xyli str. CTCB07
MSIVDSTLSSDGKDLGSMANLQGAPSTQEEGKSALEQYGVNLTEIAKSGKLDPVIGRDAEIRRVSQVLTRRTKNNPVLIGEPGVGKTAVVEGLAQRIVAGDVADSLKDKQLVSLDLSALVAGAMYRGQFEERLKAVLKEIDAAEGRIITFVDELHILMGAGGGEGSVAASNMLKPMLARGELRLIGATTLDEYREFIEKDAALERRFQQVYVGEPSVEDTVAILRGLKGRYEAHHGVTIEDSALVAAASLSNRYITARQLPDKAIDLIDEAASRLKMEIDSAPVEIDTLQRQVERIKLEEFALKKEKDAASKERLEQLRQRLGEQQRELTELQERWWSEKAALTRVGELRSQLDEAKTARDLALRDGRYQEASRIEYETIPNIERELAEAERAEHGHPRMVNEQVTAEDIAAVVAAWTGIPVSRLTQGETEKLLHLESELGRRVVGQRPAAQAVADAVRRTRAGISDPDRPTGSFLFLGPTGVGKTELAKALAAFLFDDEKAMIRIDMSEYGEKLSVSRLVGAPPGYVGYEQGGQLTEAVRRRPYSVILLDEVEKAHPEVFDVLLQVLDDGRLTDGQGRTVDFRNTILILTSNLGSQFLVDPVLNVTEREEAVLQAVRQAFKPEFVNRLDDMVVFSALTQEDLGEIVELGIDRLVARLAERRLELAVTPDARRWLAERGYDPIYGARPLRRLMQREIDDRLATALLAGEVRDGDVVRVDLEPGGGHLTVIPVRE

SEQ ID NO: 28557 - protein, 452 aa, Leifsonia xyli subsp. xyli str. CTCB07
MALGSAIGTGLFYGLSSAIQKAGPAVLIAYIVGGAAVFMVMRALGEMAVRHPVSGSFGQYASKYLGPRAGFVTGWTYAFEMIVVALADVTAFGIYMSFWFPDVPRWIWVLAIVFFIGALNLLSVKVFGELEFWFSVIKVGAIVAMIVGGVVIIAFGFAGANAAGPGNLADPATGGFAPNGIGGVIASFAVVMFAFGGIEVIGITAGEAAEPKKVLPRAINSVPARILLFYVLTLAVIMMLVPWNAIDGSQSPFVMIFEGARPPGCPVHPERRRHHRSALGDQLGHLRCGPDDVRPRHAGPRSARVRPCHPQRRPVADGRGDGLRAAPGRGAERGHPRNVFLVIASVATFATVWVWLMILLAHLRMKQRIRREGMLPSEFPVPLWPGASVATLVFLVFVIGVLGWFEDTRIALVVGVVWIALLLAAYQLCVRGPGRLPADLVDETGPIRVVRR

SEQ ID NO: 28558 - protein, 624 aa, Leifsonia xyli subsp. xyli str. CTCB07
MSRAVGIDLGTTNSVVSVLEGGEPTVIANAEGFRTTPSVVAFTKDGEVLVGETAKRQAVTNVDRTLSSVKRHMGTDWKTQEIDGKKYTAQEISARILQKLKRDAEQYLGDTVTDAVITVPAYFNDAERQATKEAGEIAGLNVLRIINEPTAAALAYGLDKGKEDELILVFDLGGGTFDVSLLEVGKDDDFSTIQVRATAGDNRLGGDDWDQRIVEWLIKRFKESTGVDASTDKIAKQRLKEAAEQAKKELSSSMSTSIQLPYLSLTENGPANLDETLTRAQFEQMTSDLLDRTKKPFKDVIKEAGIEVSDIAHVVLVGGSTRMPAVSELVKQETGGQEPNKGVNPDEVVAVGAALQAGVLKGERKDVLLIDVTPLSLGIETKGGIMTKLIERNTAIPTKRSETFTTADDNQPSVAIQVFQGEREFTRDNKPLGTFELTGIAPAPRGIPQVEVTFDIDANGIVHVSAKDKGTGKEQSMTITGGSSLPKDDIERMVREAEEHAAEDKKRRESAETRNQAEQLVYSIEKLIKDNEEKLPEDIKNEVQGDVDALKAALAGEDDEAVKTAYDKLNESQQKLGQAIYSAAQAAEAPAAAAGEEASAPSSSTGEEDVIDAEVVEDEEKKQQ

SEQ ID NO: 28559 - protein, 67 aa, Leifsonia xyli subsp. xyli str. CTCB07
MAIGTVKWFNAEKGYGFIAPDDGSVDVFAHFREIQTQGFRTLEENQKVEYELTQGPKGMQASNIRAV

SEQ ID NO: 28560 - protein, 324 aa, Leifsonia xyli subsp. xyli str. CTCB07
MDIIGTLLWPIKWVVELILVAWHWLLYQVGFDPAAGLTWVLSIVGLTIVVRAALIPVFFRQIKNQRRMLEIAPQLKKIQDKYKGKKDQFSREAMSRETMDLYKKTGTNPLSSCLPLLLQMPVFFALFQVLNGAQGGHAGVGPLNSGLAEQFGSATLFGVAPLHQSFQGAMNANPVQTSVVIIAAIMVVFMTGSQFITQLQIVSKNTSPETKASPQFKQQRILLYLLPFVFLFSGFAFPLGVMFYWLTSNFWTMGQQFLVIRNMPTPGSDAAKAREARLARKGKLVQQDGSVVLTVEEQSQQKPRTTQRVQPVSKNRAKKQAGKK

SEQ ID NO: 28561 - protein, 885 aa, uncultured proteobacterium QS1
MVQNSARLLRRLNPYCAQALSAAASLCQSRGHGLITIEHWLLKLLEQGEGDLNLIARRYEWDMDAIWRGLLDHLDTLPRSVQGKPQLCGKLQQLIKNAWLQASMEANSDTLRSAHLLGALLETPGLLACEAAWPLLSISDTQLQRLLVLLDEHSEERPQVQQEAALSRAEPAVAHASSSTDKSDALLAVLDKFTLDVTAKARQGQIDPVFGRDDEIRQVIDILSRRRKNNPILVGEPGVGKTALVEGLALRIAEGNVPDSLKPVSVRTLDLGLLQAGAGVKGEFEQRLKNVIDAVQQSPYPVLLFIDEAHNLIGAGNQAGGADAANLLKPALARGELRTIAATTWSEYKQYFERDAALERRFQMVKVDEPDDANASLMLRGLKARYASHHGVHIQDAAVQAAVNLSRRYLTGRQLPDKAVDLLDTASARVRMSLDCEPQALVRLKARQTALELERQALEEDQKLSGSPADERLAIIAAQHAELHDQQLALEEQYRHELDLTQQLLDARQAEPPRMDACLHLQQQLSDAQGNQPLLSLDVNARSVAEVIADWTGVPLGSLLKDEQANLLELEHQLGQQVIGQDHALNALAQRLRAAKTGLTDDKAPLGVFLLVGTSGVGKTETALALADRLFGGEKSLITINLSEYQEAHTVSQLKGSPPGYVGYGQGGVLTEAVRQRPYSVVLLDEVEKAHRDVLNLFYQVFDRGCMRDGEGREIDFRNTVILMTSNLGSDELQACLQEFPDAPDSTLHELLRPILREHFQPALLARFQTLIYRPLQADALKTIVAIKLAQVAKRLQRHYGLECQVDAALNDALVAACLLPDTGARNIDSLLNQQILPVLSQQLLQRQAARQKTSGVSLGYSDEEGIVLHFTDTQHAALPTATEA

SEQ ID NO: 28562 - protein, 230 aa, Spinacia oleracea
GRGKIEIKRIENTTNRQVTFCKRRNGLLKKAYELSVLCDAEIALIVFSSRGRLYEYANQSVKGTIDRYKKACSDQTGAGSVAEANAQYYQQEAAKLRNQIRTATENNRLLSRHMMGEGLSSLSMKELKNLETKLEKGISRIRSKKNELLFAEIEFMQKREIELHNNNQFLRARISENERAQQSMSLMPPGGSDYDLVPSQSFDSRNYFQVNALQPNSQYARQDQTPLQLV

SEQ ID NO: 28563 - protein, 489 aa, Saccharomyces cerevisiae
MARGDGPLWTETYDSSTVAFMILGAALVFFMVPGLGFLYSGLARRKSALALIWVVIMATLVGILQWYFWGYSLAFSKTATNNKFIGNLDSFGFRNVYGKISDDSTYPELIYAIFQMMFMCVALSIIAGATAERGKLFPHMVFLFVFATLVYCPITYWIWAPGGWAYQWGVLDWAGGGNIEILSAVAGFVYSYFLGRRKENLLINFRPHNVSMVTLGTSILWFGWLLFNAASSLSPNMRSVYAFMNTCLSATTGGMTWCLLDYRSEKKWSTVGLCSGIICGLVAATPSSGCITLYGSLIQGIIAGVVCNFATKIKYYLKVDDSLDLLAEHGIAGVVGLIFNALFAADWVIGMDGTTKHKGGWLTHNWKQMYIQIAYIGASAGYCAVVTAIICFVLGKIPGVHLRVTEEAEALGLDEDQIGEFAYDYVEVRRDYYQWGVDTDALHTTCNGANSASETNPTEDSQNSSLSSATVSGQNEKSNNPKLHHAKEA

SEQ ID NO: 28564 - protein, 572 aa, Saccharomyces cerevisiae
MCGIFAAFKHEDIHNFKPKALQLSKKIRHRGPDWSGNAVMNSTIFVHERLAIVGLDSGAQPITSADGEYMLGVNGEIYNHIQLREMCSDYKFQTFSDCEPIIPLYLEHDIDAPKYLDGMFAFCLYDSKKDRIVAARDPIGVVTLYMGRSSQSPETVYFASELKCLTDVCDSIISFPPGHVYDSETDKITRYFTPDWLDEKRIPSTPVDYHAIRHSLEKAVRKRLMAEVPYGVLLSGGLDSSLIAAIAARETEKANADANEDNNVDEKQLAGIDDQGHLHTSGWSRLHSFAIGLPNAPDLQAARKVAKFIGSIHHEHTFTLQEGLDALDDVIYHLETYDVTTIRASTPMFLLSRKIKAQGVKMVLSGEGSDEIFGGYLYFAQAPSAAEFHTESVQRVKNLHLADCLRANKSTMAWGLEARVPFLDKDFLQLCMNIDPNEKMIKPKEGRIEKYILRKAFDTTDEPDVKPYLPEEILWRQKEQFSDGVGYSWIDGLRDTAERAISDAMFANPKADWGDDIPTTKEAYWYRLKFDAWFPQKTAADTVMRWIPKADWGCAEDPSSRYAKIHEKHVSA

SEQ ID NO: 28565 - protein, 461 aa, Saccharomyces cerevisiae
MAPVVISESEEDEDRVAITRRTKRQVHFDGEGDDRVDQQQQQHSSSHRDRDKHVQRKKKKRLSNRNLQGSNGGYAWEDEIKRSWDLVKVDDEGDMASLVASIVEARKKRTAKKNITPYQRGIIRSLILTLGCSEAMLEKDLRPNRHAMIIQYAIDFVHEFFDQNPISQMGIIIMRNGLAQLVSQVSGNPQDHIDALKSIRKQEPKGNPSLQNALEMARGLLLPVPAHCTREVLIVFGSLSTTDPGDIHQTIDSLVSEKIRVKVLGLSAQVAICKELCKATNYGDESFYKILLDETHLKELFNEAVTPLPVNKINKGFTLVKMGFPTRIFEDTPTFCSCHSKLVYGGYFCPNCHSKVCSLPTVCPCCDLMLILSTHLARSYHHLMPLKTFAEVPTTEKFRSEDCFSCQSRFPILKNHKNGKLLTSSRYRCEDCKQEFCVDCDVFIHEILHNCPGCESKPVIT

SEQ ID NO: 28566 - protein, 318 aa, Caulobacter vibrioides
  misc_feature (248)..(248): Xaa can be any naturally occurring amino acid
  unsure (1)..(318): unsure at all Xaa locations
MSAFNAVQVGRRVLAVEADALRVLADSLGEAFANAVETIFNAKGRVVCTGMGKSGHVARKIAATLASTGTQAMFVHPAEASHGDLGMIGPDDVVLALSKSGAGRELADTLAYAKRFSIPLIAMTAVADSPLGQAGDILLLLPDAPEGTAEVNAPTTSTTLQIALGDAIAVALLERRGFTASDFRVFHPGGKLGAMLRTVGDLMHGADELPLVAADAAMPDALLVMSEKRFGAVGVVDNAGHLAGLITXGDLRRHMDGLLTHTAGEVMTHAPLTIGPGALAAEALKVMNERRITVLFVVERERPVGILHVHDLLRAGVI

SEQ ID NO: 28567 - protein, 246 aa, Oryza sativa Japonica Group
MELFVMIDACRRASARSITVVIPYFGYARADRKAQGREAITAKLSANLLTEAGSDRVIVCDIHSTQALGYFDIPVDHIHGQPVILDYLASKTISKDLVVVSPDVGGVVRARAFAKKLSDAPLAIVDKRRQGHNMSEVMHLIGDVKGKVAIMVDDMIDTAGTITSAAALLKQEGAEAVYACSTHAVFSPPAIERLSGGIFEEVIVTNSILLPEHKCFPQLTVLSMANLVAETIWHVHRDGSVSSIFQ

SEQ ID NO: 28568 - protein, 734 aa, Oryza sativa Japonica Group
MDFGDEPEGSDSQRRRKRYHRHTPRQIQQLEAMFKECPHPDENQRAQLSRELGLEPRQIKFWFQNRRTQMKAQHERADNCFLRAENDKIRCENIAIREALKNVICPTCGGPPVGEDYFDEQKLRMENARLKEELDRVSNLTSKYLGRPFTQLPPATPPMTVSSLDLSVGGMGGPSLDLDLLSGGSSGIPFQLPAPVSDMERPMMAEMATRAMDELIRLAQAGDHIWSKSPGGGVSGGDARETLNVDTYDSIFSKPGGSYRAPSINVEGSRESGLVLMSAVALADVFMDTNKWMEFFPSIVSKAHTIDVLVNGMGGRSESLILMYEELHIMTPAVPTREVNFVRYCRQIEQGLWAIADVSVDLQRDAHFGAPPPRSRRLPSGCLIADMANGYSKVTWVEHMEVEEKSPINVLYRDLVLSGAAFGAHRWLAALQRACERYASLVALGVPHHIAGVTPEGKRSMMKLSQRMVNSFCSSLGASQMHQWTTLSGSNEVSVRVTMHRSTDPGQPNGVVLSAATSIWLPVPCDHVFAFVRDENTRSQVSHPLSPPLISLTHSLCPPLLLLQWDVLSHGNQVQEVSRIPNGSNPGNCISLLRGLNASQNSMLILQESCTDASGSLVVYSPIDIPAANVVMSGEDPSSIPLLPSGFTILPDGRPGSAAGASTSSAGPLAAARGGGGGGAGGGSVVTVAFQILVSSLPSSKLNAESVATVNGLITTTVEQIKAALNCSAHGHHP

SEQ ID NO: 28569 - protein, 783 aa, Candida albicans
MDKIRAVISGGEKPPVDTDNDHNTDFEADRKMPDLDIVVSKSQEFDPVTSHLVNDIMEDEYAAVHVEDDSPYPEVRAAVPSTDDPTLPQNTIRAWVIGLILTTVGCGMNMLFSFHSPSFAITTFVTSILAWPIGNFWAWIVPDWKIFGASLNPGPFNVKEHTIITIMANVSFGTGAAYATDILLAQNMFYKSNFGWGYNLLLIWSTQCIGFAFGGVLRRFVVDSPGAIWPSNLVTATFLTNMHINENHTANGWKISRLAFFVIVFVASFVWYWFPGYIFQALSYFSWITWIKPNNVIINQVFGSSSGLGMIPNNIALDWNQIAGYIGSPLIPPASVIATIFGSIVVIFWIVVPAIHYSNTWYSQYLPISSTGSFDRFQQTYNVSKIIDHKTLSFNEAEYKKYSPLFLSTTFAISYGLSFASILATITHTICFHGRDLIASLKAKEKPDVHNRLMKAYKPVPEWWYLIVFLVFFGMSIATVRAWPTEMPVWGLVFALIIAIIFLLPVAIIYAKTNIAVGLNVVTEFIVGYVLPGRPIAMMLFKTFGYITNNQAVTFVQDMKLGHYMKIDPRTLFWAQFAATIWGSLVQIAVLEWAYGAIDNLCAADQKNHYTCPNGKVFFNASIIWGVIGPQRQFSHGQIYYGLLFFFIIGAVTPVINWLILKKWPNSPVKYLHWPVFFSGTGYIPPATPYNYTSYCAVGLFFGWWIKKKWFHWWSKYNYSLSAGLDIGLAWCSLIIFLCLSLTNTDFPSWWGNDVINTTLDTQVVTNIRHILKEGEAFGPSSW

SEQ ID NO: 28570 - protein, 783 aa, Candida albicans
MDKIRAVISGGEKPPVDTDNDHNTDFEADRKMPDLDIVVSKSQEFDPVTSHLVNDIMEDEYAAVHVEDDSPYPEVRAAVPSTDDPTLPQNTIRAWVIGLILTTVGCGMNMLFSFHSPSFAITTFVTSILAWPIGNFWAWIVPDWKIFGASLNPGPFNVKEHTIITIMANVSFGTGAAYATDILLAQNMFYKSNFGWGYNLLLIWSTQCIGFAFGGVMRRFVVDSPGAIWPSNLVTATFLTNMHINENHTANGWKISRLAFFVIVFVASFVWYWFPGYIFQALSYFSWITWIKPNNVIINQVFGSSSGLGMIPNNIALDWNQIAGYIGSPLIPPASVIATIFGSIVVIFWIVVPAIHYSNTWYSQYLPISSTGSFDRFQQTYNVSKIIDHKTLSFNEAEYKKYSPLFLSTTFAISYGLSFASILATITHTICFHGRDLIASLKAKEKPDVHNRLMKAYKPVPEWWYLVVFLVFFGMSIATVRAWPTEMPVWGLVFALIIAIIFLLPVAIIYAKTNIAVGLNVVTEFIVGYVLGGRPLCMMLFKTFGYITNNQAVTFVQDMKLGHYMKIDPRTLFWAQFAATIWGSLVQIAVLEWAYGAIDNLCAADQKNHYTCPNGKVFFNASIIWGVIGPQRQFSHGQIYYGLLFFFIIGAVTPVINWLILKKWPNSPVKYLHWPVFFSGTGYIPPATPYNYTSYCAVGLFFGWWIKKKWFHWWSKYNYSLSAGLDIGLAWCSLIIFLCLSLTNTDFPSWWGNDVINTTLDTQVVTNIRHILKEGEAFGPSSW

SEQ ID NO: 28571 - protein, 220 aa, Brassica juncea
LADVKLDCSYQLLVTNLWGLYRMRIGDIVKVTGFHNKAPKFRVIGRENTLLSIDTDRTTEEYLLKAVNRARLVLESSDLRLVAFTSCADIPSSPGHYVIYWEVKTKEEDMKELDEKTFLECCSVMEDTLDEEYMYCRANEFIGPLEIRVVNDGTFDSLMNLSISKGASITQYEYWRQMWLLDSSVLSEHLMCLSHDIWSKKRGRNVCVLSVLSCFLLTIF

SEQ ID NO: 28572 - protein, 404 aa, Pseudomonas viridiflava
MKLPIYLDYSATTPVDPRVAQKMIDCLTVEGNFGNPASRSHVFGWKAEEAVENARRQVADLVNADPREIVWTSGATESNNLAIKGVAHFYASKGKHIITSKVEHKAVLDTTRQLEREGFEVTYIEPGEDGLITPAMIEAALRDDTIVVSIMHVNNEIGTINDIAAIGELTRSRGVLFHVDGAQSTGKVEIDLASLKVDLMSFSAHKTYGPKGIGALYVSRKPRVRLEAAMHGGGHERGMRSGTLATHQIVGMGEAFRIAKEEMAAENVRIKALSDRFYKQVENLEELYVNGSLTARVPHNLNLSFNYVEGESLIMALKDLAVSSGSACTSASLEPSYVLRALGRNDELAHSSIRFTFGRFTTEEEIDYAAQKVCEAVTKLRTLSPLWDMFKDGVDISKIEWAAH

SEQ ID NO: 28573 - protein, 88 aa, Hordeum vulgare
AIMTIDTETMIAAAHHRMMHEREANVMMYREKRKRRRYDKQIRYEARKAYAELRPRVNGRFVKIPEVTAPPSPPASPYDPSKLHLGWF

SEQ ID NO: 28574 - protein, 305 aa, Pseudomonas aeruginosa
MTDMHDDIPAGSRCGYVAIVGRPNVGKSTLLNHILGQKLAITSRKPQTTRHNMLGIKTEGEVQAVYVDTPGLHKSGEKALNRYMNRTASAALKDVDVVIFVVDRTRWTEEDQMVLERVQYVSCPVLIAVNKTDRIEEKADLLPHLEWLTQQLPKAEVVPISGQDGTNLDVLEKLVAECLPESEYFFPEDQITERSSRFLAAELVREKIMRQLGAELPYQITVEIEEFKQEGRILHIHALILVEREGQKKIIIGDKGERIKSIGQNARKDMEVLFDSKVMLNLWVKVKGGWSDDERALRSLGYGDL

SEQ ID NO: 28575 - protein, 487 aa, Coxiella burnetii
MDIKRIILYVIVALLAIALFNAWQRDYPPTPKPTPTVEQPTANGDHPTAYTPPAFTPGAAEKTKKAGTIAFTSKVPEARLITVRTDVLDVEIDTQGGNIVSAKLPKYPVSLEEKQTPVQILSGEPNELYIAQSGLTNGNGQPTTVQFESEKKQYVLENGQNQLIVQLTGRAPDGLLVTKTYTFHRDDYAIHLAYQVKNNTSKPWQGSLYTQITRRQPPTEHHHFYVRSYNGASMGSPQTPYEKLSYESLDKQNIDRTSQSGWIAMQQHYFLSAWVPGNPELTYHYYSHVIPASDEPNVYVVGFVSPQMNVAAGSEAATHATLYVGPEIAKRLKGLAPGLERTIDYGWLWPISMLLFWILSAVHAVVKNWGWSIIITTILIKIVFYWFSAKSFRSMARMREMQPRIQALKERHGDDRQALSRATMELYRKEKINPLGGCLPMLIQVPVFIAFYYVIIESVQLRQAPFIFWIHDLSVKDPYYICPLSWV

SEQ ID NO: 28576 - protein, 241 aa, Gracilaria tenuistipitata var. liui
MHNSKEKILIVDDETSIRTILETRLSMIGYDVISASDGEEGLHIFRREYPNLVILDVMMPKLDGYGVCQEIRKESDVPIIMLTALGDVSDRITGLELGADDYVIKPFSPKELEARIRCVLRRVYKININSSIPSSGILNMGFLKIDTNKRQVYKKNERVRLTGMEFSLLELLVSKAGEAFSRSSILQEVWGYKPERHVDTRVVDVHISRLRAKLEDDPSNPDLILTARGTGYLFQRIIENI

SEQ ID NO: 28577 - protein, 823 aa, Gracilaria tenuistipitata var. liui
MFERFTEKAIKVIMLAQEEARRLGHNFVGTEQILLGLIGEGTGIAAQVLKSMNVNLKDARIEVEKIIGRGSGFVAVEIPFTPRAKRVLELSLEEARQLGHNYIGTEHLLMGLVREGEGVAARVLENLAVNVASIRTEVIQMLGDTTEANTNGNNNTQTRSKTPTLEEFGSNLTELAIEGILDPVVGRQKEIERVIQILGRRTKNNPVLIGEPGVGKTAIAEGLAQRIANKDIPSILEDKLVVTLDVGLLVAGTKYRGEFEERLKRIMDEIKSANNIVLVIDEVHTLIGAGAAEGAIDAANLLKPALARGELQCIGATTLEEYRKHIEKDAALERRFQPVLVGEPSVEETIEILFGLRDRYEKHHQLKMSDEALAAAAKYANQYISDRFLPDKAIDLIDEAGSRVRLLNSQLPPAARELDKELRSVLKTKDEAIRAQKYEKAEQYRTREMEIKAQIAAIAQSKKNEPNVQIEDPVVTEDDIAEIVAFWTGIPVTKLTKSESEKLMHMEETLHNRIIGQDEAVVAVSRAIRRARVGLKNPNRPIASFIFSGPTGVGKTELTKALASYFFGSQEAMVRLDMSEYMERHTVSKLIGSPPGYVGYSEGGYLTEAVRKRPYTVILFDEIEKAHPDIFNLLLQILEDGRLTDAKGRTIDFKNTLLIMTSNIGSKVIEKGGGSLGFELGESQTESQYNRIRSLVNEELKQYFRPEFLNRLDEIIVFRQLTKDEVREIAEIMLQEVFNRIKQQEIELEVTERFKNRLVDEGYNPSYGARPLRRAVMRLLEDSLAEEVLSGKIKAGDSAVVDVTDEGKVTVLLGEQLEAIKQL

SEQ ID NO: 28578 - protein, 626 aa, Gracilaria tenuistipitata var. liui
MKLSWKTLLLLSLPIIVIVFFLWQGFLAPTSNELNTNIARSRMTYGRFLEYLDMGWIKKVDLYDNGHTAIVEAVGPELGNRIQKIRVELPATAPELIIKLKKANIDLDAHPTRNTSAIWNLIGNLLFPILLILGLAFVFRRSNNSAGGPGQAMSFSKSKALFQMEAKTGVVFNDVAGIDEAKEEFEEVVTFLKKPERFTTVGAKIPKGVLLIGPPGTGKTLLAKAIAGEANVPFFSISGSEFVEMFVGVGASRVRDLFKKAKENAPCIVFIDEIDAVGRQRGTGIGGGNDEREQTLNQLLTEMDGFEGNTGVIVIAATNRADILDAALLRPGRFDRQVSVEIPDFKGRLDILKVHAKNKKMEPNISLSMIARRTPGFSGADLANLLNEAAILTARRRKNYIAMSEIDASIDRIVAGMEGTPLIDSKSKRLIAYHEIGHAIVGTLLQDHDAVQKVTLIPRGQARGLTWFTPGEDQNLISRSQILSRIMGALGGRAAEEVVFGDTEVTTGASNDLQQVTSMARQMVTRFGMSNIGPLCLENEDSNPFLGRSMGNTSEYSDEIAIKIDKQIHRIVEECYQEAIKIIKDNRIVIDRLVDLLIEKETIDGEEFREIINEYTPIPKKEVFMK

SEQ ID NO: 28579 - protein, 621 aa, Gracilaria tenuistipitata var. liui
MAKVVGIDLGTTNSVIAVMEGGKPTVIPNKEGLRTTPSVVAYTKKQDKLVGQIAKRQAVMNPENTFYSVKRFIGRKKDELGDELKQSSYNVKTDINSNVKLECPALSKDFAPEEISAQVLRKLVEDASTYLGQQVTQAVITVPAYFNDSQRQATKDAGQIAGLDVLRIINEPTAASLSYGLDKKNNETILVFDLGGGTFDVSILEVGDGVFEVLSTSGDTHLGGDDFDRKIVEWLIHEFSHDEGINLGKDRQALQRLTEAAEKAKMELSSLAQTDINLPFITSTDTGPKHLEKNITRAKFEYLCQDLINRCEIPVNNALKDAQLSSGNIDEIVLVGGSTRIPAIQQLVKKMIGKDPNQSVNPDEVVAIGAAVQAGVLAGEVKDILLLDVTPLSLGVETLGGVMTKIIDRNTTVPTKKSEIFSTAVDNQPNVEIHVLQGEREFTKDNKSLGTFRLDGIMPAPRGVPQIEVIFDIDANGILSVKAKDKGTGKEQSITITGASTLPKEEVEKLVKEAEENSELDKHKREQIDLKNQADALCYQSQNQINELKDKISEDEKQNVQKLIDSLKLSIQEDDYEKIKDIQNQLQQVMMNIGKQVYSSTQQDNSKTEDGSVIDTNSKEA

SEQ ID NO: 28580 - protein, 253 aa, Gracilaria tenuistipitata var. liui
MTNFNMLKIENLQATINNKDILLKGINLSINKGEVHAIMGKNGSGKSTLAKVIAGHPKYNVIEGKILLNQQDITYEEATMRSHRGIFLAFQYPVEIPGVNNIDFLRLAYNSNRKANQDEELDPLSFFELISTKSKKIEMQSHFLNRNVNEGFSGGEKKKNEILQMNLLNSQLAILDEIDSGLDIDALKIIAEEINRFKTKCNSILIITHYQRLLEYIVPDYIHIMEQGRIVYTGNSEIAGKLEKYGYEYVNRI

SEQ ID NO: 28581 - protein, 1527 aa, Gracilaria tenuistipitata var. liui
MQASKYYNCQLNNLYKHPFIFSEKDACGVGFITRIKHAPSNTIVKQALNALNCMEHRGGCSADRVSGDGAGIMTQIPWKIFVEYLPQKNLNQVGVAMLFMPQEKSESIQNIIEWAVGLNGFNFLRWRIVPVNDGVLGFQAKSNQPLVMQFFVQAKDLSGDALEQALFITRKKIEKLVAQSHLNLNKQFYFCSFSSRVIIYKGMVQSEVLSKYYIDLCNINYESNFAMYHRRFSTNTMPKWPLAQPMRFMAHNGEINTLLGNLNWMQSKESLFEQSYLAEHFDALKPITNFQNSDSANLDAVLELLIQSGKSPQESLMILIPEAYKNQPALENYPEIVDFYEYHNSLQEPWDGPALVVFSDGKVVGATLDRNGLRPARYIITSNGFISLSSEVGVLDNNLGEITHKGRLGPGQMICVDIINNVILDNWTVKQSVASKFPYKKWLDAYQKHLLQKSYVQDSIIDSFTMMRCHTAFGYTNEDVELVIEHMASSAKEPTFCMGDDIPLAVLSQKHHLLYDFFKQRFAQVTNPAIDPLRESLVMSLTTYLGSKGNFLEPHDYMAKSIKLDSPILNEAEMLNLGKYGLSISFINTFFIQDSNNINFVNRITEICQETVQLIHSGSEIIVLSDRVEALDEAKAFIPPLLITGAVHHYLISQNLRHKVSIVIETAQCWSTHHFACLIGYGASAICPYMAFLTVRQWWHNPRTQKLMSNGKLSKISLIEAQHNYRCAIEAGLLKILSKMGISLLSSYHGAQIFEILGLGKDVVNLAFKGTTSSLDGINLYELGLSIVDSYNNIMTMKTSKKLPNLGYVQYRPSAEYHVNNPEMSKTLHKAVRNQDFTLYNKYKNLLQDRPPTNLRDLLDFSYSKDPIDLDKVESVESIVKRFCTGGMSLGALSRETHETLAIAMNRLGGKSNSGEGGEDHTRFAPIMDIDDSGISKSFPHLKGLKVNDIASSAIKQIASGRFGVTPEYLMNAKQLEIKIAQGAKPGEGGQLPGKKVSTYIAKLRNCKPGVTLISPPPHHDIYSIEDLAQLIFDLHQINPEAKVSVKLVAEMGIGTIAAGVAKANADIIQISGHDGGTGASPLSSIKHAGCPWELGLSEVHKTLVDNKLRSRVILRVDGGLRTGKDIILAALMGAEEFGFGTVAMIATGCVMARICHTNNCPVGVATQREDLRKRYPGIPADLVNFFIFIAQEVREILSSLGYISLSDIIGRAELVKHKDQHLNKTKHLSLDPLLSSPEYNYNLNSHTTTHNNGKVLDDTLLSDPSILRAIEKQEDINKKVNILNTDRTVGARISGFIAKKYGNDSFQGNLQLDFIGVAGQSFGAFILKGMHLRLIGEANDYVGKGMNGGEIIIVPEVNTLPNVIQPVLIGNTCLYGATGGYLFVSGQAGERFAVRNSLAQSVVEGVGDHACEYMTGGIVVVLGSAGRNIGAGMTGGLAYFLDQDNNLESKINKQIVKYQKIKTYEGEKQLKNLIELYEIKTKSLKAQYILQNWSKFLPMFWQVIPPSESNTALTNTSYSSYHAIIN

SEQ ID NO: 28582 - protein, 198 aa, Bradyrhizobium sp. CICS70
PTPNLRGKTQIKEFASFPTLEQLPLWGFDGSSTQQAEGHSSDCVLKPVAVFPDGARTNGVLVMCEVMMPDGKTPHASNKRATILDDAGAWFGFEQEYFFYKDGRPLGFPASGYPAPQGPYYTGVGFSNVGDVARKIVEEHLDLCLAAGINHEGINAEVAKGQWEFQIFGKGSKKAADEMWMARYLMLRLTEKYGIDIE

SEQ ID NO: 28583 - protein, 197 aa, Bradyrhizobium yuanmingense
PTPNLRGKTQIKFASFPTLEQLPLWGFDGSSTQQAEGHSSDCVLKPVAVFPDGARTNGVLVMCEVMMPDGKTPHASNKRATILDDAGAWFGFEQEYFFYKDGRPLGFPTSGYPAPQGPYYTGVGFSNVGDVARKIVEEHLDLCLAAGINHEGINAEVAKGQWEFQIFGKGSKTAADQMWMARYLMLRLTEKYGIDIE

SEQ ID NO: 28584 - protein, 198 aa, Bradyrhizobium elkanii
PTPSLRGKTQIKEFASFPTLEQLPLWGFDGSSTQQAEGHSSDCVLKPVACYPDAARENGVLVMCEVMMPDGKTPHPSNKRATILDDDGAWFGFEQEYFFYKDGRPLGFPEEGYPAPQGPYYTGVGYKNVGSVARKIVEEHLNLCLAAGINHEGINAEVAKGQWEFQIFGKGSKTAADQMWMARYLMLRLTESYGIDIE

SEQ ID NO: 28585 - protein, 198 aa, Bradyrhizobium elkanii
PTPSLRGKTQIKEFASFPTLEQLPLWGFDGSSTQQAEGHSSDCVLKPVACYPDAARENGVLVMCEVMMPDGKTPHVSNKRATVLDDEGAWFGFEQEYFFYKDGRPLGFPEEGYPAPQGPYYTGVGYKNVGSVARKIVEEHLNLCLAAGINHEGINAEVAKGQWEFQIFGKGSKTAADQMWMARYLMLRLTESYGIDIE

SEQ ID NO: 28586 - protein, 198 aa, Bradyrhizobium japonicum bv. glycinearum
PTPNLRGKTQIKEFASFPTLEQLPLWGFDGSSTQQAEGHSSDCVLKPVAVFPDAARTNGVLVMCEVMMPDGKTPHASNKRATILDDAGAWFGFEQEYFFYKDGRPLGFPSSGYPAPQGPYYTGVVFSNVGDVARKIVEEHLDLCLAAGINHEGINAEVAKGQWEFQIFGKGSKKAADEMWMARYLMLRLTEKYGIDID

SEQ ID NO: 28587 - protein, 198 aa, Bradyrhizobium japonicum bv. glycinearum
PTPNLRGKTQIKEFASFPTLEQLPLWGFDGSSTQQAEGHSSDCVLKPVAVFPDAARTKGVLVMCEVMMPDGKTPHASNKRATILDDAGAWFGFEQEYFFYKDGRPLGFPASGYPAPQGPYYTGVGFSNVGDVARKIVEEHLDLCLAAGINHEGINAEVAKGQWEFQIFGKGSKKAADEMWMARYLMLRLTEKYGIDIE

SEQ ID NO: 28588 - protein, 198 aa, Bradyrhizobium japonicum bv. glycinearum
PTPNLRGKTQIKEFASFPTLEQLPLWGFDGSSTQQAEGHSSDCVLKPVAVFPDAARTNGVLVMCEVMMPDGKTPHASNKRATILDDAGAWFGFEQEYFFYKDGRPLGFPSSGYPAPQGPYYTGVGFSNVGDVARKIVEEHLDLCLAAGINHEGINAEVAKGQWEFQIFGKGSKKAADEMWMARYLMLRLTEKYGIDIE

SEQ ID NO: 28589 - protein, 198 aa, Bradyrhizobium sp. IRBG127
PVPNLRGKTQIKEFSSFPTLEQLPLWGFDGSSTMQAEGHSSDCVLKPVAVYPDAARTNGVLVMCEVMMPDGKTPHPSNARATILDDPDAWFGFEQEYFFYKDGRPLGFPEYGYPAPQGPYYTGVGFKNVGDVARKIVEEHLDLCLAAGINHEGINAEVAKGQWEFQVFGKGSRTAADQMWMARYLMLRLTEKYGIDIE

SEQ ID NO: 28590 - protein, 647 aa, 'Chlorella' ellipsoidea
  misc_feature (613)..(613): Xaa can be any naturally occurring amino acid
  unsure (1)..(647): unsure at all Xaa locations
MAAFLNSHLLAGWRPVLPVPARPHVHASASNGNGVATAPLPTITDIYGTTAALGPDMNAAGAYSMPAKEAEPVSPEVQALIDEQGIDFELSGLKYLSNEGRLKALAKKATKVEKMKNKKSGDRIWSDISELAALVRSGEKTWEELNLDDVDVRTKWAGLFHRKKRAPGTFMMRLKVPNGEITSKQLRVLGEQLKPFGDELGVGDITSRANFQLRGIPMAETDNVIKAVQGCGLSNVMTGMDNVRNMTGSPIAGIDPHELLDIRPLNYEINNMITNYGKGNHELSNLPRKINLALSPSRDDFPHVFINDVGLQAIRHPETGEVGFNVELGGYFSIKRNTQSINGNTYLRQDQVVAYCKALLEFFRDAGNREDRQKAGLMWLVEACGVDNFRKNVAQRMGLDDLPGHVHVEYPDVWKRRDVIGFHPQKQDGYYWACACVPSGRITADDYLAFAEIADRYGNGTARATVECNILFPFIPESKLEDLKKEPLFQKFSLEPKPLTRGLVSCTGAQFCGVAIIETKQRAMAIAAKLENELDIPQTVRMHWTGCPNSCGQVQVADIGLMGGPARHEGKAVEGVRIFTGGKVGEGASLGAEIEKGVACNDEVLLPKLREIXINQYGRHREEDGSLQDGDWRAGRPRLGPSRMTVL

SEQ ID NO: 28591 - protein, 113 aa, Pelargonium x hortorum
WRKYGQKMAKGNPCPRAYYRCTMAVGCPVRKQVQRCADDRSILITTYEGNHNHPLPPAAMAMASTTTAAASMLLSGSMPSADGIMNPNLLARAMLPCSSSMATISASAPFPTV

SEQ ID NO: 28592 - protein, 634 aa, Desulfotalea psychrophila LSv54
MCGLAGFFNYQFIADNTILHLQSMGKSISHRGPDASGTWYDADTGIGLVHTRLAIVDLSSAGHQPMHSQCDRYVIAFNGEIYNHLMLRQKLEQANQAPAWRGHSDTETLLACFVAWGIEQTLKVTVGMFALALWDKQEQNLTLARDRAGEKPLYWGWQGDTLLFGSELKALKAHPDFKAKVSRDALAVYMRHNYISAPQSIYEGIYKLLPGHYVTLNSVSNIDTATPKAYWTMNQAIESGIAQPFSGTDIEAVDLLEHRLSQSIGGQMLADVPLGAFLSGGVDSSVVVALMQKQAQQSVKTYAIGFDDPRYNEAQYAAAVARHLGTEHTELYVSAQDALELVPQLPSIYCEPFADSSQLPTFLVTKMARQHVTVALSGDGGDELFGGYTPYLFTPRYWNLLKCYPQPLRAALAASMSRLPLPDKFLKLAEVMGASNKESFYRSIMSHWGQPEDVVIGAKEPASVLNSSDLWPETDSFEHWMMAMEAQMYMPDDILVKVDRAAMANSLETRVPLLDHRVIELAWQLPLSMKIRDGKGKWVLREVLYRHVPRELIERPKKGFSIPLANWLRGPLRDWAEALLDEKRLRGEGYFYPAPIREAWQQHVQGKRDNASKLWSVLMFQAWLDEQDANSITL

SEQ ID NO: 28593 - protein, 275 aa, Desulfotalea psychrophila LSv54
MKVQKIAFFTLALLCIMMLGTVQASQIQGDITRSSVISKIQKKRVLRVGMDVFQPWAMKNKKGELVGFEIDVARRLAKDMGVRVEFVPTPWSGIVPALLTGKFDVLIGGIGITSKRALKVNFTIPYDYSGMGIVAHRKLAKGFSSIEDFNRPEIEIAVKLGTSAVTATKKYMPRAKLRMFDTEIQAYQELRNGKVAAVVGSAPRPVYEALDYQDILFNPIADTFSQEPIAFALRKGDPDALAFFNAWIRIVDHEGWLKERHNYWFNSKEWIDQVE

SEQ ID NO: 28594 - protein, 443 aa, Desulfotalea psychrophila LSv54
MTRRAGIKFTGIGLAFLSLSVTGQPVHGAEQELTHSVAEIAYGLDTLYLLLSGAMVMWMAAGFSMLECGLVRSKNVVEILTKNITLFAIASIACLLVGYNIMYGDGGSILPSFSFLVGGDHSPADISLGGENHYSRIADFFFQVVFVATAMSVVSGAIAERMKLWAFLLFAVVMCSAIYPVQGYWKWGGGFLDHLGFLDFAGSGVVHLCGASAALAGVLLLGPRLGKYKNGRIKAIPGSNLPLASLGTFILWFGWFGFNGGSQLRISTVSDANAVAMAFANTNMAAAGGLLAALILSRIWFGKADLTMALNGALAGLVAITAEPVTPSLLTATGVGAVAGILVVISIILLDKAHIDDPVGAISVHGVSGIWGLLAVTITNPEASLIAQLIGITTIFSWVFITSIITWFAIKKVMGLRISPEEEHEGVDLCECGLTAYPEFTKD

SEQ ID NO: 28595 - protein, 66 aa, Desulfotalea psychrophila LSv54
MAEGTVKWFNDAKGFGFIEQEGGDDLFVHHTSINASGFKTLEEGARVTFDIEQGPKGPAAANVTVI

SEQ ID NO: 28596 - protein, 214 aa, Desulfotalea psychrophila LSv54
MKFFIDTANLDEIREGVELGLVDGVTTNPSLIARENLPFEELIAEICKIVDGPVSAEVISLDAPGMVAEAKKLASIDEKVVIKVPMTAEGLKAVRQLSAAGIKTNVTLIFSANQALLAAKAGASYVSPFVGRLDDIGVNSADLISDILTIFDNYGYASEVIVASVRGPQHVLDSALLGADIATIPLKTIKQLTKHPLTDKGMEQFLADWEKRTQ

SEQ ID NO: 28597 - protein, 398 aa, Desulfotalea psychrophila LSv54
MSVDKIVLAYSGGLDTSVILKWLANEYECPVVAYSANIGQIEDWDAVKEKGMATGADKVIVSDLQKEFVEDYIFPAFRASAIYEGTYLLGTSLARPLISKEQVRIAHAEGANAVSHGATGKGNDQVRFELGYIGLDPSLQIIAPWRTWDLNSRTRLEEYAKQHNIPVPTTKKNPYSSDENLLHISFEGGILESPWNEPDPDMFKLTVSPEMAPDKPTYLEITFQNGDPIALDGVAMEPLELFRALNKVAGENAVGRLDLVENRFVGMKSRGVYETPGGTLLYHAHRDLETICLDREVMKIRDSLVPRYAELIYNGFWFSPERELLQMTMDTAQKTVSGVVRMKLYKGNCFSVGRKSDQSLYKEDFATFEADDVYDQGDATGFIRLNGLRLKINALQGK

SEQ ID NO: 28598 - protein, 476 aa, Desulfotalea psychrophila LSv54
MISVNPILVSIVIYLVLTLLVSRFAANRAGGDEDFSRKYFLGGQFMGGGVLALSLVATYTSASSFIGGPGAAYTFGLGWVLLAVIQVPVVMLTLGVLGPRLWTLAKESKAVTILDIFRDRYHSKALLWLAGMSLVAGFLGMIVVQFTSGARLLNVMVGMSYANGLFLFVGTVVVYTLWGGFRAVSYTDAIQGLIMLAGMVALLLGVLAHGGGMANLTSQMASIDPGLVQPHGAGGFMSWPFLFSFWILVCFGTIGLPHTVLRVMAAKDGKAIARAMVLGTAVTALVTFLPHLIGALGRPLVPELSSPDEIMPTLMLRLFSPWVAGLLLAAPIAAIMSSVDSMLLQATSTLVNDLAIRNYSLSEGQQKWLTRVITIVVAGVCTLLALNPPQMIIWLNMAAFGALQVVFLWPLVLGLFWPAASSQAALASMVLGLAFYLPQTFLKIKIFGLHAIVSSLLASLLAFLLVQVICAGKKRE

SEQ ID NO: 28599 - protein, 432 aa, Desulfotalea psychrophila LSv54
MTNYLCPVCGYLHAGDIDFCFCPVCMASARIFIHDTNADNFGRWDLNSRPIIRSMAEMGSYHQEGRVTARTFLGMDDLIFLPAQVNNFPLGHEVEIDSRVVLGKRARQPVFLQTPILNAAMSCGPLSKEASMALALGSFLAGTIVHTGDGGMGDEEMALTNRVTVQFPTDRFGVSEESLRGADMVEIKISQGVKFGIGGKVRRGKVIAEIAAVSRLGQGKMPQSPAMRQDIKSAKDLSKKILELRRLLDGKPISLKLAGGHLQNDLEAIFSQDCIPDVLVIDGGEGCLDTVSVTVGEHVGLPLIYSLPRVGDFLDLTGLRERVTLIAAGGIRHSGDIAKAIALGADGVYMSGALKIALGPSSLSVAQGGQSLSEGLDIHDGGMRVANFISAATEEVKAIARLCGKRSIHDLNRDDLVSLDSELSRITGVSMA

SEQ ID NO: 28600 - protein, 454 aa, Desulfotalea psychrophila LSv54
MLKIDIYSRGASMTSQRCPVCGYLHSGPIDFHLCPVCNSPATIFIHDSGAENFGRWDLNTRLMIRSMAETGTYYLEGKGTTRKFLGMDDLIFLPAQLETLPLGDEVEVDSTLVLGKVAGQPVLLQTPILNAAMSYGALSKEAKMALALGSSLAGTIANSGEGGMLDEERALADRITLQYATGRFGVSEERLQLADMIEIKISQGAKPGMGGKLPGAKVTAEIAAVRQIAPGKMAQSPAVHEDIRDVKDLSAKILELRSLIGGKPISLKFVGGHLQNDLAAIFSQENIPDVLVIDGSEGGTGAAPVTVKDHVGMPLIYSLPRIAEFLDRNGLRDRVTLIAAGGIRHPGDIAKAIALGADGVYMGGALKIAIGCTYLRQCHLDNCPYGIATQDGSLRKRLDVQAAGQRVANFIGAATEEVKSIARICGKSSIHALNRDDLGSLDPELSRITGIPML

SEQ ID NO: 28601 - protein, 371 aa, Desulfotalea psychrophila LSv54
MIVGILKEIKIKEDRVCMTPGGVVTMVANGHDVIVEKGAGLGSSFSDAEYVAAGATIIDAAADVYAKADMVMHVKEPQPSEYAMIRKGQIVFTYLHLAADKPQTDGLVASGATCIAYETVQMADRSLPLLTPMSEVAGRMAIQQGAKALEAVNGGIGKLIGGVPGVAPAKIMVIGGGVVGVQAAKMACGLGAQVYLLDINLDRLRYLEDVMPANCTTIMSSKAAIHELLPQVDLVVGAVLIPGAKAPSVLTRADLKLMRPKTAIVDVAIDQGGCFETSKPTTHTDPTYVVDEIVHYCVANIPGAVPLTSTMALTNATLPFAVQLANKGWKKACQDNHALALGLNVHEGKLTFKGVCDAFDMPYTPVEEVLA

SEQ ID NO: 28602 - protein, 371 aa, Desulfotalea psychrophila LSv54
MIVGILKEIKIKEDRVCMTPGGVVTMVANGHDVIVEKGAGLGSSFSDAEYVAAGATIIDAAADVYAKADMVMHVKEPQPSEYAMIRKGQIVFTYLHLAADKPQTDGLVASGATCIAYETVQMADRSLPLLTPMSEVAGRMAIQQGAKALEAVNGGIGKLIGGVPGVAPAKIMVIGGGVVGVQAAKMACGLGAQVYLLDINLDRLRYLEDVMPANCTTIMSSKAAIHELLPQVDLVVGAVLIPGAKAPSVLTRADLKLMRPKTAVVDVAIDQGGCFETSKPTTHTEPTYVVDEIVHYCVANIPGAVPLTSTMALTNATLPFAVQLANKGWKKACQDNRALALGLNVHEGKLTFKAVCDAFDMPYTPVEEVLA

SEQ ID NO: 28603 - protein, 505 aa, Desulfotalea psychrophila LSv54
MAAQFWERILMDKKAAVTERAELKKSIKPVQAWALALGAILGWGAFVLPGLRFLPQAGPLASCIGFVLGGVMLFSVAISYGNMVSKYKVTGGAFAFSFVGFGPTVAFICGWALVLGYICIIALNATAVSLLTRFVFPGVFEVGMLYSIVGWDVYAGEIAMLVGILCLCGFLNFRGADLVGKIQVFLAFALCASVFIVFGGSVSHETAAVSNLSPLFADNKSPLASIMAIVAIAPWLYVGFDTIPQAAEEFDFPHKRAEKLMLSAIGWGIVLYAMVTIAVACIMPYKELLAMNSPWATGTVANMALGRVGSVILATAVLAAIFTGINGFFIASSRLLFAMGRATILPSWFADIHPKYQTPHKAILFVLAIAVTAPFFGREVLNWVVDMSAVGTVIAYLISCLSAYKVMKHAQNKRGVMHAVLGSISSVVCILLLTVPGSPGAIGMQSWVALCLWVILGAWFYNARMGDFKALTTEEQSTLILGSSRRVFFGKGKKAPAQQPASKEA

SEQ ID NO: 28604 - protein, 710 aa, Desulfotalea psychrophila LSv54
MTQNLYITATEERSGKSVIVLGVMQMLMKEVRNVAFFRPIISDTEPGDDDPDINLVLDYFDLDIPYEDTYGCTLSKAYELINSGKEDQLHDLILKKYKKLEADHDFILCEGTDFRGSDTSFEAEINADIAANLGAPLLLVLSGRKKIEKEIMQATQLSIDTMLEKGSSFAACIINRAAETITPETFHKLQAKNRALSRIPFYVMPENSNLASPSVMDVKKWLDASVMHGSEKLAGLVENYVVAAMQIGNFLDHIKPGSCVITPGDRSDIILASLASKASSTYPDISGIVLTGDMKPAESVQKLIEGWQGTPTPILSVATNTYQTIMRLNELYSHIQASDSQRIATALGTFSKHVDTKELTEHLISSIPTTITPKMFEYALMEKASQDKQRIVLPEGTCERILRAADILLRRGVANLTLLGPADEVKSRAAACGMDTRWVEIIDPQNTNLLAPFVDEYMKARAHKGMIEDIARDRMTDPTYFGTMMVHTGYADGMVSGAENTTAHTIRPAFEFIKTKPGISTVSSVFLMCLSDRVLVYGDCAVNPNPTAKQLAEIALSSAETARLFGIEPRVAMLSYSTGSSGKGEDVERVIEATKIAQALIIERKLDINLEGPIQYDAAIDPDVARTKLPNSLVAGKATVFTFPDLNTGNNTYKAVQRAAGAVAIGPILQGLNKPVNDLSRGCTVDDIVNTVAITAIQAQEEKRLFALKK

SEQ ID NO: 28605 - protein, 405 aa, Desulfotalea psychrophila LSv54
MKILIINSGSSSIKFQLIDMSDESVLASGLVERIGETDTTEKNINCTFHPGTDKKHKIEICQTVADHRQGMLAAIELLGDKEQAVMSDLSEIDAVGHRIVHGGETMYQPVVVDEKVIAEITAAIPLAPLHNPGHLDGIKVAQELFTEVPHVTVFDTAFFQTIPPHAHIYALPYELYTKHRIRRYGAHGTSHKFVTNECAKLLEKPVEECNLITVHLGNGSSMSAVEGGKAIDTSMGVTPLEGLVMGTRSGDIDPAIMAFLNRNLGMSIEEIDHMLNKESGLKGICGMNDMRDIHAAADAGNELAELAVGIQTYRIRKYIGSYMAALGQVDAIVFTAGIGENDDIVRAKSLEKLENLGVILDKKLNAQRSKEPFCISTPESKIQVWVIPTNEELAIARETKAVVNA

SEQ ID NO: 28606 - protein, 374 aa, Desulfotalea psychrophila LSv54
MKDIKELFKKKAKVLIADDDAIVRETISEILGVYGYEVELASCGGEAISKVDDSFDVIVLDINMPDLNGFETMDAIEKLGFNIPILFLTGAGSMDYAVKAINMGAYDFLTKPIKDLDLFNIQIKRAVEKRAYILREQEYKKSLEHEIRIKTAQLEKQNKLLTSYNKSIKNATVQLMASLQNAMEEKDYYTAGHTTRVTEYAVMLGLSMGISESDIAILRRAAQFHDIGKLVIDLSCIQKAGKLTDDEWALIKKHPEVGASIIEPLGFMDKEIAIIRHHHERMDGKGYPAGLRGHEIDELTRILTVVDSYDAMTSHRNYKENMTREQAVAELERCSGTQFDADIVKYFSRSIVDFTLSGKFEADKPLDCYLNYTG

SEQ ID NO: 28607 - protein, 225 aa, Desulfotalea psychrophila LSv54
MEYCTEFLERIKRTPSSISYRFKMPEGFSFVAGQYMLVDLGDELARPLSLSSCPQEGGFIEFTKRMIGSPYCMRLESLQRGEAIRVAGPFGEFCCPDSGEPLVLIAGGIGITPIRSILTSLKEERGETTLIYGNQNREDIAFRDELEHLSLAHYHLVHVLSDATGMENAYQGFINADILAREVPKGSIGQYMVSGPPLMVEAIKKGLAGIGVAEERIRTDIFLGY

SEQ ID NO: 28608 - protein, 327 aa, Desulfotalea psychrophila LSv54
MVKHMSIEAAKKVLEIEEQGLAAVRENIGEEFLAAVEAIVNCPTRLVITGIGKSGIVGQKISATLNSIGTSSFFLHPVEALHGDLGMVMATDVVLAISYSGETAELNGLLRSLKARGNTIIGMTGGAKSTLAMASDIFLNIRIPAEACPLGLAPTTSTTATMALGDALGVVLLNRKQFKAEDFRFNHPGGSLGERLKVKVAEVMITGSDMPMVAPDQDAIAALAELNSKNVGAVLVVADTGMLAGIITDGDVRRYVLDAEALEGLCAADLMTKHPLTIGDGVLAADALSIMQQHEVTVLPVVSEEMRLVGLLNLHKLLGKGEFRFLI

SEQ ID NO: 28609 - protein, 722 aa, Desulfotalea psychrophila LSv54
MCNMNIATKLFPFLKWFHDYSGGKFKIDLLAGITVALVLIPQSMAYAQLAGLPAYYGLYAAFLPPMVAALFGSSKQLATGPVAVVSLMSAAALEPLATAGSTEFIAYSIALALTVGLFQLSLGILRLGLVVNFLSHPVVNGFTNAAAIIIATSQLPKLFGVSVDKATHHYETIIRVFQAALDYTHIPTLIFGISAIVIMAVLKKINPRIPNVLVAVGLATIISYFSGFNSDTHLSINRINNTEIQENIKTFNNLIEEITLVGDKRSTIGIKVDEEQERQTTDFETIALIKLKTDVAIMNTLIAELKKRSATIRYDLRHAKFVGIKEASGLRLYLQDQVPAGLNSDGKTWRLNVGRSQLNPDELKFMSGGAVIGKVPAGIPSLSTPDVSIKTFTKLLPTAIIISLLGFMEAIAIAKAMAAQTGQKLDPNQELIGQGLANIVGSFGSSYAVSGSFSRSAVNLGAGAVSGISSVITSVVVLITLIFFTPLLYHLPQAVLAAVIMMAVVGLLNVKGFIHSWKAQWYDGLISIISFIVTLYFAPHLDKGIMVGVALSMTVFLYKSMRPVVARLSLNKERVLANADYYRLRGCKHISVVRFDGALFFANASYLDEQVEKFRMEQPELRYILLDARGINDMDASGEEALDMLYKRVRSANLGFAICGLKGQVVDVMVRTGLYDKIGSEYIHADSKSAVSAITKIIHQLPDLPSDGCDDCPLTQYLPNAD

SEQ ID NO: 28610 - protein, 553 aa, Desulfotalea psychrophila LSv54
METKRALLAIVISFAILFGYQYFFPGLDQPVQTTSETQTTVNGTSAKQAGAIQEITAPVIPVVASAKYDRVPRDIVVDTDLYTATISEAGGALKSFVLKEQKETNAEDSPGMQLVNNSKTDGYPLTFSWGGAAPSNLLYTSQDSEVRFGSNGKARLIMTAKSSTGLVIERVYTFDKKTYLFDLDVRVVNQSGQALQGSAQLHQVSVPYESTEDNPAARFLFMGPVVYADGELTEIDPKDLEDGPQSFMGDIQWLGYESRYFMSMIVPYGLDGQTFTTSGGADLTKSFIAGGLDTLAAGAEKEYKYHVLYGPKKVEMLKSAGYDLDKAVNFGWFDIIAKPTLWLLNFFHSFTHNYGIAIILVTIMFKGIFWPITQKGMKSMKNMQKLQPKMAALKEKHKDDPTRMNKEVMSLYKAYKVNPLGGCLPMVLQIPVFFALYKVLLLSIELRHAPFMFWITDLSAPDRLWIGFNLPYLGGLPVLTLLMGASMFLQQKFSPTTADPTQAKIMMFLPVVFTFMFLNFASGLVLYWFVNNLLSILQQVLINRDVKHKTATA

SEQ ID NO: 28611 - protein, 598 aa, Desulfotalea psychrophila LSv54
MTKMKMTTEEAFITVLQMHGIEHAFGIIGSAMMPISDLFPKAGITFWDCAHEGNAGMMADGYTRASGKMSMMVAQNGPGITNFITPVKTAYWNHTPLLLVTPQAANATMGQGGFQEVEQMAVFKDMVAYQEEVRDPRRMAEVLNRVIMQAKRASAPAQINIPRDYWTQVIEIELPAIVDFERPAGGEKALEKAAELLSKAKFPVILNGAGVILGGAIKDTIELAERLDAPVCCGYQHNDAFPGSHPLAAGPLGYNGSKAGMELIAQADVVLALGTRLNPFSTLPGYGIDYWPQNAAIIQVDINPDRIGLTKAVKVGIIGDAKKVARGILNRLTATAGDTDREIRKANIGKTKAEWSVELANLVHEEDDPGTSWNKRARDREPDKMSPREAWNAMKSVIPENAIISSDIGNNCAIGNAYPTFEEGRKYLAPGMFGPCGYGFPAICGAKIAQPDVPVIGMAGDGAFGISMNEMVSCGRKDWPPITMIIFRNYQWGAEKRNTTLWYSDNFVGTELDPNVSYAKIAQACGLIGVQATCTDDLTAQLKEAVRVQMEEGKTTFIEVLVNQELGEPFRRDAMKAPVMVAGIKKEDMRPQCCCCKK

SEQ ID NO: 28612 - protein, 613 aa, Desulfotalea psychrophila LSv54
MTIKKFFPCTQWFKLLNAETVKLDFMAGLTGAIIVLPQGVAFATIAGLPPQYGLYTAIVIPIIAALFGSSYHLVSGPTTAISIIVFASVSRFAEAGTPEFISMALMVTFLAGVYQLIFGALRLGSLINFVSHSVITGFTAGSAILVMTSQLKSVTGISFAKGQSFYNTWISLFAQLEKINPYALGIALATLAVALISKKIFPRAPNLLAGMIFGSILALFLKNYTETITFVAEIPAQLPQLSSPTFSMASLRRLAPEGLAIALIGLIEATSISRSIAAKSNQKLDSNQEFIAQGLANITGSFFSCYAASGSFTRSGLNYEAGAKTPLSAIFAAILLMLIVLLVAPMTAYLPVSAMGGVIFLVGYNLINFKQIKEIIEHHRSETAILAVTFFGTLFVHIEFAISFGVLLSLMIFLARTSTPYIPSLCPIPTRTGSNHFIEVCEDVCAECPQFKIIRIDTPIYFGSVSYILNHISNIIEKEKIKHILIVAFGINGIDLTGAEALVNENNQLRKIGGGLYFVDHDLAHKASTEHQYLLDHIGQKHFFQSKVEAINTIFQKLDRNICADCTVRIFAECLSEEHNKELLALKEDYLKRELYMGSCSHGKVQKKGASHK

SEQ ID NO: 28613 - protein, 66 aa, Desulfotalea psychrophila LSv54
MAEGIVKWFNDAKGFGFIEQEGGDDLFVHHTSINASGFKTLEEGARVSFDIEEGQKGPAAANVTAL

SEQ ID NO: 28614 - protein, 66 aa, Desulfotalea psychrophila LSv54
MAEGIVKWFNDAKGFGFIDQEGGDDLFVHHTSINASGFKTLEEGARVSFDIEEGQKGPAAANVTAL

SEQ ID NO: 28615 - protein, 423 aa, Desulfotalea psychrophila LSv54
MSFNTLGLSAPLLKAVAEKGYDTPSPIQAKAIPVIMEGKDVMAAAQTGTGKTAAFTLPILELLSQSKRRVQANQARVLILTPTRELAAQIGESVTTYGKGLSLTSAVIFGGVNINPQMKRLRGGVDILVATPGRLLDLHRQNAIKFNRLEILVLDEADRMLDMGFINDIRKVLAFLPKERQNLMFSATFSSSINNLARGMFNNPVEISVTPPNSTVEIIDQCIYPVDKKQKPALLIQLIRDNKWGQTLVFSKTKHGANRLVGQLQKKGINAAAIHGNKSQSARTKALAEFKNGTVQILVATDIAARGLDIDLLPHVVNFDLPHVQEDYIHRIGRTGRAGASGEAISLVCADEFALLADIERLIKKILPRKSVEGFEPVHPLPESCLNTRPFRAKSPKKNTEGRTRRQGSRPNSRGPKKPSGDK

SEQ ID NO: 28616 - protein, 66 aa, Desulfotalea psychrophila LSv54
MAEGTVKWFNDAKGFGFIEQEGGDDLFVHYSSISGEGFKTLQEGTRVSFDIEQGPKGPAAANVVVL

SEQ ID NO: 28617 - protein, 563 aa, Desulfotalea psychrophila LSv54
MQENVNCCRLVPSHDALRGPFGGDVFSAWALYYQDGGYMKQGRGKYSIDTTDYTIGQDNIQKWGFDVHNIVFGVSAGLILLFLLATLFSDPHTAKMALDGVKWKIIANFDLLFIWSVNIFVLFCLGLIVSPYGKIRLGGDDAVPDYSVCSWLAMLFAAGMAIGLMFWSVAEPVAYFTGWYKTPLNVVPNSPEAARLAMGATMFHWGLHPWATYAVVGLSLAYFTYNKGLPLSIRSIFYPILGERAWGWAGHIVDILAVLATLFGLATSLGLGAQQAASGINNVFGLENTIGLQIGVICGVTLLATISVVRGIEGGVKVLSNINMIIAFFLLVAVIVLGGGVVLKSLPTTMGAYLENIIPLSNPHGREDQAWFQGWTVFYWAWWISWSPCVGMFIARVSKGRTIRQFLIAVLIVPTLVTFVWMSTFGGIAIDQVVRGVGALGTEGLKSVPLAMFQMFDVLPFSNFLSIIGIILVLVFFITSSDSASLVIDSITAGGKVEAPVPQRVFWALTEGAIAAALLWVGGTEAIQALQAGAICTALPFTVIILFMCLSLILGLRTEPRKL

SEQ ID NO: 28618 - protein, 284 aa, Desulfotalea psychrophila LSv54
MFLIISPRREAMKFGKLCIAMVLTMVMSTCAFAADINLSKSSSLNTIVKNGELRIGLNASYPPFEMTNKQGRLIGFDVELGKEIAKSMGVKVKFVNMDFDGLIPALLSDKFDLIISGMTLTQQRNLKIAFSNPYVLMGQGIMVNMSKEKDIRLYRNLNKPEMKIVSCIGTTGEEAARKYLPKAQYKSFDQPSDSAQEVISGRADAFVYDLHVLEVLQKRMGGDKTFLLKEPFTFEPMAIGFKQGDPDLTNFINNFLFQFKNDGRYERIYSKWLLSNKWESLIDG

SEQ ID NO: 28619 - protein, 271 aa, Desulfotalea psychrophila LSv54
MRLKSIIAGAVISVMVSGVVAFAGPVWDKIQKSKTLRAGIMNNSIPGAYYNDKKEWVGFDVDMAKEIAKRLGLKLEQVLVTDKTRIGFLQQGRIDMSIANMTHKRERDKSIDFSITYFFDGQKMLTRKGKYADWNALVGKTIATVQGTTSEINVKTLMKKMGGAEIVSYQDYPSAFNALQMGRVQAFSTDSTILLGYAAQEPGKYELVGDFFSREPYGIGLPQDESQLRDAVNFALQDMWKDGTYMAIYNKWYGERTPYYFPMTEQIEMWP

SEQ ID NO: 28620 - protein, 510 aa, Desulfotalea psychrophila LSv54
MMSKDIQQKAHAGPELKQGKLLFASTMSFIVLVVLCGALFPDLLYKAGITTMKYLTDRFGWVYMAGSFIYVMVMFFFAFSKYGNIKLGPDDATPDFSTFSWMGMLFSAGMGTVMLYWGVAEPVYHYIHPLATTGLAPLSPEAAEFAMKQSFIHQGIQAWAAFSVVGLILGYMMYRKGETNLISNILIPWGRDKANGPLGKAINLICIFGAIAGISTSLGQTGLSLSVSFKYLFGTPDSDLVKIVVVATIAIITIFCTTAGLEKGIKVLSDYNVYLLVGILILVGLVGPTTKMFNVYFDTIGNYMNSFFSDALMLPTFAADKETSWITGWPIYYYAWAIAWAPFVGPFIARVSKGRTVREFILGSMILPCLGIFIWVAFFGTIGLESSPEVIKAAAASSKAATFIVLESLPFGKVISVGVVLALFTCFITSINSSTYTLSSMSSDGDPNPSNRMKIIWTIAQAAMALTLMLGVKNGIDLLQSISLIFALPLMFVLFLCIISTFKQFREEFK

SEQ ID NO: 28621 - protein, 344 aa, Desulfotalea psychrophila LSv54
MKCLRAKSSRANYKKKHFKNKSLQGKQTMSKPVNALASPRFCGIRTFMRLPYQTDLQDIDFAVLGIPFDTATTYKPGCRFGPAGIRAASTILKSYEEVLDVDIFEECSGVDYGDIDIIPGHLDESFERIEEGMSALLKNDIIPVVMGGDHSITLPQLRSIVKKHGPVALIHFDAHSDTGSDYFGKPYNHGTTFHWAIKEGLIKPEESTQTGIRGPLYGRDSLKFVRESGMQVITGWELHEIGINEAIKRIKERISPGTPVFMSFDIDFLDAAYAPGTGTPEIGGFTTHEALKLVLNCCQGQELVGMDLVEVLPESDNAEITSFAAAGIMHAFLSCVAANKRAKR

SEQ ID NO: 28622 - protein, 538 aa, Desulfotalea psychrophila LSv54
MSKQKNNLMTRLLGQYDPFLFYTTALVTLAIVVFGAIYPEILGKYAMAGRAYIADTFGWLYVSIMALCIIVGFGVAISKYGNLTLGQAGDEPEFSTTTWIAMLFSCGIGVGYVLWGAAEPMFHFMNTPYGAVAGSPEALPVAIRIASFHWGIHCWMGYSIVGLCIAFPAFRQNRPMTLSVALHGLLGDKASTSVWGRLLDTIGAIATVGGLSTALGLGIISLSYGAGLIFGIEVGVGGKLLIMAIIIGLYVISAITGLHRGMAFLSNVNIILAISWCLFILIFGETNTLLRLLVNNVGSYVSEFIPMTFYTDPLQQHSKWFSSWTLFCWLLTIAWAPFVGGFIARISRGRTIRGFIVGAVLAPTAFSLVWFTIVGGSSILAEMNQTAPMWTSISADVGSGIYMLLSTLPFAKLLSIIVFINMILFLVTSADSASFFVAMLMSKGAYEPKTLMKVVWGAFLGTLAVVLLVSGGLGALKSACIIAGAPFGIGMIFMLWSLLKDLKSEMQHSEMEKRQSEIEQIEMLKSEILKSQLQKEAL

SEQ ID NO: 28623 - protein, 367 aa, Desulfotalea psychrophila LSv54
MKIGIPREIKAQEGRVALLPRHIKTLIEAGHTVYLEKDAGLLSAASNEDYVTAGAILVDTAAELFEQATLIVKVKEILEPEFALLRADHIIFTNIHAALDAEQLDALLTAKCLAISAENTHKFGSPNCPLAGEVGAFEAIRMTMAQNGGTGRHFMSHFGEPAAKAVVIGLGNVGQGSLRTLVPFGIRTVALDIYEGARKSIAMQYHNAPVTVGDVSELEDHIYDADMIINCVLWPKHRKDHLIPRSMLKKLKRGACIVDVSCDTAGAIETSRATSWADPEYTVDGIRHFVVDNIPGSVPVTASAGYGEAILPKILAIADKGAEQAIREDEWLAKGLTCIGGELILEEAGIYQNKPFTPLCDWVKRSV

SEQ ID NO: 28624 - protein, 454 aa, Desulfotalea psychrophila LSv54
MKMDLAGPMVLIVDDDQVHRYMLSSMLEEWGYLSAQADDGETAVAAVKKRKYDAVLMDVRMARMDGYRAFSIIHGLEPALPVIIMTAYSSVDQAVAAIKEGAHDYLTKPLDFDRLHIALRRAFDRGQVSHSREKQGEGGQKSGLKTDIIASSESMAELLEMVSYVAPTEATVLIQGESGTGKELVAETLHFNSLRASGPFIRVNCAALAENLLESELFGHERGAFTGADRRREGRFVQADGGTLFLDEIGETSQAMQVKLLRVLQEQEFQRVGGEETLQVDVRIIAATNRNLEEEVAAGRFREDLYYRLNVVMLAVPPLRDRLGDVPLLARYFAEKFAGKNGRTLNAITPLCLEVLQVYRWPGNVRELENAIERGIIMMRGDQLTEQTLPLSLQKQKEQTQHARMRGRSLFEAEKILIEQTMQETEGNKSEASRRLGITRKTLQNKLNKYLASQ

SEQ ID NO: 28625 - protein, 425 aa, Desulfotalea psychrophila LSv54
MSKLVAPHGGKGLVCALLEGDALAAELKKATGLKQIEISDRAKGDLIMMGIGGFSPLTGFMTKADWKGVCENLQMADGTFWPVPITLDISAADATDVAVGSEIALVKNGTTFATMLVEEKYEMADEDKKWECEKVFMGEGEESVDGNFWKLAPEDHPGVIMVQAQKEFNLAGPVKVLSEGEYPAEYPGVYLKPAETRAMFEERGWANVAALQLRNPMHRSHEYLAKIAVEVCDGVLIHSLIGNLKPGDIPAPTRVKAIDILIENYFVKENVINAGYPLDMRYAGPREGLLHATFRQNYGVNNMLIGRDHAGVGDFYGLFEAQQIFDRVPVTGDPGKDLLCKPMKIDWTFYCYECDGMASLRTCPHKKESRVILSGTKLRKALSDGAEVVDHFGRDKVLVYLRDYYEGLTEKVEVKMQKAASGSAM

SEQ ID NO: 28626 - protein, 633 aa, Desulfotalea psychrophila LSv54
MGKIIGIDLGTTNSCVSVMEGGEPKVIANVEGNRTTPSVVAFADNDERLVGMIAKRQAVTNPERTVYAAKRLIGRKFTDAEVQRSQEVSPFDIVEGISGSVAIQVEGHKYRPAEISAMVLGKMKQTAEEYLGEEVTEAVVTVPAYFNDSQRQATKDAGKIAGLDVKRIINEPTAASLAYGLDKKVEEKIAVFDLGGGTFDVSVLEIGDGVFEVKSTNGDTFLGGEDFDMRIVHWLADEFKREQGIDLRSDKMALQRLKEEAEKAKMELSTTVETDINLPFITADASGPKHLNIKLSRSKFETLVEDLVERTVGPCKTALKDAGLSASQIDEVILVGGMSRMPMVQKKVVEIFGKEPHKGVNPDEVVAIGAAIQGGVLQGDVKDVLLLDVTPLSLGIETLGGVTTKLIEKNTTVPTKKSQVFSTAADNQPAVSIHVLQGEREMAEGNKTIGRFELADIPTAPRGVPQIEVTFDLDANGILNVSAKDMGTGKEQSIKITASSGLTDEEIDRMTKDAELHADEDKKRKELVEARNSADGLIHSTEKTLKDLGDKVDAETKENVEKEIANVKTALEGDDVEAIKAAIEALTAASHKLAELMYQQASQETPGDGDAGAAGAKKKDDDDVVDADYEEVK

SEQ ID NO: 28627 - protein, 313 aa, Desulfotalea psychrophila LSv54
MQNNEYKTLDDFLGKDVKSGMVAIVGPPNAGKSTLMNQLLGQKISIVTSKPQTTRNRILGIVNDDAYQIVLLDTPGLHKADEPLNIEMMRVALESLSEVDAVLFLVDVSLPLPPKALAKQREELAGYMEKIESPAILVLNKVDLIDKQKLLPMIESYAKLFPFKAVVPISALNGDGADNLLKEILELIPVGPRYFPEDIPTDATERFLAAEIVREKVFLLTGQELPYSAATLVESFKEDEQKKLITIHATIVVERPSQKGMIIGKGGQKLKQIGTAARKDIEALLGSKVLLKLWVKVKKKWAEDENFLKELGF

SEQ ID NO: 28628 - protein, 632 aa, Desulfotalea psychrophila LSv54
MTTVSTDVTGSTDTASSIDAAVPSAPVAPAAPVAPAAPVAPVAPVAPVAPVAPAVSFTDFNLKSDLVANLVKLGFSQPTPIQEKAIPLLLAGSDLIGQAQTGTGKTAAFGLPLLNNIDFSKKCVQALVLAPTRELAQQVGDALATYSGDDGRNVLVVYGGSSYQAQVGGLRRGARVVVGTPGRLLDLIRQGSLKLDQLKTLVLDEADEMLSMGFIDDIETILSQTPKDRQTMLFSATLSSRVMSIANRYLHSPESISISPKQMIGSSIEQRYYLINNSDKIAAITRVFEVETVESALIFARTRATVSELANELISRGFAAEGLSGDLSQEARTRVLSRFKKGQIKVLVATDVAARGLDIDDISHVFNYDLPEDPEVYVHRIGRTGRAGRSGTAISLVTLRDRWMHRRIEQYTGKKLIKGELPTVEQIEEHRNTQFLERLDVWIRRGRCRGEREIVEALVEQGMDPLDVAAAALKIVRKDETKRPIDPIKPVIEDAGGRNRKRGDRNDRGANGRGDRGGRSDSRGGRPQGRRDDRFAKGGDRGPKKKGDDVRQVSDKDMVPLTLDAGKKDGVAVNHIVASLSHFAGISSRELGKIRINETHSSIDVPKGLVDKMLSHNGSYRISKKAVNLTHQ

SEQ ID NO: 28629 - protein, 511 aa, Desulfotalea psychrophila LSv54
MNEICPPEENATQRNICYTSFFWVVFLVISSCLPLLLAPKASAKYIGIAFHFITNELGWLYMLAGLVSFIFVLWLAFGPLGDKKLGEEKEYSTFSWIGMLICAGVGAGVLFGGAIEWAYYMSYPLQGETVGSKKAIEWAGAYGLFHWGPVCWAIYATLAVPMAYNYYVKKVPILNIAQTCKGVLGERANHWPGKVINIFFMAGLVAGSATALGIGVPVIAACLVSVFGFAPSFQLEFLTLLGITMLFCMTSYLGLKNGLSKLSDLNVYAALFLLLFVLIVGPSVFIIETSLASLGLLTTEIVRMATWMDPSSETSFVKDWTVFYYAWFVAYAPFMGLFIAKISRGRTVREVVLGPVILASLGCGLFYLIFGNFGLHLQLTGQLDVVELVKTNKGATVIMQIADFLPWAPLYKLLYALVMAISMATTLDAVSFALSASTTKQLQPDEEPAHWNRLFWAIVLGFIPTGMLFIDGPLSILQTASIVVGLPVLFIIWLGVYSFLKDYLRDGWLTD

SEQ ID NO: 28630 - protein, 435 aa, Desulfotalea psychrophila LSv54
MKEICVGIIGFGTVGRGLAETLRIQQERLEARIGATIRLKTVADIACKSLPEEFAGVTLTQNATDIFTDPEIDIVVELIGGIEPAKTFLLQAIENGKHVITANKALLSTHGKEIFEAAVAKNVEVGFEASVGGGIPVIKALKEGLVANRINSIKGIMNGTANYILSQMTEHGTPFAEVLKEAQELGFAEADPTYDVEGVDTAHKLAILMTIAYGLNVNIDHINIEGISSIEPVDIDIAREFGFAIKLLAISNNHGDNVEARVHPTMVPHSHMLATIGGAFNGIHFNGDTVTDVLLYGPGAGMMPTGSAVAADVADIARNILSDSVNRVPALSYQPERMTAPVITPMSELVCAYYFRFTVSSEPGVLAAIATILGKYNISVQSIVQKELGEDQPVYLVVRSHDAQESAVNAAMAEIRVLDACLAEPLKIRILGAND

SEQ ID NO: 28631 - protein, 406 aa, Desulfotalea psychrophila LSv54
MNEVYFAILCFVAIQFILVALIVLAKKTLLPSGEVQITINETKECRVPAGGKLLTSLADNGIILSSACGGAGSCGQCRCIVTEGGGSIFLTERSLINNRDANRGMRLSCQVPVKRSMRILVPPEMLEAKKWRCRVASNRNVATFIKEMVLQLPEGESVDFKAGGYIQIEIPAHSLAYKDFDIDERFLSDWTKFKMFQYKSLVATPVTRAYSMANYPGEKGIIKLNVRIATPPPGEVAAPPGKSSSYIFNLQEGDEVTISGPFGDFFMDDSDSEVLLIGGGAGMAPLRSHVFDLFQGKHTGRKVSFWYGGRSLQEVFYQTELNALANEYDNFTYHLGLSDPQEEDNWTGEVGYIHLILYENYLKDHPAPEDINYYLCGPPVMNRSVQEMLDNLGVERTNIHFDDFGG

SEQ ID NO: 28632 - protein, 66 aa, Desulfotalea psychrophila LSv54
MAEGIVKWFNDAKGFGFIEQEGGDDLFVHHTSINASGFKTLEEGARVSFEIEDGAKGPAAANVTAL

SEQ ID NO: 28633 - protein, 242 aa, Desulfotalea psychrophila LSv54
MAKLHILIVEDEADIQQLVSYNLVRAGFNVTCADSGEEALGCLAREAFDCILLDIMLPGISGLEVCQSIRQNEGKLDAGSPIIMMTAKGEEEDIIDGLEKGADDYITKPFSPKVLVARVKAVVRRGQKAEAHSDSGHISIANLVIDQGRYEVTAQGKAIQLTLTEFGILVLLAEKPGWVFTRQQIIDAVRGYDFLVTPRAIDVQIFGLRKKLGAAGQSIETVRGIGYKFKDPQEEDLERGQR

SEQ ID NO: 28634 - protein, 868 aa, Desulfotalea psychrophila LSv54
MQLDKFTLKSQEAVQAAQQQARQMGHQEIHLSHLVLAILQQTDSIIIPVLKKMGVQPHMLEVALQEALAAIPKVSGSGAGQVYASQALTTLFDSASDIASSMQDDFVSMEHIFLAALRVKKDAVADVFKRNQVSEKQFLQALMDIRGNQRVTDQSPEEKFQALQKYADNLTDRAKQGKIDPVIGRDEEIRRVIQVLSRRTKNNPILIGEPGVGKTAIVEGLAQRIVDDDIPTTLKNKQVVTLDMGALIAGAKYRGEFEDRLKAVLKEVEKQAGNIILFIDELHTIVGAGASEGSMDASNMLKPALARGELHCVGATTLNEYKKYIEKDTALERRFQPVLVQEPSVEDTVAILRGIKEKYEIHHGVRIQDAATVAAVTLSNRYIADRFLPDKAIDLIDEAASQLRIEIDSMPTEIDQLQRKCMKLEIEQEALKKEKDSASISRLQESKKQLADLSDELKGLMGQWNIERETIAGISSIKEEIDAAQAEEQLAERAGDLQKVAQIRYQKLPGLGEKLVKAQAELSTMQQDKMILKEEVGPEDIASIVSKWTGIPVDKLLQGERDKLVHAEDDLAKRVVGQRDAIVAVANAVRRSRAGLQNPNRPLGSFLFLGPTGVGKTELAKSLADFLFEDEQAMIRVDMSEYMERHAVSRLIGAPPGYVGYDEGGYLTEAIRRRPYAVILLDEIEKAHPDVFNILLQILDDGRLTDGKGRTVDFRNTILIMTSNIGGEQILEMVQAGKGAADMYEQINTMLQSRFKPEFLNRIDDSIIFNPLSREDMLSILDIQLIGLAGRLLERDIVLQVEKNAKELLVARGYDRAYGARPLKRSIQRYLEDPLALTILAGEIKTPAKLVVGLENGELLMRWAELTE

SEQ ID NO: 28635 - protein, 1014 aa, Desulfotalea psychrophila LSv54
MNFFLRSILHFFYPCLLIALLWATPSFAAEIQKEPDSRQVLIVQSGYEGYPWTDSQNKGIQDVFSAAPQPTDFFFEYIDTKRNHGKAYLKNLQKFWEIKYRNQQIDLIITCDNQAYEFIIKNRISLFQNIPLVFAGMNKFKPAMLRGKRLVTGVTEENDLEATIDIALRLHPKTKKLVFIIPGAQPYRLQWFKDLPVRYREEVEQIIITARELDEIDRELDSLGPNLVAILLNSVVVRDGIYMSFEKFVIHLATNRPFPLYTLWDNTLGQGIVGGKLIRGELQGRKAAELALKILRGIPVAELPILEKIPNQYMFDWHQLQRFNIDISDLPAEAVVVNRPISFYAQNKRLVQVTLSGIFLLLLLVISLATAVINLKKAQKKVFLSDDILEQMPEAIVLTGMDGNIEKWLGRAEEIFGYSESDCLGRALAFNQSSELNITEQIEAGIEKSSRFLGEIACLRKDGTSVPIEVTSTRAFSRSGIAVGTISILQDISERREAKESLRASEDRFRKMIAKSPMPTMLTNQNYDIAFVNDKFTELFGYRLEDIETGRKWWKSAYPDANYRRRAEEGWRVAIKKMLAGDADMARQEWDLTVKDGSVRRCEFYMVPIEDLSLVIVNDISQRVREASEKNKLELRLRQAQKMEAIGALAGGIAHDFNNILAVILGYAELAKDEIPANSIIGEDLDQVIEGGNRAKELVKQILAFSRQEKVKRLPLQVQVLLKETMRMLRPSLPSTIEIQTEIDPLCGFVLADPTQVHQIIMNLCTNANHAMEKSGGRLDIELKRISVDEGNRHKYSSLVPGDYVVLVVADTGEGIAPHNIGKIFEPYFTTKEIGKGTGMGLATIHGIIREYGGIIDVASDPEHGSVFSVFFPVITTEKVVADTVAQDSPQDRGRILLVDDEKLLLTVIQKVLARLDYRVTTKSSSLEALTIFKESPDAFDAIITDQTMPDMVGSDLAQEILKIRADIPIILCTGYSDQFDADRVHSLGIREFALKPLTKGTLAHLLSRVLGDY

SEQ ID NO: 28636 - protein, 1018 aa, Desulfotalea psychrophila LSv54
MNFISRCVFKNKFPFFHLCLLIAFFLPSLPLLSAFPQKEVHNRQILIIQAGYEGYPWTDSQHKGIQDVFSSVPEPTDLFFEYIDSKRNHGVTYFKNLQKFWEIKYSNQHIDLIITCDNQAYEFFLKNRSALFQDTPLVFAGVNRFDSASLKGKKLITGIVEENDLEATVEIALHLHPRTKKIVFIIPGAQSYRLQWVKDLPARYREEVEQVILTVKELGEIDRELDALGPDIIAILLHNVVSRDGIYMPVQKFVVHLAENRPFPIYALWDSTLGRGIVGGKLVNGELQGREVAKLALKILRGTSVSELPVIEIPNQYMFDWQQLQRFNVDLSDLPAEAVVINRPISFYVQNKRLVQMTLSGISLLLLLVIFLTTALIYLKKAQNKVLLSDEILEQMPEAIVLTDLDGNIEKWLGRAEEIFGYSESECLGRVLAFNQPLELNITEQIEAGLKEKGRFLGEISCLRKDGRAVPIEVTATRVFSRSGIVVGTISILQDITERRRAKEFLRVSEVRFRKMVAKSPMPTILTDQNQDLIFVNDKFTELFGYRLEDIDTEKKWWESAYPDANYRKMVKNIWRIAIKRAVADDRDIEVQEWDLTTRDGRVSRCEFYMVPIEEQSLIVINDISQRIRDASEKNKLEMQLQQAQKMEAIGTLAGGIAHDFNNILAVILGYAELAKDEVPANSVIEKDLDQVIVGGNRAKELVKQILAFSRQEKVERLPMKVQVLLKEAMRMLRPSLPSTIEIQTEIDPLCGFILADPTQVHQIIMNLCTNANHAMDKSGGRLHIELKRISIDEENEHSSLRSGDYVVLVVADTGKGIAPDNIGKIFEPYFTTKEIGKGTGMGLATIHGIIREYGGRIDVVSVPGHGAAFSVYFPVITAVETTENAVIKETPQGSGRILLIDDEELLLTVGKKVLERLGYRVTTKSSSLEALAIFKERPDAFDAIITDQTMPDMFGSDLAQEILKIRADIPIILCTGYSDQFDTDMAHSLGIREFVLKPLTKVTLANLLSGVLGGQQE

SEQ ID NO: 28637 - protein, 1018 aa, Desulfotalea psychrophila LSv54
MNFVLRSLLKSNFPLFYCCLLSVLLLSVLPLFAESPQKELHSRQVLIIQSGYEGYLWTESLNRGIQDVFSSAPEATNFFFEYIDTKRNHGGTYFADLRNFWEIKYRNQQIDLIITCDTPAYELLLKNRSSLFKDIPLVFTGVNRFNPTSLKGKKLITGIVEENDFKATVDIALQLHPKIKKLVFIIPGAQSYRLQWVKDLPARYREEVEQVIITGKELGEIDREFDALGPNIIAILLSSVVPIDGIYIPYQQLVPHLAKNRPFPFYTLWDSTLGQGIVGGKLISGEWQGREAAKLALKILQGTPVSELPVIERGSNRYMFDWQQLQRFNIDLSDLPAEAVVINRPISFYAQNKRLVQMTLTCIFILVILVISLATALIRLKKVESKVLLSDEILEQMPEAIVLIGMDGNIEKWLGRAEDIFGYSESECLGRPFAFDQSFEVRTAITGQIEKAIEKKGSFVGETSCLRKDGSLVPIEVTSTRAFSRSGIAMGTISILQDITERRQAKESLRASESRFRKMVAKSPMPTMINGQNQEIVFVNDKLTELFGYRLEDIDTEKKWWESAYPDANYRKRVKNTWDLAIKRAIVDDRDIEVQEWDLTTRDGSVHRCEFYMVPIEELSLVIVNDISPRVREASEKSRLELQLQQAQKMEAIGTLAGGIAHDFNNILAVILGYAELAKDEAPANSVIEKDLDQVIVGGNRAKELVKQILAFSRQEKVERLPMKVQVLLKETMRMLRPSLPSTIEIQTEIDPLCGFILADPTQVHQIIMNICTNANHAMDKSGGRLNIELKRISIDEENEHSSLRSGDYVVLVVADTGEGIAPNNIGKIFEPYFTTKEIGKGTGMGLATIHGIIREYGGRIDVVSVLGHGSAFSVYFPVITAVETIENTVLEETPQGRGRILLVDDEELLLTVGKKVLERLGYRVTTKSSSLEALAIFKERPNAFDAIITDQTMPDMVGSDLAQEILKIRADIPIILCTGYSDQFDTDMAHSLGIREFALKPLTKATLANLLSGVLNA

SEQ ID NO: 28638 - protein, 154 aa, Desulfotalea psychrophila LSv54
MCAPCLGCVLHYFIRNRIVRVTSPRLRVKFYWFIIMLHQMMKAKLHRATISAADLNYEGSLTIDTDLLKASGIRPYERIYVYNVNNGERFETYAIEGEAGSGAIQLNGAAARKGMIGDFLIIVTYALCSDDEVDEHRPNVVLLNPDNTIKEIVK

SEQ ID NO: 28639 - protein, 222 aa, Desulfotalea psychrophila LSv54
MNIESILANCELFAGLPGEQLAQLATITKEISVKRGTSLFFEQDPGNGFYLIVSGRVKVYKISAGGKEQILHILKDLETFGEAAVFQGKPFPANGESLVDTELLYFPREKFVSLIERNSQLALNLLAIFATKLRKFTRQVEALSLQEVPHRLAKYLLLLTEEQDSLSLRLEISKGQLASLLGTAPETLSRIFGQFASEGIIVIHGRAIEVVDKGKLKEKVED

SEQ ID NO: 28640 - protein, 66 aa, Desulfotalea psychrophila LSv54
MAEGTVKWFNDAKGFGFIEQEGGQDVFVHYSAIGGEGFKSLTEGSRVNFEIIDGPKGPAADNVLKA

SEQ ID NO: 28641 - protein, 393 aa, Desulfotalea psychrophila LSv54
MLKENKIVYMDNNATSKVAPEVLEEMIPYFSEYYGNASSMYTFGGQVAAAVNTARQQVADLLGASADEITFTSCGTESDSTAILAALRTHPEKRHIITTRVEHPAVKSLCDNLEVATGHRYRITRLKVDAEGMLDMDAYREALCEDTAIVSVMWANNETGVIFPVEEMAQLAKSRGALFHTDAVQAVGKIPINMAENEINFLALSGHKLHAPKGVGVLYVRKGTMFTPFLIGGHQEHGRRGGTENVASIVGLGKACELAGQMLETENSRVRALRDRLEEGLLASVPKALLNGNKTHRLPNTSNISFEFVEGEAILLYMNEHNICASSGSACTSGSLEPSHVLRAMGVPFTAAHGSIRFSLSVYNTEEEVDFVLDKMPAIIASLRKMSPFWKEA

SEQ ID NO: 28642 - protein, 478 aa, Desulfotalea psychrophila LSv54
MRTKYNNIQSKQGIIMCSYSILVVDDEPNYLIVLSELLRDEDLEVFTAGSGKAGLDICREVDLDLVITDMQMDGMDGMALLEQIKELNPDLPVLIMTAHAEVEKAVKAMQAGAFGYLAKPFANDELLVNIYRAARHYSLIRENKRLRHQLQSEDCFSGIVGKSPSMQRVYKLIRKVAPTPASVLITGESGTGKELVAQAVHSTSPRRDEAFIAVNCAALSANLLESELFGHEKGAFTGAASMRKGRFELAAGGTIFLDEISEIPLELQSKLLRILQEKSFERVGGAKTLHVDVRVISASNKDLKEEVAAGHFREDLFYRLNVIHLNLPPLRERLDDLPLLVAFFIEKYRKILQLENLVVGEEAMKLLLRLPWDGNVRELENTIERAAILCDAGNIMVEDVQPETVYNKEDHWQPGGDLSNFIPESVGLNEVLYAVEERMLIKALDESNQVQARAASQLGITKSLLQYKLKKYGLKKKK

SEQ ID NO: 28643 - protein, 546 aa, Desulfotalea psychrophila LSv54
MEQTVIEYVLSRLKDLGVKDVFGVPGDYAFPINDAVCNDKELRWIGNCNELNAAYAADGYARIHGLAALSTAYGVGELSAINGIAGAYAEHLPIFHLVGMPASRVQAAHRLVHHTLGNGEFDLFYKMTEPVVCARAIMTPDNCVAETERLIAAAFYHRRPVYMAFPGDYADMPVVGQAEAVVVATSEVGTLAAAVEAICHAVSVSKRACILPGIMATRFGLRDQAAAVVEASGLPFATMFMDKCVLNEAHPSYIGIYNGELMNEQVRAFVEGSDCLLAIGMMLTDFNSGSFTANIDPAASINIMPHRVRVGTAIYHNIEMKDVLVMLAEKLPRKYGLGPRVEGLGEPVGGEDDKITVDYLYPRWEQMLKADDILVAETGTCSMGLGFAKMPNGSLFLNQSLWGSIGWATPAALGAALAAPDRRTILITGEGSHQFTAQEISQFHRYGLKPIIFVLSNDGYLIERLLCRDPDIYYNDLAQWHYKDLPEVLGCDGWFSARVTTCGELDEAIRKAEACGSGAYIEVVTDKYEASELAQRLADSIATLYK

SEQ ID NO: 28644 - protein, 543 aa, Desulfotalea psychrophila LSv54
MKKIVECVPNFSEGRDQKIIGAIARAIKETDGCTLLDLDAGSSTNRSVFTFVGDPETVLEGALTAARVAATLIDMRNHSGEHPRFGAMDVCPFIPITGVSMEECVQLARRFAKRAAEELGIPLYLYGAAAEHDYRRELSALRQGEYEGLALRLTEAKWQPDYGPSEFVPSWGITATGARNFLIAYNVNILATPNQAHRIALNLREAGRGEGAPGRLREVRAMGWFVQEYNMAQVTANILDYRVTPIHLLFEEVKEEAGALNLAVAGSEIVGLLPLETLLMAADYYIEKEDLFIYEEEQKIRLAIERLGLNSVAQFKPEEKIIEYRLAEKLLEPLAGATVREFIEEIAARSSAPGGGSASAAIAAIGTALGSMVAKLTHGVRKFEEVQPQMQEAIPVLHQLTQQLISVIDRDSSAFNDYMAGMRLPQSTEEERERRDGRMEAGLKTAINVPLGTMRLADGAWDSFCQVARHGNPASASDTLVGARALETGIWGAYQNVLINMRDIEDPLYREEVLSVAQEIAARAARKCEEVLRILSAHTPSAP

SEQ ID NO: 28645 - protein, 504 aa, Desulfotalea psychrophila LSv54
MAKKERVVLEKSIKPAGVLALAIGSIIGWGCFILPGSMMDKAGPVGAIIGLILGAVIMLVIAKSYGYMIQKVPVSGGEFAYAYNGFGRNHAYVCGWFLTLGYLSIVPLNATALSLLAKFTAPELLTWGYLYTIAGSKIYFGEVALASSAMLIFGFLNYRGSKGVAGVQVYMVALLVAAAILIAGGAISSESASFSNLVPYFNPDVPTIAGIVSIVAIAPWLFVGFDTIPQAAEEYDFPPAKANKLIILSILVGVGIYLLVLVATGVVFPWQELSAGNHVWPTGFAMEAAVGKAGLWFLVIAISMGICTGINGFYMATSRLLFSMGRAQVLPEWFTGVDKKSGVPKNAVIFTAAVALIAPWFGRNVIVWVVEMAALGTAFGYMYTCFGAYREAKKADGRNVEIPIKSGTALAGGLLSFGILLLLCVPGSPGFMAHESWYALGVWVALGAVFYAMQAKRYNALSHAELDYLILDKKDSSDKSVGECDENIMVQPIINTGSTISAID

SEQ ID NO: 28646 - protein, 372 aa, Desulfotalea psychrophila LSv54
MAFVDEAKFFVKAGDGGNGCVSFRREKFVPKGGPNGGDGGKGGDVIMVASSKVQSLIDFRYRSHFKAERGVHGQGRDMHGRGGKDCYMDIPVGSVVKDSETGRVLADLSEEGEEFVVAQGGSGGMGNPHFSSGSNRTPRVATKGKLGEEKWLLIELKLMADVGLVGLPNAGKSTLLSKLSAANPKVADYPFTTLEPQLGMLHFPMRNSCIIADIPGLVEGAHQGVGLGHKFLRHVERTKILVHVIDASADDPFSDYDIIGNELRSYKEELADRAKILVLNKCDEFDFDKDLLPDFIEARGLEPKNVLFISAITGEGVDKLVKLIGDIIDDMEYQELKQKREEERLQDLKKQKEEERRQELKKQKEEEQAKDE

SEQ ID NO: 28647 - protein, 103 aa, Desulfotalea psychrophila LSv54
MYAIVRTGGKQYQVACGDQLRVEKLEGNVGDSLDLTDVLMLVDGDNVQVGQPVLENAKVVAKIAEQGRGKKIIIFKKKRRKGYRLKQGHRQSYTALKIEEISA

SEQ ID NO: 28648 - protein, 546 aa, Desulfotalea psychrophila LSv54
MVSTGSIPVTPTSLTYSDLPWIIEHREDRCTLCGKCTTICPKGAISLSYRRQRLPKLDVFSKKRSSDYRTFTGIRQSTDLAHACIGCGMCAMVCPNEAITPVANDNEHRSQFFHNINGEPYKRGGRRNISGATLLDRIMFNRISMLTDPALDAGRHEFNVTTTLGRVLAPKEFLDRTRKGEWIPPTREIFPFVIGSMSFGALSPNMWLGLLQGVAYCNEVLGIPVVMCTGEGGCPPWVLRSPYLKYIILQIASGYFGWDEIIRAIPEMECMPAAIEIKYGQGAKPGDGGLLMGHKVSQLISRLRGVPQGVDLPSPPVHQTLYSIEESVMKMIQTLSTAFDHKVPVYPKISASTSAKSVLNNLVRNPYAAGLTIDGIDGGTGAAYDVSMHATGHPIASCVRECYLELAKQGKQNEIPIFAAGGIGKNGNVAQNGMALIMLGASGVHIGKYIMQAAAGCLGNEKNRCNVCNLGICPKGITSQNPKLYRRLDPDKVAERVAEVFCSINTEVKKIMAPLGRSQSLPIGMSDALGIADKAAADRLNIKYVC

SEQ ID NO: 28649 - protein, 572 aa, Desulfotalea psychrophila LSv54
MTNKEIIKRLYHEIIPYKIPLFIAMFAMIVVAALTGAQAYLVKDLLDKIFMEKDVFFLQILPLIIIAIFFTKGVLYYTYAIILERVGQSIIRDFRLKIFAHIHRQSLSFFHNTPTGTLISRVLSDVALMQQAVSTVIIQLLRDFFQVIFLLGVIFYMNWKLALICFLIIPLAAIPIVKFGKIFRKLSTKTQEETAEVSNMLHETISGSRIVKAFCREDYEVERFHRQVETLFTITMKNAKYRVFQSPLMEIIGGFAVAGIIWVGGSEVINGSATPGTFFAFLTAMITAYDPVKRVSQVNSTIQQGLASAQRVFAILDIKPEIEDKPEATSLAPFKESIEFHDVSFSYGTEKILSHINLKVPAGEALAIVGPSGGGKTTLTNLIPRFIDLQEGSITIDGTDIRDVTTNSLRNQIAMVTQQTILFNDTIRNNIAYGKDSCTEEEIRRAAKAAHALTFIEELPNGFDTALGEGGAKLSGGQRQRISIARALLADAPILILDEATSALDTESEREVQKALENLMQNRTTFVIAHRLSTIKNASRIVVVKKGKIVEEGSHEELLKLEGEYQLLYNMQ

SEQ ID NO: 28650 - protein, 313 aa, Desulfotalea psychrophila LSv54
MPNIIKIFSGNAHPQLADEIAAHLGMQVSEADVRKFSDGEIFVEIKKNVRGTDAFIVQPTCTPVNDNLMELVLMVDALRRASARRITAVVPYYGYARQDRKSAPRVPISAKVVAEMFMAVGVRRVLCMDLHAGQIQGFFNIPVDHLYAAPVLLKHIKKEFGEDVVMVSPDAGGVERTRAFAKRLNTGLAIIDKRRDRPNECEAMHVIGDVRGKVAILMDDMADTAGTICNGAKTLLENGAKEVHACCTHPVLSGPAVERITNSDLKSFVVTNTIPLGEEAKNCPKIKQLSVSALLADAIERIHNEDSVSSLFV

SEQ ID NO: 28651 - protein, 569 aa, Desulfotalea psychrophila LSv54
MATNERIEEKGEEEHKKTLDFIRQIIAEDLRTGKHKQPVTRFPPEPNGFLHIGHAKSICLNFGIGQENNSPCHLRFDDTNPSKEESIYVDSIKKDVSWLGFDWGEDLFFSSNYFEQIYDYALQLIKMGKAYVCQLNAEQMREYRGTLTEPGKDSPYRDRAIAENLDLFERMARGEFDEGSHVLRAKIDMASPNINLRDPIIYRILKIEHHRTGDKWQIYPMYDFTHALSDAIEGITHSLCTLEFQDHRPLYDWVLDTLATPCHPRQIEFARLNLTYTVMSKRKLLQMVQKNYVSGWDDPRMLTISGLRRRGYTPASIRNFCAEIGLAKRESWIEMGVLENEIRNDLNPSAQRAMCVLDPIKLIIDNYPEEKEEEVVAKIHPQNPEMGTKTLPFSRELYIERNDFMENPPGKFRRLGPGKEVRLRYGYYIQYASHLKDETTGEITEIHCTYDPESRGGSSPDGRKVKGTIHWVSAKHALDCTVHLYDRLFNVENPDADKEVDFLEHLNKDSKLVLRHAKAEPALATLPVGESVQFERQGYFCVDSVDSTEENIVFNRVVTLRDSWAKINK

SEQ ID NO: 28652 - protein, 612 aa, Desulfotalea psychrophila LSv54
MTEPPTPYILCCSSFKYGNKKNHELHRVLVLCTNENVSTIQGNGLMGKITGSRAIVQCLKEEGVQTIFGYPGGAVIDLYDALMDSTDIEHVLVRHEQGAVHAADAFARVTGEVGVALLTSGPGATNGVTGIATAYLDSIPLVVLTGQVPRALIGNDAFQEVDIVGITRPCTKHNYLVSKPEDLVPVLREAFHVAKTGRPGPVLVDLPKDILATLIDYPQIAPIKLDSYQPNYKPHQGQITKACKLLMQAKKPVLYVGGGVILSNSHKELSALAEKLQIPVTMTLMGLGAFPGSHDLSMGMLGMHGSYTANMAVAESDLLIAVGARFDDRVTGKLEDFASKAKIIHVDIDPTSISKNVKVDVPIVADCLAALTAINDWLEKCPEEEIAERRDAHKPWIDTVHNWTKEHPMRYNSNGSEIKPQFVVETIDRLTKGEAIITTEVGQNQMWAAQFYKFNHPRHFVTSGGLGTMGFGLPAAIGAQMAFPDKIVIDIAGDGSIQMNIQELATARQNNCNVKIVILNNGYLGMVRQWQELFYDKRYASTVMDVAPDFVKLAEAYGAVGLRATKKEEVESVLAEGLATDNVVIMEFLVAPEEGVYPMVPAGKANTEMLLV

SEQ ID NO: 28653 - protein, 326 aa, Desulfotalea psychrophila LSv54
MSILERCKDVCRKAPKTIVFPDCLDKRVFEAAGRLQAEGLAHPVFMGSPFAVRAKMREAKCSSRGVTVVDHTSPSLLEKNANEFIAIREAKGKKLSMDDAVKAMRCPLAGAAMMVRREEVNLGVSGNISSTGNVIRAGLQFLPKQQGMKTISSFFFMIAPEGGKDYIFADCGVVPVPNENTLADIAISSADKARKLLGEEPRVAMLSFSTKGSANHERAIFVRDTVEQIRKRAPDMLVDGELQLDAAIVPSVAAQKAPGSVVEGMANVLIFPSLEAGNIGYKLAQRLGGYTALGPLLQGFAAGWHDLSRGCTADDIYKVAVVGQCL

SEQ ID NO: 28654 - protein, 684 aa, Desulfotalea psychrophila LSv54
MNTFYKNLSMWLVIGLTMILLFNLFNQPQPTNNKITYSDFISNVESKGISRVSITGDTITGKLQNGQSFKTIYPANDAEMMSILRKSGVDIDIKEAEKDSFFTTLFISWFPMLLLIGVWIFFMRQMQGGGKGGAMSFGKTKAKLIPEENNTVTFADVAGIDEAKEELEEIVDFLKDPSKFTDLGGNIPTGVLLSGPPGTGKTLLARAIAGEAQVPFFTISGSDFVEMFVGVGASRVRDMFAEGKKSAPCIIFIDEIDAVGRHRGAGLGGGHDEREQTLNQLLVEMDGFQSNEGVIVIAATNRPDVLDPALLRPGRFDRQVNVPVPDLKGRKKILEIYAAKTKMAPMIDLEILARGTPGFSGADLENLINEAALLAARTGKKEINLELLEKAKDKIMMGPERRSMMLNEKEKEITAYHEAGHALIAWLLPGTDPVHKVTIIPRGRALGVTMQLPVDEKYTHSKTFLENTICILFGGRIAEKIIFNEITTGAGNDIERASGLARKMVCEWGMSDELGPITYGKKEEQIFLGRDIGQDRGFSEATAQEIDAAVRNIVNKASIRVTRLLEDHKDILKKMSEELIENETLNLDDIEELIEKLRPGQYTSKKPTVVMTQKEEPVEKVPVEEPVMEEAPVEEPVVEEAPETAKAPPAEKKAPAKKAPAVAPADAPEAAREADMPANPFDKN

SEQ ID NO: 28655 - protein, 390 aa, Pseudomonas fragi
SLNPRDVVIVDFGRTPMGRSKGGMHRNTRAEDMSAHLISKVLERNSKVDPGEVEDVIWGCVNQTLEQGWNIARMASLMTQIPHTSAAQTVSRLCGSSMSALHTAAQAIMTGNGDVFVVGGVEHMGHVSMMHGVDPNPHMSLYAAKASGMMGLTAEMLGKMHGISREQQDAFAVRSHQLAHKATVEGKFKDEIIPMQGYDENGFLKIFDYDETIRPDTTLESLAALKPAFNPKGGTVTAGTSSQITDGASCMIVMSAQRAKDLGLEPLAVIRSMAVAGVDPAIMGYGPVPATQKALKRAGLNMADIDFIELNEAFAAQALPVLKDLKVLDKMNEKVNLHGGAIALGHPFGCSGARISGTLLNVMKQNGGTFGLSTMCIGLGQGIATVFERV

SEQ ID NO: 28656 - protein, 371 aa, Berberidopsis corallina
AAGALKSYKLAAKAISRLQSLPSGTISLLCDVLVQEVSDLTGYDRVMVYKFHDDEHGEVVAECRRPELEPYLGLHYPATDIPQASRFLFMKNKVRMICDCLAPPVKVIQDKRLAQPLSLCGSTLRSPHACHAQYMANMGSIASLVMSVTINEEDDEMESDQQKGRKLWGLVVCHHTSPRFVPFPLRYACEFLIQVFGVQVNKEVELAAQLREKHILRTQTVLCDMLLRDAPVGIVTQSPNVMDLVKCDGAALYYRNKFWLLGVIPTEAQIRDIAEWLLEYHGGSRGLSTDSLMEAGYPGALVLGDAVCGMAAIRITSKDFLFWFRSHTAKEIKWGGAKHDPDDKDDGRKMHPRSSFKAFLEVVKRRSLPWE

SEQ ID NO: 28657 - protein, 391 aa, Carallia brachiata
DLEPVNPADVPVTAAGALKSYKLAAKAISRLQSLPSRNMSLLCEVLVKEVRDLTGYDRVMVYRFHDDEHGEVVAESCRTDLEPYLGLHFPATDIPQASRFLFMKNKVRMICDCLAPPVKVVQDRRLAQPLSLCGSTLRAPHGCHAQYMANMGSIASLVMSVTINEDDAEMDSGQQNGRKLWGLVVCHHTSPRFVPFPLRYACEFLIQVFGVQINKEVELATQMREKHILQTQTVLCDMLLRDAPVAIVTQSPNVMDLVKCDGAVLYYRKKTWLLGITPTEAQISDIAEWLLECHSGTTGLSTDSLMEAGYPGASDLGDAVCGMAAVKITAKDFLFWFRSHTAKEIKWGGAKHDPHNKDDGKMMHPRSSFKAFLEVVKWRSLPWEDMEMDAI

SEQ ID NO: 28658 - protein, 391 aa, Celastrus scandens
  misc_feature (303)..(303): Xaa can be any naturally occurring amino acid
  misc_feature (389)..(389): Xaa can be any naturally occurring amino acid
  unsure (1)..(391): unsure at all Xaa locations
DLEPVNPADVPITAAGALKSYKLAAKAISRLQSLPSSNMSLLCDVLVKEVSELTGYDRVMVYKFHDDDHGEVVAECCIPDLEPYLGLHYPATDIPQASRFLFMKNKVRMICDCLAPPVKVLQDKRLAQPLSLCGSTLRSPHGCHAQYMANMGSIASLVMSLTINEDDDETNSDQQKRRKLWGLVVCHHTTPRFVPFPLRYACEFLIQVFGGQINKEVELATQLKEKHILRTQTLLCDMLLRDSPVGILTQSPNVMDLVKCDGAALYYRNKFWLLGVTPTEIQIKDIAEWLLDYHSESTGLSTXSLMEAGYPDASILGEAVCGMAAVKITSKDFLFWFRSHTAKEMKWGGAKHDPADKDDGRRMHPRSSFKAFLEVVKRRSLPWEDVEMXAI

SEQ ID NO: 28659 - protein, 392 aa, Cissus sicyoides
DLEPVNPADVPITAAGALKSYKLAAKAISRLQSLPSGNISLLCDVLVKEVTELTGYDRVMVYKFHEDEHGEVIAECLRADLEPYIGLHYPATDIPQASRFLFMKNKVRMICDCLAPPVKIVQDKRLAQPLSLCGSTLRSPHGCHAQYMSNMGSVASLVMSATVNEEDEDDTESEQQKGRKLWGLVVCHNTSPRFVPFPLRYACEFLIQVFGVQINKEMELAAQMKEKHILQTQTVLCDMLLRDAPVGIVTQSPNVMDLVRCDGAALYYQKKFWLLGVTPTEAQIRDIVDWLLECHSGSTGLSTDSLMEAGYPAAPALGDAVCGIAAIKITSNDFLLWFRSHTAKEIKWSGAKHDPDDKDDGRKMHPRSSFKAFLEVVKRRSLPWQDIEMDAI

SEQ ID NO: 28660 - protein, 368 aa, Corylopsis glabrescens f. gotoana
ALKSYKLAAKAISRLQSLQSGNISLLCDVLVKEVSDLTGYDRVMVYKFHEDEHGEVVAECRREDLEPYLGLHYPATDIPQASRFLFMKNKVRMICDCLAPAVKVNHDKRLAQPLSLCGSTLRSPHGCHAQYMANMGSIASLVMSVTINEQDDEIESEQQQGRKLWGLVVCHHTSPRFVPFPLRYACEFLIQVFGVQISKEVELAAQLREKHILRTQTMLCDMLLRDAPVGIITQSPNVMDLVKCDGAALYYRKKFWLLGVTPTEMQIRDIVQWLLEYHSGSTGLSTDSLVEAGYPDALILGDAVCGMAAIRITSKDFLFWFRSHTAKEIKWGGAKHDPDDKDDGRKMHPRSSFKAFLEVVKRRSLPWE

SEQ ID NO: 28661 - protein, 368 aa, Daphniphyllum macropodum
ALKSYKLAAKAISRLQSLPSGNISLLCDVLVKEVSDLTGYDRIMVYKFHEDEHGEVIAECRRPNLEPYLGLHYPATDIPQASRFLFMKNKVRMICDCLALPVKVKQDKRLPQPLSLCGSTLRSPHGCHAQYMANMGSIASLVISVTINEEDEEMESDQLKGRKLWGLVVCHHTSPRFVPFPLRYACEFLIQVFGVQISKEVELGTQMREKHILQTQTVLCDMLLRDAPVGIVTQSPNVMDLVKCDGAALYYRKKFWLLGVTPTEAQIRDIAQWLFEYHSGSTGLSTDSLVEAGYPSALILGDAVCGMAAIKITSKDFLFWFRSHTAKEIKWGGAKHDPDDKDDGRRMHPRSSFKAFLEVVKRRSLPWE

SEQ ID NO: 28662 - protein, 391 aa, Euonymus alatus
DLEPVNPADVPITAAGALKSYKLAAKAISRLQSLPSSNMSLLCDVLAKEVSELTGYDRVMVYKFHDDDHGEVVSECCRPDLEPYLGLHYPATDIPQASRFLFMKNKVRMICDCLAPPVKVLQDKRLSQPLSLGGSTLRSPHGCHTQYMTNMGSIASLVMSVTINEDDDETNSDQKIGRKLWGLVVCHHTTPRFVPFPLRYACEFLIQVFGVQINKEVELAKQLKEKHILRTQTLLCDMLLRDAPVGILTQSPNVMDLVKCHGAVLYYRNKFWLLGVTPTETQIKDIAEWLLDYHSESTGLSTDSLVEAGFPDASILGEAVCGMAAVKITSKDFLFWFRSHTAKEMKWGGAKHDPGDKDDGKRMHPRSSFKAFLEVVKQRSLPWEDVEMDAI

SEQ ID NO: 28663 - protein, 370 aa, Gunnera monoica
  misc_feature (180)..(180): Xaa can be any naturally occurring amino acid
  misc_feature (366)..(366): Xaa can be any naturally occurring amino acid
  unsure (1)..(370): unsure at all Xaa locations
ALKSYKLAPKPISRLQSLPSGNISLLCDVLAKEVSDLTGYDRVMVYKFHEDEHGEVVAECRRPDLEPYLGLHYPATDIPQASRFLFMKNKVRMICDCMALPVRVIQDNKLPQPLSLCGSALRSPHGCHMQYMANMGSIASLVMSVTINEDEEEEEEESNRQTRRKLWGLVVCHHTSPRFXPYPLRYACEFLIQVFGVQINKEVELAAQMREKHVLRTQTVLCDMLLRDAPIGIMTQSPNVMDLMKCDGAALYYKNKIWLLGVTPTELQLRDIAQWLLENHNSSTGLSTDSLLEAGYPNATILGDLVCGMAAVKITSKDFLFWFRSHTAKEIKWGGAKHDPGEKDDGRKMNPRSSFKAFLEVVKRRXVPWE

SEQ ID NO: 28664 - protein, 391 aa, Ixonanthes chinensis
DLEPVNPADVPVTAAGALKSYKLAAKAISRLQSLPSRNLSLLCDVLVKEVSDLTGYDRVMVYKFHEDGHGEVVAECCRPDLEPYLGLHYPATDIPQASRFLFMKNKVRMICDCRTSSVKVVQDQKLTQPISLCGSTLRAPHGCHAQYMANMGSIASLVMSVTINEEDDEIESDHQKARKLWGLVVCHHTCPRFLPFPLRYACEFLMQVFGVQVNKEVELAVQMREKHTLRTQTVLCDMLLRDAPVAIVTQSPNVMDLVRCDGAALYYRKKFWLLGVTPTEPQIRDIVEWLLEYHSGSTGLSTDSLMEAGYPGASILGDAVCGMAAIRITSKDFLFWFRSHTAKEIKWGGAKHDPGDKDDGRKMHPRSSFKAFLEVVKRRSLPWEDVEMDAI

SEQ ID NO: 28665 - protein, 376 aa, Klainedoxa gabonensis
AAGALKSYKLAAKAISRLQSLPSRNMSLLCDVLVKEVSDLMGYDRVMVYKFHEDEHGEVVAECCRPDLEPYLGLHYPATDIPQASRFLFMKNKVRMICNCQAPSVKVIQDNKLPKPVSLCGSTLRAPHGCHAQYMANMGISASLVMSVTINEDDDNMDNDQAKARKLWGLVVCHHTSPRFVPFPLRYACEFLIQVFGVQINKEVELAAQTREKHILQTQTVLCDMLIRDAPEGIITQSPNVMDLVKCDGATLYYRKKFWLLGVTPTEAQIKDITEWLLEYHSGRTGLSTDSLMEAGYPGASVLGEAVCGMAAIRITSKDFLFWFRSHTAKEIKWGGAKHDPDDKDDGRKMQPRSSFKAFLEVVKWRSLPWEDMEMD

SEQ ID NO: 28666 - protein, 391 aa, Liquidambar styraciflua
DLEPVNPADVPVTAAGALKSYKLAAKAISRLQSLPSGNISLLCDVLVKEVSDLTGYDRVMVYKFHEDEHGEVLAECRRPDLEPCLGLHYPATDIPQASRFLFMKNKVRMICDCLAPPVKVNQDKRLTRPLSLCGSTLRSPHGCHAQYMANMGSIASLVMSVTINEDDDEMESDQQKGRKLWGLVVCHHTSPRFVPFPLRYACEFLIQVFGVQINKEVELATQLREKHMLRTQTVLCDMLLRDAPVGIVTQSPNVMDLVKCDGAALYYRKKFWLLGVTPAEAQIRDIAQWLLEDHNGSTGLSTDSLVEAGYPDALILGDAACGMAAIRITSKDFLFWFRSHTAKEIKWGGAKHDPDEKDDGRKMHPRSSFKAFLEVVKRRSLPWEDVEMDAI

SEQ ID NO: 28667 - protein, 376 aa, Meliosma squamulata
  misc_feature (222)..(222): Xaa can be any naturally occurring amino acid
  misc_feature (306)..(306): Xaa can be any naturally occurring amino acid
  unsure (1)..(376): unsure at all Xaa locations
TAAGALKSYKLAAKAISRLQSLPSGNITLLCEVLVREVRDLTGYDRVMVYKFHEDEHGEVIAECRRSDLEPYLGLHYPATDIPQASRFLFMKNKIRMICDCSSQPVKIIQDKRLAQPLSLGGSTLRAPHGCHAQYMANMGSIASLVMSVTINDDDDDDDDTSESDKKKGRKLWGFVVCHHTSPRFVPFPLRYACEFLSQVFGIQLNKEVELAAQLKEKHILXTQTMLCDMLLRDAPMGIITQSPNVMDLVKCNGATLYYNNKFWLLGITPTEEQIRDIIGWLFENHDQSTGLSTDSLVEAGYPGAXFLGDAVCGMAAIKITSKDFLFWFRSHTAKEIKWGGAKHDPIDKDDGRKMHPRSSFRAFLEVVKWRSIPWE

SEQ ID NO: 28668 - protein, 370 aa, Paeonia sp. Qiu 95-090
AGALKSYKLAAKSISRLQSLPSGNVPLLCDILVKEVSDLSGYDRVMVYKFHEDEHGEVVAECRRPDLGPYLGLHYPATDIPQASRFLFMKNKVRMICDCSAPSVKVTQDKSLPQPLSLAGSTLRSPHGCHAQYMANMGSIASLVISITINDGDDEMESGQQKGKRLWGLVVCHHTSPRFVPFPLRYACEFLIQVFSVQINKEVELAVQLREKHILRTQTVLCDMLLRDAPVGIITQSPNVMDLVKCDGAALYYRKKFWLLGVTPTEAQIKDIAEWLLEYHSESTGLSTDSLMEAGYPGASILGDVVCGMASIRIASKDFLFWFRSHTAKEIKWGGAKHDPDDKDDVRKMHPRSSFKAFLEVVKRRSLHWE

SEQ ID NO: 28669 - protein, 368 aa, Ranunculus sp. Qiu 95024
MKSYKLAAKAISKLQAMPSGNIPLSCDMLVQEVRDLTGYDRVMVYKFHEDDHGEVIAEWRVSSLEPYLGLHYPATDIPQASRFLFMKNKIRMICDCSAIPVKVVQDKKLGQPLSLGGSALRAPHGCHAQYMSNMGSVASLVMSVTINEDDEQMETGQQKGRKLWGLVVCHHTSPRFVPFPLRYACEFLIQVFGMQINKEVELANQTREKHILHTQTVLCDMLLRDAPIAIVTQSPNVMDLVMCNGAALYYRDRLCLLGVTPTDDQIRDIAQWLLEYHNESTGLSTDSLMEAGYPSASLLGNAVCGMAAIKITSKDFLFWFRSHTAKEIKWGGAKHNPAEKDDRWKMHPRSSFKAFLEVVKHRSLPWED

SEQ ID NO: 28670 - protein, 371 aa, Reinwardtia indica
GALTSYKIAAKAISRLQSVPSGSINLLSDVLVNELRDLTSYDRVMVYRFHEDEHGEVVAESIAPGLEPYLGLHYPATDIPQASRFLFMKNKVRMICDCLAPSVKVTQDRNLAEPINLSGSTLRAPHGCHAQYMANMGSIASLVMSVTINDNEDGNEMESDQMMGRKLWGLVVCHHTTARFVPFPLRYACEFLIQVFGVQISKEVELEAQRKEKHIIQTQTVLCDMLLRDAPVAIMTQSPNVMDLVKCDGAALLYRKKCWLLGVTPTEEQITDITEWLLEYHNDSTGLTTDSIMEAGYPGASVLASTICGMAAIRITSKDFMFWFRSHTAKEIKWGGAKHDPDDKDGVRKMHPRSSFKAFLEVVKWRGLPWE

SEQ ID NO: 28671 - protein, 363 aa, Sabia swinhoei
TAAGALKSYKLAAKAISRLQSLPSGNISLLCDVLVREVSDLTGYDRVMVYKFHEDEHGEVIAECRRSDLEPYLGLHYPATDIPQASRFLFMKNKVRMICDCSARPVKVVQDKRLARPLSLCGSTLRAPHGCHAQYMANMGSIASLVMSVTINEDDDDEMESDQKKGRKLWGFVVCHHTSPRFVPFPLRYACEFLIQVFGIQVNKESELAAQLREKHILQTQTMLCDMLLRDAPVGIVSQSPNVMDLVKCSGAALYYKNKFWLLGVTPTEEQIRDIIGWFVENHDQSTGLSTDSLMEAGYPGASVLGDAVCGMAAIKITSKDFLFWFRSHTAKEIKWGGAKHDPVDKDDGRKMHPRSSFKAFLE

SEQ ID NO: 28672 - protein, 368 aa, Sapria himalayana
ALTSFRLAAKAISRLQAISSGSISKLCNVLVKEVSHLTCYDRVMVYKFHEDEHGEVIAECIRPDLEPYLGLHYPATDIPQAARFLFMKNKVRMICNCMASPVKVLQAEGLDKPLSLCGSTLRSPHRCHEQYVANMNSIASLVLSVTINEEDGEMESTQSRPARLWGLVVCHHTSPKFVSFSLRYACEFLIQVFGIQINKEVELEAQRKEKHILQTQTLLCDMLVRDSPVGIITKSPNVMDLVKCDGAALFYRNKIWLLGLAPSEMQIRDIAEWLLECHGKSTGLSTDSLMESGYPGASLVGSSVCGMAAIRVTSKDFIFWFRSHIAKEFRWGGAKHGRHDKDDGRKMHPRSSFKAFLEVVKWRSLPWE

SEQ ID NO: 28673 - protein, 365 aa, Sapria himalayana
TSFRLAAKAISRLQAISSGSISKLCNVLVKEVSHLTCYDRVMVYKFHEDEHGEVIAECIRPDLEPYLGLHYPATDIPQAARFLFMKNKVRMICNCMASPVKVLQAEGLDKPLSLCGSTLRSPHRCHEQYMANMNSIASLVLSVTINEEDGEMESTQSRPARLWGLVVCHHTSPKFVPFSLRYACEFLIQVFGIQINKEVELEAQRKEKHILQTQTLLCDMLVRDSPVGIITKSPNVMDLVKCDGAALFYRNKIWLLGLAPSEMQIRDIAEWLLECHGKSTGLSTDSLMESGYPGASLVGSSVCGMAAIRVTSKDFIFWFRSHIAKEFKWGGAKHGRHDKDDGRKMHPRSSFKAFLEVVKWRSLPW

SEQ ID NO: 28674 - protein, 359 aa, Vitis sp. Qiu 94046
AGALKSYKLAAKAISRLQSLPSGNISLLCDVLVKEASELTGYDRVMVYKFHEDEHGEVIAECRRPDLEPYLGLHYPATDIPQASRFLFMKNKVRMICDCLAPPVKVIQNKRLAQPLSLCGSTLRSPHGCHAQYMANMGSVASLVMSVTINEEDDDTESEQQKGRKLWGLVVCHNTSPRFVPFPLRYACEFLVQVFGVQISKEMELAAQMKEKHILQTQTVLCDMLLRDAPVGIVTQSPNVMDLVRCDGAALYYQKKFWLLGVTPTEAQIRDIVEWLLEYHSGSTGLSTDSLMEAGYPAASLLGDAVCGIAAVKINSNDFLFWFRSHTAKEIKWGGAKHDPDDKDDGRKMHPRSSFKAFL

SEQ ID NO: 28675 - protein, 930 aa, Dunaliella viridis
MLSSHAKSSSSSRNLAGMLENGGFEGEGSGSCGGSRQQARDPRRTSLSVNSGRVIIASNHLPLRVKKSSTGEWQFEFDEDALTAQAKDGVPRSHFQEVLYVGGLPVDVEPEEQENIAIKLKDLYNCCPVYLDSAVKERFYKGFCKQQLWPLFHYVLPGSPSSSQRFNVEFWQAYVKANKCFADKIVEESLTDTEFVWIHDYHLLVLPSLLRKRFNRIRAGVFLHSPFPSSEIFRTFPKREELLRSLLNADLIGFHTFDYARHFLSCCSRMLGLEHETSRGSITIDYYGRTVGIKIMPTGVNPKRYLDGFSWDEFKWRRGELEAQFKGMTVLAGVDDMDSFKGIDLKLQAFERLLEYHAEWRGKVVLVQVTNPPRSTGHDITELHAFVTNLVASINYKYGNPSTNYVPVHYLERHVPLHERMAFYSIADCVVVTATRDGMNLVPYEYIVCRQGSDTTPCAESTVESGPRDSMLVVSEFVGCSPSLSGAIRVNPWSIDSGYNGMYAAICMPLEHRRLRHQKHWRYVSQHTVAFWAQSYLMDLVRVTRNHVTMKCYGLGLGLDTFRMVALDANFRKMEESQVAATYKSSKSRVFFLDYDGTLTAGQHTSITLAPLDEVLQVLRALTAEPLNKVVLFSGRPKAELQEWFASVPNLALVAENGCYLRLGEGQTWRSHLTPGLQVADQSWVSLVVAADFGWKKMALPILQQYQESTDGSSIEAKESALVWYYKDADPDFGSWQAKELLDHLEGVLSNKPVEIVGGSSAVEIKPQGVSKGQAVEKMLGQLYGYPAIAERRSSSSRPMGRPSSDASERRPSSSRFSMSDRGPSAGSAAVQSAASSVQGGGAEAAAQQELAAAGKGPDFVLCIGDDRSDEDMFTSIEMMRASPQMMSSEVYACTVGQKPSRAPFYLNDPGEVLHLLARLVGINLPNLPL

SEQ ID NO: 28676 - protein, 497 aa, Camellia sinensis
MASLTCSADQLAQLFGSNTTNAAAATYICDHFTAVSQKFSDAASAIDSTYLLFSAYLVFSMQLGFAMLCAGSVRAKNTLNIMLTNVLDAAAGAIFYYLFGFAFAFGSPSNGFIGSHFFALKSIPTSSFDYSFFLFQWAFAIAAAGITSGSIAERTQFAAYLIYSAFLTGFVYPVVSHWFWSGDGWASASNTNHLLFGSGVIDFAGSGVVHMVGGIAGLYGAFIEGPRIGRFANPGQSVTIKGHSASLVVLGTFLLWFGWYGFNPGSFTKIANPYTSGSYYGQWSAVGRTAVTTTLAGSTAALTTLFLNRVVSGHWNVTDVCNGLLGGFAAITAGCSVVEPWAAVICGLVAALVLIGCNKVAERVKFDDPLEAAQLHGGCGAWGVIFTALFASEKYVNEVYPGKSDRPYGLLMGGGGRLLAAHVIQIVVIVGWVSVTMGPLFFVLHKLKLLRISAEDEIAGMDMTRHGGFAYVYQYHDEDESNKLGMQMRKIDPEDKS

SEQ ID NO: 28677 - protein, 295 aa, Rickettsia typhi str. Wilmington
MINQIQKTISVCIIGRPNSGKSTLLNRIIGEKLSIVTPKVQTTRSIITGIITLKDTQIILYDTPGIFEPKGMLEKAMVRCAWSSLYSADLVLSIIDSLKPLDDMAHNILNQFCLLNIVPIFLLNKIDIESKYLNDIKAFLKISHPKSLLFPISALCGKNVDVLLKYIKSKAKVSPWLYADDDITNLPMRFIAAEITREQLFLNLQQELPYKLTVQTEKFEELKDKSIKINQVIVISRESYKAIILGKNGTKIKDIGVKSRIQMEQLFCVPVHLFLFVKVHALWENKQEFYQYMKI

SEQ ID NO: 28678 - protein, 385 aa, Rickettsia typhi str. Wilmington
MKDVILIANAGSSSLKISIFGIQNKKVKDKIYNIFLEKNNNKILFYINQKQESAISIKDNAIEMMINLFEEWWTKQSALNLIATGHRIVHGGKNFNKPVIVNEKIIKELRVLIPLSPLHQPYNLQVLDLFFQKYKDISHIICFDTSFHYTNPPITKAFGLPKQYYDKGIMRYGFHGLSYQYVSSHFKEITMEDLPTKTIIAHLGSGSSLCAIKNGLSLTSSMGFSVLDGVMMATRTGNLDPGVVLYLINHEKMTMKEITELLYKKSGLLGISGESSDMRTLITNNSHDSKFAVELFVYRIVLEIGKLIAALEGIDCIIFTAGIGQNSAVIREMISGKLSWLGIKIDYGKNQKNEHRISTKGSKVKVFVVPTNEELIIAEEVMKFL

SEQ ID NO: 28679 - protein, 399 aa, Rickettsia typhi str. Wilmington
MSIISTRLNSIKPSPTLAVVKKTLELKKAGVNIIALGAGEPDFDTPDNIKEVAITSIKDGFTKYTNVDGIPLLKQAIKNKFKRENNIDYELDEIIVSTGGKQVIYNLFMASLDKGDEVIIPVPYWVSYPDMVALSTGTPIFVNCGIENNFKLTVEALERSITDKTKWLIINSPSNPTGAGYNCKELENIAKTLRKYPNVNIMSDDIYEHITFDDFKFYTLAQIAPDLKERIFTVNGVSKAYSMTGWRIGYGAGSKALIKAMTVIQSQSTSNPCSISQMAAIEALNGTQDYIKPNALNFQKKRDLALSILEKVIYFECYKPEGAFYLFVKCDKIFGTKTKSGKIIANSNHFSEYLLEEAKVAVVPGVAFGLDGYFRISYATSMQELKEACIRIKQACNTL

SEQ ID NO: 28680 - protein, 558 aa, Rickettsia typhi str. Wilmington
MNNNIINLIAAIVLSLSIIFGWQYFVIKPEQKKQQQRMAIYKSENLKKQKALAEHTSNITVQEAGQVQRIKIESESLTGSIALKGLRFDDLILKKYKQDLSQNSPAVRLFSPANTENAYFAEIGLVSNLSSVKLPNSNTVWNSDSEVLSPEKPVNLFWVNEDGIKFLVTITVDKNYLFTIEQTIINNSDKELPVQAYGLINRKYIAVEKAVNILHQGPIGCIDENLKEYSYDDIKDQKSAKFALSKVDWIGIADKYWLSSLIPDKSSSYSANFNYALKQGAERYQVDFISPVQVIKPGKNLSIKSRIFAGAKKVDLLDEYEKSYDIKLFDRAIDFGWFYIITKPVFYAMNFFYGYVGNFGVSILIVTVIIKLLMFTLANKSYRSMKKMKNLQPEIDRIKNLYNNDKARLNQEIMALYKKSKVNPVAGCLPILVQIPVFFSIYKVLYVTIEMRHAPFYGWIKDLSSPDPTTIFNLFGLLPFAPPSFLMIGAWPILMAITMFLHQKMSPELADPIQAQVMKFMPLIFLFMFSSFPVGLLIYWSWNNILSIIQQYYINKFN

SEQ ID NO: 28681 - protein, 858 aa, Rickettsia typhi str. Wilmington
MNIDKFTAHAKSVIANHQSLAIKNDHQQILPLHLLSSLLSEETGIIQALINNIGGNIHLLKDQVQLELNKIPKIQVDGGGQIYYSAEDLKVLEKSRSIAKDSGDSFVTIERIFEALTYDNTIAGKILTNNGINSKKLAAAILHLRKGKKADTESAENSYDALKRYGRDVTELAKNGKLDPIIGRDEEIRRAVQVLSRRMKNNPVLIGAPGVGKTAIIEGLAQRIFNKDVPETLINCRIIELDIGALIAGAQYRGEFEKRLKSVLSEIKESSGEIILFIDELHLLVGTGKVEGAMDASNLLKPMLARGELHCIGATTLDEYRKYIEKDAALARRFQPVYVGEPSVEDTISILRGIKEKYELHHAVRISDSAIVAAATLSNRYITDRYLPDKAIDLIDEACSRMKIELSSKPEELDELDRRIIQIKIELAALKKENDEHSKKKITSLTEELKQLDSKSYDMNTKWQAAKSKLQQAQKLKEELEQARIDLDRAERDANLAKASELKYGIIPEIMNKLQAAENMDNKGLLKEIVSESDIASIISRITGIPIDTMLSSERERLLVIEQKLSESVIGQDEAIKGISDAVRRSRSGIQDINRPLGSFLFLGPTGVGKTELTKALAGFLFDDRNALLRIDMSEYMEKHSISRLIGAPPGYIGYDQGGVLTESVRRRPYQVILFDEVEKAHLDIFNIMLQILDEGRLTNSQGITVDFKNTIIVLTSNLGAEILVNQQEDEDTYKVKDEVMQYVRAVFKPEFLNRLDEIILFHRLNRNNIYDIVKIQLGSLKKILLQQNIILEFNESALNYLAEKGYDPSFGARPLKRLIQREIQNNLAKMILAGKISSGNTVKIAREKEELRIEIID

SEQ ID NO: 28682 - protein, 627 aa, Rickettsia typhi str. Wilmington
MGKVIGIDLGTTNSCVAVMEGKEPKVIDNAEGERTTPSIIAFANSERLVGQPAKRQAVTNPRNTIYAVKRLIGRNFTDPMVRKDQGLVPYNIVKADNGDAWVEADNNKYSPSQISAFILQKMKETAENYLGEKVTQAVITVPAYFNDAQRQATKDAGKIAGLEVLRIINEPTAAALAYGFEKSSSKTIAVYDLGGGTFDVSILEISDGVFEVKSTNGDTFLGGEDFDTRILNHLIDVFKKDSGIDLSKDPLALQRLKEAAEKAKKELSSTSATDINLPYITADSTGPKHLNIKFTRAELEKLVDDLIEKTIEPCRQALKDAGFKPTDIQEVVLVGGMTRMPKVQEAVKKFFGREPHKGVNPDEVVALGAAIQGGVLNKEVTDILLLDVTPLSLGIETLGGVFTRLIDRNTTIPSKKSQVFSTADDNQHAVTIRVFQGEREMAKDNKLLGQFNLEGIPPAPRGVPQIEVTFDIDANGIVHVSAKDKASGKEQKVTIQASGGLSDSEIEQMVKDAEHNADEDKKRKELIETKNAADSLVYSTEKTLREYGDKLSSEEKGAVEEALASLKSALESEDASLIKEKTNNLTAANMKIGETMYKAQTENQHSEANTVNDEKVVDADFQDVDKK

SEQ ID NO: 28683 - protein, 468 aa, Rickettsia typhi str. Wilmington
MSFLRKKSFESVKEIGSSSGLSKTLGAFDLILLGLGAMIGTGVFVVTGIIAAKFSGPAVMISYMIAGITCIFVALVYTELAAMLPTSGSIYTYSYVAFGEVFAWMIGSVIILELGVSAGIVAAGWSGYVQGILEAGGIYLPKVLTTVPSNGGVINLPAFLISAFIGFILFLGTKDSKKINAILVFIKMAAIFAFVLASAPHFDATNWSNFMPFGFGSVVMGSSILFLAFTGFGTIATAAEECKNPKRDILIGIIGSLILTTLVYVIMSGLVTGIAPFDQLNNDRPLAYALTINNSKIGSAIVSTGAVCGMMTVLMMNIYGTSRIFYAIARDGLLPKSFAKLHPKYDSPYITIIIFSALAAFLGGFCPTEIITQLTSMGALIDYIVVAIIVMMFRIKLPTAQRSFKCPIVFIIAPFILLACIYLLLTQMYGDEIYKGNFNLLTSGRVLIYWFITIFVLYLIRSFFMKKE

SEQ ID NO: 28684 - protein, 767 aa, Rickettsia typhi str. Wilmington
MNEMNKINYAEALEYHEKDKPGKIAITATKSLVTQQDLSLAYSPGVAAPCLEISKNLDAVYKYTSRSNLVAVISNGTAVLGLGNLGAAASKPVMEGKAVLFKKFADIDAIDLEINTEDPIEFINAVKYLSYSFGGINLEDIKAPECFLIEEKLKSLMDIPVFHDDQHGTAIITAAGLINAAYLTNRTLEDLKIVINGAGAAAIACIDLLIALGVDKSKIILCDTKGVIYKGRTSGMNKWKERYASDTKIRTLTESLNNADVFIGLSVKGAVTKDMISQMAHKPIIFAMANPDPEITPEDIKFVRDDAIIATGRSDYNNQINNVMGFPYIFRGALDVRASTINTEMKIAAARAIADLARRPVPEEVYKAYSGRKLVFGNEYIIPVPFDPRLITVVAAAVAVAAIETGVARVKDFSIGKYKQQLGSRLNPTANYMNFLAEKIHNVPLKRIVFAEGEEEEVISAALMMRDEKYGNPIIIGRVERIEVILKKIGKDISLDGIQIMNAALSDRLEQYTDYLYKRLQRKGYLYRDCAKLVKTDKNIFAACMVACGDGDALLTGVTKSYIDSLEDIMKVISPKQNRRILGYSIMIAKDHNIIIADNCITEYPNSLELAQIATQTAEIAKNMGITPRVALISFATFGNSSQEKTTRIREAVNILDNFSKDKKQLNDMKVDFEYDGEMSIKVALDHDLRKLYNFCRLSGSANVLIMPGLNSAAIATELLQKFSSNSFIGPITNGFEKPVQILQTTATANEILKIATFACVEAIKEV

SEQ ID NO: 28685 - protein, 429 aa, Rickettsia typhi str. Wilmington
MSQKLSFWSVFALVTGSQIGTSVFILPLSLAPFGVYSIWGWVLSLFGAMSIALVFSCLCTKFPKTGGPHVYVRASFGETIAFFTGWTYWIISFVSTSIVVISAIGYLTPFFKSQKILDLILQLILLAAIAILNLKGPKIAGKIEFYLTLLKFVPLLVVGLAALSHFNIDNIVIAQEIENLTIPTIMGRVALLTFWGFIGIECATTTAGTVKDPAKTIPRAIIIGTCCVAFLYIINSIGIIGLIPASELINSKAPYADAATLLFGGTWSKVITVIASVICIGTLNAWVLTSGQIALGLAEDGLLPQFFAKKNSNNAPTYGIIVSCLGITPLLFFTSNNNFAQQITQIIDFSVIAFLFVYLICSLAFLKLIFSSKENFSYYYLFVDIISIIFCIWVIYKTPFETLIIACSFTILGIPVYYGWYRLMNRIKL

SEQ ID NO: 28686 - protein, 410 aa, Rickettsia typhi str. Wilmington
MNQQLKNLTLPIYMDYQSTTPIDPRVMEAMLPYFTTKFGNPHSRSHSFGWEAENAVENARSMIAKLIGADSKEIIFTSGATESNNLVIKGIAKFYGNKKNHIITLVSEHKCVLNACRYLEQEGIKITYLPIKPNGIIDLEILKNAITDQTLLVSVMAVNNEIGVIQPLREIGKICRERSVFFHSDIAQGFGKIPINVNEYNIDLASISGHKIYGPKGIGALYIRKKPRVRVTPLINGGGQERGMRSGTLPTPLIVGFGIAAEISYNEMEKDAQHVNYLFDRFLNNIYSRIPEVYLNGDKDQRYKGNLNLSFAGVEGESIILAIKDLAVSSGSACTSASLEPSYVLRSIGISEELAHTSIRFGIGRFTTEQEIDYAVNLICSKIDKLRKLSPLWEMMQEGIDLKKIKWTAH

SEQ ID NO: 28687 - protein, 378 aa, Rickettsia typhi str. Wilmington
MIYLDHNATTFIDPRVKEYIISLMDKELNPSSTHMAGRFAQNIIETARSQIATSLGITMLSGEYNITFTSSGTESNNLIMKNFYDGDIFISAIEHLSIYNHINYAPNIKVIRVNKQGLVDLEHLEDLLFQSNARKKLVSVMIANNENGVLQDIAAISKITKKYDAKFHSDLVQSFGKISLNIKELGLDFATISGHKIGGGHGCGALISNSNFQLIPIIIGGGQEKSVRSGTENVLAIAGFGLAAEFRRKNVSENYIKIRDLQERLEQKLKKYSNVNIISNNVARLANTTLITVDNTDAQVKLIEFDLRNICVSSGSACSSGKISKSHVLTNMGIREEEAKSSIRISLSHTNTVSDIKAFIKAFEEIYEYKPSSNHGIK

SEQ ID NO: 28688 - protein, 319 aa, Rickettsia typhi str. Wilmington
MINTNNYHIIAKRIISNAANALDKLSNNIPADFNRIIEFLLSFKGRIILTGIGKSGYIARKIAASFSSTGMPSFYLHPSEASHGDLGTITRNDLVMMLSNSGETKELFNIIEYCNNSSIKIAAMTMNKNSTLAKRSDFLLIIPECQEASLIGAPTISSLIMLSLGDAVMTVIHEERGFTRDDFKIYHPGGTIGANLTKIKNIMRSGDEIPLVYEDTSFTETIIIMNKKRLGCTLVTDKEQNLIGIITDGDLRRNINDQIHLKTASSIMTKNPHHISSGIFAQEALNLMKAKNITNIPIVDNNMIIGIIHIHDLLRMGVS

SEQ ID NO: 28689 - protein, 70 aa, Rickettsia typhi str. Wilmington
MATNIVGKVKWYNSTKNFGFIEQDNGGKDVFVHKSAIEAAGLHSLKERQEVIFDIEEKQGKAYAINLRVK

SEQ ID NO: 28690 - protein, 576 aa, Rickettsia typhi str. Wilmington
MDIKLLYRLAKYLRFYKKDLIIVMISLLSVSASLLLIGSVFRNLIDKGLAEDNILSVNKSILYICLLIVILSVASFFRSYFINNVAEKIVNQIRKEAYSNLINYEIEEYEELKIGDIISRLTNDIDQIATLIVNFLSFFIRNSVMLIGGITLMFFESFKLASIVIVTIPILLVPLIKFGKHVKSLSKKALESKSLLVSDIDETFNNIRVIYAFNHQINKISDFDTKLQSYLIYCKIRLKIRALFFAISIAVIFLTITLIVWIGASDIVQGDLSAGQIISFIYYAIIAGVSSGGIFELLSEIHLPTTALERIITIIDKISIVHNNYYALNNPDTVSIEFKNVDFTYNSRPNLKIINNMSLKINANKFVGIVGRSGAGKSTLIQLLLRFYRQDNGTILINNQDISRINPTDIRKFIAYVPQEASIFSDTIKSNIIFGNNKASDYEINEIIKITGIEEFSNKLHDGINTKIGEKGVRLSGGQKQRIAIARALLRKPKILLLDEAMSALDTMSEQKLLNAIKKIMKGNIIISIAHRISSIESADYILVIDKGKVVTAGSHYDLSKNSEIYRNICREQLTI

SEQ ID NO: 28691 - protein, 392 aa, Rickettsia typhi str. Wilmington
MTQQVYITHAKRTAFGSFMGSLSTTPAPMLAAHLINNILQDSKIEPALVNEVILGQVITGGSGQNPARQTLIYAGIPQEVPGYTINKVCGSGLKSIALAANSIMTCDNEIVIAGGQENMSLGMHGSYIRAGAKFGDIKMVDLMQYDGLIDVFSGVFMGITAENIAKQFNISRQEQDEFALSSHKKAAKAQLLGILQDEILPIEVTVKKTTSLFDHDETVRHDTSIEMLSKLRPAFDKNGVVTAGNASSINDGAACVLLVSEKALKKHNLTPLARIVSCASAGVDPRIMGTAPVPASKKALSKAGWSVNDLEVIEVNEAFAAQSIYVNREMKWDIEKVNINGGAIAIGHPIGASGGRILITLIHNLRRAKAKKGLVTLCIGGGLGMSMCVEAV

SEQ ID NO: 28692 - protein, 111 aa, Rickettsia typhi str. Wilmington
MMENKNLKFIQNAIKKNKVVLFMKGTKEMPACGFSGTVVAILNKLGVEFSDINVLFDTSLREDLKKFSDWPTFPQLYINGELVGGCDIVKELYQNGELEKMLKDETKLIKN

SEQ ID NO: 28693 - protein, 105 aa, Rickettsia typhi str. Wilmington
MFAVIKAGGKQYKVDRNSVIKIEKIDGELGSKVQFDQILMIGEYSKPSFIGTPIVKGAIVTAEITNQLKDNKIIAFKKKRRKNYRRKAGHRQELTELKILDITKQ

SEQ ID NO: 28694 - protein, 448 aa, Rickettsia typhi str. Wilmington
MALIIQKFGGTSVANIERIKKLVPIIKAEITKNNQVIVVVSAMAGVTNQLVTLCSEVSSLNKISQFAEYDVALSSGEIVTAALLALALQEEEIQAQSLLAWQLPILTNNNHSKALVEFITTDLLEKCLQLKIIPIIAGFQGINKSNRITTFGRGGSDTTAALIAAAMKADRCDIYTDVDGIFTADPRIIPNAKRIKEIDFLEMLELASSGAKVLHPRAVELVMRYKIDMRVLSTFLPNTEGTLITSKDTTPLVKSTYMDMEESAKNIKRSTKINIPDDTSGLTYKLPIELALQNRYNMENCIIRGITSNKNLLKVSVNTITLSFLQVANMITYNNNCIEFMQEIKNNIEYNFITNLTDKNNLQTLLTNCKNNKQIQNFTFDTEIATISLIGYGIKNDCKLLEMILSQLTQDNINVNMMQLSEVKITLLINDKDVEKTISNLYNLFKIS

SEQ ID NO: 28695 - protein, 330 aa, Rickettsia typhi str. Wilmington
MHFIDEVKIYIKGGNGGNGCISFHREKFVDRGGPDGGDGGFGGSVIFRSNHHINTLVNYRYQQHFIAENGGNGKGSNRSGKSGKSLILDVPIGTQIFSEDGNILLHDFTEDEKSFEIIKGGCGGLGNSHFKTSVNQAPRKRTEGEIAQEMWIHLRLKLLSDVGLVGLPNAGKSTFLSVVTAAKPKIADYPFTTLVPNLGVVYINDEEFVIADIPGLIAGAHQGHGLGDKFLKHIERCNVLIHLIDGSSHNVIADYDTVRFELESYSDYLKNKIEIICINKCDVLTDEEIQKKIKKLQRVTNKVVHPISTYTNLGVNKIVKLALEIIKNQI

SEQ ID NO: 28696 - protein, 383 aa, Rickettsia typhi str. Wilmington
MKIVALKEKVKNETRAAITPEVAGLLIKKGYAVTVEKDIGFYAGFLDEEYVAVGTKISSVPLEIISDADIILKVQPSSVTDKYSELEFAKEGAIIVGLLSPYLNHEYIKAAAKKNITTFAMEFVPRITKAQNMDVLSSQSNLVGYRAVIEASYHYTKAFPMMITAAGTIPACKTLVLGVGVAGLQAIATAKRLGSIVAGYDVRIATKEQVESLGAKFVCVELQEDLQDSSGYASEGSEAYKAKQEEFLAKIIKGYDIVITTAQIPGKKAPILVTDKMIASMMHGSVIVDISTSTGGNVEGSEPDKIVTKHGVTIIGLLNLASKIASDSSKLYSKNLYNFLTYALQDGQFNMDDELVRDMLITKDGKIVNYIIREKYESITDNG

SEQ ID NO: 28697 - protein, 556 aa, Saccharomyces cerevisiae
MSEITLGKYLFERLKQVNVNTVFGLPGDFNLSLLDKIYEVEGMRWAGNANELNAAYAADGYARIKGMSCIITTFGVGELSALNGIAGSYAEHVGVLHVVGVPSISSQAKQLLLHHTLGNGDFTVFHRMSANISETTAMITDIATAPAEIDRCIRTTYVTQRPVYLGLPANLVDLNVPAKLLQTPIDMSLKPNDAESEKEVIDTILALVKDAKNPVILADACCSRHDVKAETKKLIDLTQFPAFVTPMGKGSISEQHPRYGGVYVGTLSKPEVKEAVESADLILSVGALLSDFNTGSFSYSYKTKNIVEFHSDHMKIRNATFPGVQMKFVLQKLLTNIADAAKGYKPVAVPARTPANAAVPASTPLKQEWMWNQLGNFLQEGDVVIAETGTSAFGINQTTFPNNTYGISQVLWGSIGFTTGATLGAAFAAEEIDPKKRVILFIGDGSLQLTVQEISTMIRWGLKPYLFVLNNDGYTIEKLIHGPKAQYNEIQGWDHLSLLPTFGAKDYETHRVATTGEWDKLTQDKSFNDNSKIRMIEIMLPVFDAPQNLVKQAKLT

SEQ ID NO: 28698 - protein, 625 aa, Oryza sativa Japonica Group
MALAPPLCHLLAAPPPSTSAAADAAHDHAGALAPHRRASPLRRRGRLFLACRVPAAAPSARGVAAEAAAGRPTVLVTEKLGDAGLELLRRFANVDCAYELTAEELRAKVSLVDALVVRSATRVTREVFEAARGRLRVVGRAGVGIDNVDLQAATEAGCLVVNAPTANTVAAAEHAIALLAAMARNVAQADASLKAESCFSLVLCTYSGKWQRNKYVGVSLVGKTLAIMGFGKVGSEVARRAKGLGMDIISHDPYAPVDRARAIGVDLVSFDEAISTADFISLHMPLTPSTAKLFDDETFANMKKGVRIINVARGGVVDEDALLRALDNGTVSQAALDVFTEEPPPKDSKLVHHEHVTVTPHLGASTSEAQEGVALEIAEAVLGALKGELAATAVNAPMVPAEVLSELSPYVILAEKLGRLVVQLVAGGSGIKGVKIGYSSSRDPDDLDTRVLRAMVTKGIIEPISSAFVNIVNADYVAKQRGLRISEERILLDGSPEIPIDSIQVHLANVESKFAGALSDEGDIRVEGEVKDGKPHLTLVGPFSVDVSLEGNLILCRQVDQPGIIGKVGSILGKMNVNVNFMSVGRTAPGKQAIMAIGVDEEPEKEALKLIGDIPSVEEFVFIKL

SEQ ID NO: 28699 - protein, 899 aa, Oryza sativa Japonica Group
MNICAAILLFYILQFVHGQPDSQGFISIDCGIPEKSSYQDPTSSIIYVSDYGFISTGANHNISSAYIKPSLAQRNYNVRFFPDGTRNCYTLRSLQEGNKYFVRAVFYYANYDSLNKLPVFDLYLGANYWHEVKFSNADAVNWMDIIVVAPADYLQVCLVNKGTGTPFISGLDLRPLKSTLYPEANTTQSLVLINSNRFNMGPTDNSITRYPLDPHDRLWSTYDTIPDWTEISATSVVQNYLTDVYDVPSAVMQSAATVNSSRINFTWDPSDPSVNISSKYFFVLYFSELQSVPSNGLRQFDIIVNNNTWNTQPYTPPFLFADSLSGTVQGLASYSVSLVATKNATLPPILNAMEMYLVKPLTEFATDPRDARAMMEVQQNYDVKKNWMGDPCAPKAFAWEGLNCSYPPADSSKITSLNLSSSGLAGSIATYFGDLKSLQYLDLSHNNLSGPIPNFLGQLPLLMFLDLSSNDLSGPIPYNLLQKSQNGSLSLRVGYNAKLCGNDTECGSGQKKIKGSLLSAIIITIVATVALIVVLFLLLRRMLKAKDKRRAAGPTYESALLENREFSYRELKHITNNFSQQVGKGGFGAVFLGYLENGNPVAVKVRSESSSQGGKEFLAEAQHLTRIHHKNLVSLIGYCKDKNHLALVYEYMPEGNLQDHLRATTNKPLTWEQRLHIALDAAQGLEYLHVACKPALIHRDVKSRNILLTTNLGAKIADFGLTKVFSESRTHMTTEPAGTFGYLDPEYYRNYHISEKSDVYSFGVVLLELITGRPPVIPIDESVSIHIGEFVHQSLDHGSIESIVDARMGGGGGYDINSVWKVADLALHCKREVSRERPTMTEVVAQLKESLELESHGDRKHLVTGDDDVSVSNLGEETALEVEEQSGEISRVSPGPAVR

SEQ ID NO: 28700 - protein, 1139 aa, Triticum aestivum
MSSSRSNNRPACSRGSSARSKHSERVVAQTPVDARLHAEFEGSHRHFDYSSSVSALNRSGASTSSAVSAYLQNMQRGRYIQPFGCLLAIHPESFALLAYSENAAEMLDLTPHAVPTIDQRDALAVGADVRTLFRSQSAVALHKAAVFGEVNLLNPILVHARTSGKPFYAILHRIDVGLVIDLEPVNPADVPVTAAGALKSYKLAAKAISRLQSLPGGNLSLLCDVLVREVSELTGYDRVMAYKFHEDEHGEVIAECRRSDLEPYLGLHYPATDIPQASRFLFMKNKVRMICDCAASPVKLIQDDNLSQPISLCGSTMRAPHGCHAQYMANMGSIASLVMSITINEDEDEDGDTGSDQQPKGRKLWGLVVCHHTSPRFVPFPLRYACEFLLQVFGIQLNKEVELASQAKERHILRTQTLLCDMLLRDAPVGIFTQSPNVMDLVKCDGAALCYQNQIMVLGSTPSEGEIKKIVAWLLECHDGSTGLSTDSLLEAGYPGASALGEVVCGMAAIKISSKGFIFWFRSHTAKEIKWGGAKHEPGDADDNGRRMHPRSSFRAFLEVVKWRSVPWEDVEMDAIHSLQLILRGSLQDEDANDNTARSIVEAPSDDIKKIQGLLELKIVTNEMVRLIETATAPILAVDIVGNINGWNNKVAEITGLPTTEAIGMLLVDLVEGDSVEVVKQMLNSALQGTEEQNLEIKLKTFHQQESKGPVVLMVNACCSRDLSDKVVGVCFVAQDLTGHKMVMDKYTRIQGDYVAIVKNPNELIPPIFMINDLGSCLEWNEAMQKITGIKREDAIDKLLIGEVFTLHDYGCRVKDQVTLTKLSILMNTVISGQEPEKLAFGFFNTNGKYMESLLTANKRTDAEGKITGALCFLHVASPELQHALQVQKMSEQAATHSFKELTYIRQELKNPLNGMQFTRKLLEPSDLTEEQRQLFASNVLCQEQLKKILHDNDLEGIEQCYMEMNTVEFNLEEALNTVLMQGMSLSKEKQISLDRDWPVEVSSMYLYGDNLRLQQVLADYLACTLQFTRPAEGPIVLQVIPKKEHIGSGMQIAHLEFRLVHPAPGVPEALIQEMFRHGPGVSREGLGLHISQKLVKTMSGTVQYLREAESSSFIVLVEFPVAQLNSKRSRPSTSKSNF

SEQ ID NO: 28701 - protein, 1139 aa, Triticum aestivum subsp. spelta
MSSSRSNNRPACSRGSSARSKHSERVVAQTPVDARLHAEFEGSQRHFDYSSSVSALNRSGASTSSAVSAYLQNMQRGRYIQPFGCLLAIHPESFALLAYNENAAEILDLTPHAVPTIDQRDALAVGADVRTLFRSQSAVALHKAAVFGEVNLLNPILVHARTSGKPFYAILHRIDVGLVIDLEPVNPADVPVTAAGALKSYKLAAKAISRLQSLPSGNLSLLCDVLVREVSELTGYDRVMAYKFHEDEHGEVIAECRRSDLEPYLGLHYPATDIPQASRFLFMKNKVRMICDCAASPVKLIQDDNLSQPISLCGSTMRAPHGCHAQYMANMGSIASLVMSITINEDDDEDGDTGSDQQPKGRKLWGLVVCHHTSPRFVPFPLRYACEFLLQVFGIQLNKEVELASQAKERHILRTQTLLCDMLLRDAPVGIFTQSPNVMDLVKCDGAALCYQNQIMVLGSTPSEGEIKKIVAWLLECHDGSTGLSTDSLLEAGYPGASALGEVVCGMAAIKISSKGFIFWFRSHTAKEIKWGGAKHEPGDADDNGRRMHPRSSFRAFLEVVKWRSVPWEDVEMDAIHSLQLILRGSLQDEDANDNNARSIVEAPSDDIKKIQGLLELKIVTNEMVRLIETATAPILAVDIVGNISGWNNKVAEITGLPTTEAIGMLLVDLVEGDSVEVVKQMLNSALQGTEEQNLEIKLKTMHQQESKGPVVLMVNACCSRDLSDKVVGVCFVAQDLTGHKMVMDKYTRIQGDYVAIVKNPNELIPPIFMINDLGSCLEWNEAMQKITGIKREDAIDKLLIGELFTLHDYGCRVKDQVTLTKLSILMNTVISGQEPEKLAFGFFNTDGKYMESLLTANKRTDAEGKITGALCFLHVASPELQHALQVQKMSEQAATHSFKELTYIRQELKNPLNGMQFTRKLLEPSDLTEEQRQLFASNVLCQEQLKKILHDNDLEGIEQCYMEMNTVEFNLEEALNTVLMQGMSVSKEKQISLDRDWPVEVSSMYLYGDNLRLQQVLADYLACTLQFTRPAEGPIVLQVIPKKEHIGSGMQIAHLEFRLVHPAPGVPEALIQEMFRHGPGVSREGLGLHISQKLVKTMSGTVQYLREAESSSFIVLVEFPVAQLNSKRSRPSTSKSNF

SEQ ID NO: 28702 - protein, 1139 aa, Triticum aestivum
MSSSRSNNRPACSRGSSARSKHSERVVAQTPVDARLHAEFEGSQRHFDYSSSVSALNRSGASTSSAVSAYLQNMQRGRYIQPFGCLLAIHPESFALLAYSENAAEILDLTPHAVPTIDQRDALAVGADVRTLFRSQSAVALHKAAVFGEVNLLNPILVHARTSGKPFYAILHRIDVGLVIDLEPVNPADVPVTAAGALKSYKLAAKAISRLQSLPSGNLSLLCDVLVREVSELTGYDRVMAYKFHEDEHGEVIAECRRSDLEPYLGLHYPATDIPQASRFLFMKNKVRMICDCAASPVKLIQDDNLSQPISLCGSTMRAPHGCHAQYMANMGSIASLVMSITINEDDDEDGDTGSDQQPKGRKLWGLVVCHHTSPRFVPFPLRYACEFLLQVFGIQLNKEVELASQAKERHILRTQTLLCDMLLRDAPVGIFTQSPNVMDLVKCDGAALCYQNQIMVLGSTPSEGEIKKIVAWLLECHDGSTGLSTDSLLEAGYPGASALGEVVCGMAAIKISSKGFIFWFRSHTAKEIKWGGAKHEPGDADDNGRRMHPRSSFRAFLEVVKWRSVPWEDVEMDAIHSLQLILRGSLQDEDANDNNARSIVEAPSDDIKKIQGLLELKIVTNEMVRLIETATAPILAVDIVGNINGWNNKVAEITGLPTTEAIGMLLVDLVEGDSVEVVKQMLNSALQGTEEQNLEIKLKTMHQQESKGPVVLMVNACCSRDLSDKVVGVCFVAQDLTGHKMVMDKYTRIQGDYVAIVKNPNELIPPIFMINDLGSCLEWNEAMQKITGIKREDAIDKLLIGELFTLHDYGCRVKDQVTLTKLSILMNTVISGQEPEKLAFGFFNTDGKYMESLLTANKRTDAEGKITGALCFLHVASPELQHALQVQKMSEQAATHSFKELTYIRQELKNPLNGMQFTRKLLEPSDLTEEQRQLFASNVLCQEQLKKILHDNDLEGIEQCYMEMNTVEFNLEEALNTVLMQGMSVSKEKQISLDRDWPVEVSSMYLYGDNLRLQQVLADYLACTLQFTRPAEGPIVLQVIPKKEHIGSGMQIAHLEFRLVHPAPGVPEALIQEMFRHGPGVSREGLGLHISQKLVKTMSGTVQYLREAESSSFIVLVEFPVAQLNSKRSRPSTSKSNF

SEQ ID NO: 28703 - protein, 1139 aa, Triticum aestivum
MSSSRSNNRPACSRGSSARSKHSERVVAQTPVDARLHAEFEGSQRHFDYSSSVSALNRSGASTSSAVSAYLQNMQRGRYIQPFGCLLAIHPESFALLAYSENAAEILDLTPHAVPTIDQRDALAVGADVRTLFRSQSAVALHKAAVFGEVNLLNPILVHARTSGKPFYAILHRIDVGLVIDLEPVNPADVPVTAAGALKSYKLAAKAISRLQSLPSGNLSLLCDVLVREVSELTGYDRVMAYKFHEDEHGEVIAECRRSDLEPYLGLHYPATDIPQASRFLFMKNKVRMICDCAASPVKLIQDDDLSQPISLCGSTMRAPHGCHAQYMANMGSIASLVMSITINEDDDEDGDTGSDQQPKGRKLWGLVVCHHTSPRFVPFPLRYACEFLLQVFGIQLNKEVELASQAKERHILRTQTLLCDMLLRDAPVGIFTQSPNVMDLVKCDGAALCYQNQIMVLGSTPSEGEITKIVAWLLECHDGSTGLSTDSLLEAGYPGASALGEVVCGMAAIKISSKGFIFWFRSHTAKEIKWGGAKHEPGDADDNGRRMHPRSSFRAFLEVVKWRSVPWEDVEMDAIHSLQLILRGSLQDEDANDNNARSIVEAPSDDIKKIQGLLELKIVTNEMVRLIETATAPILAVDIVGNINGWNNKVAEITGLPTTEAIGMLLVDLVEGDSVEVVKQMLNSALQGTEEQNLEIKLKTMHQQESKGPVVLMVNACCSRDLSDKVVGVCFVAQDLTGHKMVMDKYTRIQGDYVAIVKNPNELIPPIFMINDLGSCLEWNEAMQKITGIKREDAIDKLLIGELFTLHDYGCRVKDQVTLTKLSILMNTVISGQEPEKLAFGFFNTDGKYMESLLTANKRTDAEGKITGALCFLHVASPELQHALQVQKMSEQAATHSFKELTYIRQELKNPLNGMQFTRKLLEPSDLTEEQRQLFASNVLCQEQLKKILHDNDLEGIEQCYMEMNTVEFNLEEALNTVLMQGMSVSKEKQISLDRDWPVEVSSMYLYGDNLRLQQVLADYLACTLQFTRPAEGPIVLQVIPKKEHIGSGMQIAHLEFRLVHPAPGVPEALIQEMFRHGPGVSREGLGLHISQKLVKTMSGTVQYLREAESSSFIVLVEFPVAQLNSKRSRPSTSKSNF

SEQ ID NO: 28704 - protein, 1139 aa, Triticum aestivum
MSSSRSNNRPACSRGSSARSKHSERVVAQTPVDARLHAEFEGSQRHFDYSSSVSALNRSGASTSSAVSAYIQNMQRGRYIQPFGCLLAIHPESFALLAYSENAAEILDLTPHAVPTIDQRDALAVGADVRTLFRSQSAVALHKAAVFGEVNLLNPILVHARTSGKPFYAILHRIDVGLVIDLEPVNPADVPVTAAGALKSYKLAAKAISRLQSLPSGNLSLLCDVLVREVSELTGYDRVMAYKFHEDEHGEVIAECRRSDLEPYLGLHYPATDIPQASRFLFMKNKVRMICDCAASPVKLIQDDNLSQPISLCGSTMRAPHGCHAQYMANMGSIASLVMSITINEDDDEDGDTGSDQQPKGRKLWGLVVCHHTSPRFVPFPLRYACEFLLQVFGIQLNKEVELASQAKERHILRTQTLLCDMLLRDAPVGIFTQSPNVMDLVKCDGAALCYQNQIMVLGSTPSEGEIKKIVAWLLECHDGSTGLSTDSLLEAGYPGASALGEVVCGMAAIKISSKGFIFWFRSHTAKEIKWGGAKHEPGDADDNGRRMHPRSSFRAFLEVVKWRSVPWEDVEMDAIHSLQLILRGSLQDEDANDNNARSIVEAPSDDIKKIQGLLELKIVTNEMVRLIETATAPILAVDIVGNINGWNNKVAEITGLPTTEAIGMLLVDLVEGDSVEVVKQMLNSALQGTEEQNLEIKLKTMHQQESKGPVVLMVNACCSRDLSDKVVGVCFVAQDLTGHKMVMDKYTRIQGDYVAIVKNPNELIPPIFMINDLGSCLEWNEAMQKITGIKREDAIDKLLIGELFTLHDYGCRVKDQVTLTKLSILMNTVISGQEPEKLAFGFFNTDGKYMESLLTANKRTDAEGKITGALCFLHVASPELQHALQVQKMSEQAATHSFKELTYIRQELKNPLNGMQFTRKLLEPSDLTEEQRQLFASNVLCQEQLKKILHDNDLEGIEQCYMEMNTVEFNLEEALNTVLMQGMSVSKEKQISLDRDWPVEVSSMYLYGDNLRLQQVLADYLACTLQFTRPAEGPIVLQVIPKKEHIGSGMQIAHLEFRLVHPAPGVPEALIQEMFRHGPGVSREGLGLHISQKLVKTMSGTVQYLREAESSSFIVLVEFPVAQLNSKRSRPSTSKSNF

SEQ ID NO: 28705 - protein, 1139 aa, Triticum aestivum
MSSSRSNNRPACSRGSSARSKHSERVVAQTPVDARLHAEFEGSQRHFDYSSSVSALNRSGASTSSAVSAYLQNMQRGRYIQPFGCLLAIHSESFALLAYSENAAEMLDLTPHAVPTIDQRDALAVGADVRTLFRSQSAVALHKAAVFGEVNLLNPILVHARTSGKPFYAILHRIDVGLVIDLEPVNPADVPVTAAGALKSYKLAAKAISRLQSLPSGNLSLLCDVLVREVSELTGYDRVMAYKFHEDEHGEVIAECRRSDLEPYLGLHYPATDIPQASRFLFMKNKVRMICDCAASPVKLIQDDNLSQPISLCGSTMRAPHGCHAQYMANMGSIASLVMSITINEDDDEDGDTGSDQQPKGRKLWGLVVCHHTSPRFVPFPLRYACEFLLQVFGIQLNKEVELASQAKERHILRTQTLLCDMLLRDAPVGIFTQSPNVMDLVKCDGAALCYQNQIMVLGSTPSEGEIKKIVAWLLECHDGSTGLSTDSLLEAGYPGASALGEVVCGMAAIKISSKGFIFWFRSHTAKEIKWGGAKQEPGDADDNGRRMHPRSSFRAFLEVVKWRSVPWEDVEMDAIHSLQLILRGSLQDEDATDNNAGSIVEAPSDDIKKIQGLLELRIVTNEMVRLIETATAPILAVDIVGNINGWNNKVAEITGLPTTEAIGMLLVDLVEGDSVEVVKQMLNSALQGTEEQNLEIKLKTFHQQESKGPVVLMVNACCSRDLSEKVVGVCLVAQDLTGHKMIMDKYTRIQGDYVAIVKNPNELIPPIFMINDLGSCLEWNEAMQKITGIKREDAIDKLLIGEVFTLHDYGCRVKDQATLTKLSILMNTVISGQEPEKLAFGFFNTDGKYMESLLTANKRTDAEGKITGALCFLHVASPELQHALQVQKMSEQAATHSFKELTYIRQELKNPLNGMQFTRKLLEPSDLTEEQRQLFASNVLCQEQLKKILHDNDLEGIEQCYMEMNAVEFNLEEALNTVLMQGMSLSKEKQISLDRDWPVEVSSIYLYGDNLRLQQVLADYLACTLQFTRPAEGPIVLQVIPKKEHIGSGMQIAHLEFRLVHPAPGVPEALIQEMFRHGPGVSREGLGLHISQKLVKTMSGTVQYLREAESSSFIVLVEFPVAQLNSKRSRPSTSKSNF

SEQ ID NO: 28706 - protein, 326 aa, Helicosporidium sp. ex Simulium jonesii
VETEHLLKALLEQPNGLARRIASKAGLVPTTLLDKTEAFVRRQPRVSGASEQVLGRSLETLVVRAEALAKRWGDRYVSVEALVMAYADDARFGRDLFKELGVTQASLEAVVQELRGGRSVQDQNPEGKYEALAKYGRDLTAAAREGKLDPVIGRDDEVRRCIQILSRRTKNNPVLIGEPGVGKTAVAEGLAQRIVQGDVPDSLQNRTLISLDVGALIAGAKFRGEFEERLKAVIKEVQDSQGGVVLFIDEIHTIVGAGRGEGSMDAGNLLKPMLARGELRCIGATTLDEYRECIEKDAALERRFQQILVEAPSVEETISILRGLRE

SEQ ID NO: 28707 - protein, 580 aa, Lotus japonicus
METATQLTSPPPPSAFDGTLGHHLARRLVEIGVRDVFSVPGDFNLTLLDHLIGEPQLNVIGCCNELNAGYAADGYARAKGVGACVVTFTVGGLSVLNAIAGAYSENLPVICIVGGPNSNDYGTNRILHHTIGLPDFSQELRCFQTVTCFQAVVNNLEDAHELLDTAISTALKESKPVYISISCNLPAIHHPTFARDPVPFFLSPKVSNQEGLEAAVEVAAAFLNKAVKPVIVGGPKLRAPKAQKAFLEFAEASGYAIAVMPSGKGFVPEDHPHFIGTYWGAVSTGYCGEIVESADAYIFVGPIFNDYSSVGYSLLVKKEKAIMVQPNRVTIGNGPSLGWVFMADFLTALSKKVKTNKAAMENYQRIFVPPGIALTREKGEPLRVNVLFKHIQAMLSGDSAVIAETGDSWFNCQKLRLPANCGYEFQMQYGSIGWSVGATLGYAQAATNKRVIACIGDGSFQVTAQDISTMIRCEQKTIIFLINNGGYTIEVEIHDGPYNVIKNWDYTRFVEAINNGQGKCWTAKVRTEDDLTEAIAAATGPQKDSLCFIEVFVHKDDTSKELLEWGSRVAAANGRPPNPQ

SEQ ID NO: 28708 - protein, 554 aa, Yersinia pseudotuberculosis IP 32953
MSAPLYKQELLMLNNPRKDIPLIVTSLLCIILIALAFSLFPQQSSQMAETIFSGVTRLLGSTIQILVLLGLILVLYIAVSKYGNIRLGEGKPEYRTIPWLFMFICAGLGSSTLYWGVMEWAYYYQTPGLNIAPKTPKALEYSVSYSFFHWGISAWATYALASLIMAYHFHVRKNKGLSLSGIISAITGVNPQGFWGRLVDLIFLIATIGALTISLVITAATFTGGLTALIGVPNNFAVQAGVMLVAAVIFSLSSYIGIDHGMQRLSKMVGWGAFGFAVLVLLVGPTEFIINNTINSIGLTTQNFLQMSLFTDPMGDGRFTRSWTVFYWLWWISYTPGVAMFVTRVSRGRKLKEVIWALLLGSSLGCWFFFGILESYAIQQFISGALDVPLILNTQGGETAVQMLLSALPMGKLFLAAYLFIMIIFLASHMDAVAYCMAATSTRNLREGEDPNRMLRLFWCVVITLIPLSILFAGASLDTMKTTVVLTALPFLLILLIEVYGFIRWIKQDYAHVPAHLIEQSTPQVMLPAESLPPATASMLVVETAAPPASKHNQ

SEQ ID NO: 28709 - protein, 1535 aa, Yersinia pseudotuberculosis IP 32953
MRTITRGHWRRAEKQICRKIRVCQPTLSDINMSFTSWFVRVSQSLGRFTDMLYDQSQERDNCGFGLIAHIEGEPSHKVVRTAIHALARMQHRGAILADGKTGDGCGLLLQKPDRFFRMVAEERGWRLAKNYAVGMMFLSQDEELAKASRRIVEEELQNETLSIVGWREVPTNPDVLGEIALSSLPRIEQIFVNAPAGWRSRDMERRLFVARRRIEKRISDKDFYACSFSNLVTIYKGLCMPADLPRFYLDLADLRLESAICLFHQRFSTNTVPRWPLAQPFRYLAHNGEINTIAGNRQWAKARAYKFKTPLIPDLQDAAPFVNETGSDSSSLDNMLELFLSGGMDLIRAMRLLVPPAWQNNPDMDTDLRAFFDFNSMHMEPWDGPAGIVMSDGRYAACNLDRNGLRPARYVITKDKLITCASEVGIWDYQPDEVVEKGRVGPGELMVIDTRSGKILHSAETDNDLKSRHPYKEWMEKNVKRLVPFEDLPEEQVGSRQLDDSQLETYQKQFGYSNEELDQIIRVLGENGQEATGSMGDDTPFAVLSSGPRIIYDYFRQQFAQVTNPPIDPLREAHVMSLATSIGREMNVFCEAEGQAHRLSFKSPILLYSDFQQLTTLEGEHYRADRLDLTFNPAENDLEQAVLSLCDEAERKVRDGAVMLVLSDRAIAPNRLPVPAPMAVGAIQTRLVDKSLRCDANIIVETASARDPHHFAVLLGFGATAIYPYLAYESLAKLVDSQAIDKKYRDVMLNYRNGINKGLYKIMSKMGISTVASYRCAKLFEAVGLHRDLSDLCFQGVVSRIGGASFSDFQQDLQNLSKRAWLKRKPLDQGGLLKFVHNGEYHAYNPDVVSTLQKAVHSGEYSDYQAYAKLVNERPIATLRDLLAIKPQGTPIPVDQVEPAESLFKRFDTAAMSIGALSPEAHESLAIAMNSLGGFSNSGEGGEDPARYGTNKVSRIKQVASGRFGVTPAYLVNADVIQIKVAQGAKPGEGGQLPGDKVTPYIAKLRYSVPGVTLISPPPHHDIYSIEDLAQLIFDLKQVNPKAMISVKLVSEPGVGTIATGVAKAYADLITIAGYDGGTGASPLSSVKYAGCPWELGLVETQQALVANGLRHKIRLQVDGGLKTGVDIVKAAILGAESFGFGTGPMVALGCKYLRICHLNNCATGVATQDEKLRRDHYHGLPERVVNYFHFIARETREIMAELGVSQLVDLIGRTDMLLELDGISAKQNKLDLSPMLKTATPHPGKALYCTESNPPFDKGLLNKELLSQAEPYIEAKQSKTFYFDIRNTDRSVGAALSGAIATKHGDQGLATDPIKAYFSGTAGQSFGVWNAGGVELMLTGDANDYVGKGMAGGRIAIRPPVGSNFRSHEASIIGNTCLYGATGGKLFAAGRAGERFAVRNSGAITVVEGIGDNGCEYMTGGIVCVLGRTGINFGAGMTGGFAYVLDEDGEFRKRVNPELVEVLDVEQLAIHEEHLRGLITEHVQLTGSSRGEEILANWPEWVTKFALVKPKSSDVKALLGHRSRSAAELRVQAQ

SEQ ID NO: 28710 - protein, 548 aa, Yersinia pseudotuberculosis IP 32953
MNGAQWVVQALRAQGVDTVFGYPGGAIMPVYDALYDGGVEHLLCRHEQGAAIAAIGYARATGKVGVCIATSGPGATNLITGLADALLDSVPVIAITGQVGSALIGTDAFQEIDVLGLSLACTKHSFLVESLDALPEIMAEAFAIATSGRPGPVLIDIPKDIQLAVGELTPHLKPVEEHSVDSAAELQHAWDMLANAQKPMLYVGGGVGMAQAVPALRDFIAMTGIPAVATLKGLGAPDIAHPCYLGMLGMHGTKAANFAVQDCDLLVAVGARFDDRVTGKLNTFASKAKVIHMDIDPAELGKLRQVHVALQGNLNVLLPALQQPLNIQPWRDEVMALKQQHHWRYDHPGQAIYAPLLLKQISERKAPETVVTTDVGQHQMWTAQHMNFTRPENFITSSGLGTMGFGVPAAVGAQMARPDDMVICVSGDGSFMMNVQELGTIKRKQLPLKIVLLDNQRLGMVRQWQQLFFDGRYSETNLSDNPDFITLASAFDIPGQRITRKDQVDAALDALFNSEGPYLLQVSIDELENVWPLVPPGAGNETMLEKIS

SEQ ID NO: 28711 - protein, 103 aa, Yersinia pseudotuberculosis IP 32953
MYAVFQSGGKQHRVSEGQTIRLEKLDIATGETIEFDQVLMIANGEEINIGAPLVDGGKIKAEIIAHGRGEKIKIVKFRRRKHYRKQQGHRQWFTDVKITGISA

SEQ ID NO: 28712 - protein, 644 aa, Yersinia pseudotuberculosis IP 32953
MAKNLILWLVIAVVLMSVFQSFGPSESNGRRVDYSTFMSDVTQDQVREARINGREINVSKKDNSKYTTFIPVNDPKLLDTLLTKNVKVVGEPPEEQSLLASIFISWFPMLLLIGVWIFFMRQMQGGGGKGAMSFGKSKARMLTEDQIKTSFADVAGCDEAKEEVSELVDYLREPSRFQKLGGKIPKGVLMVGPPGTGKTLLAKAIAGEAKVPFFTISGSDFVEMFVGVGASRVRDMFEQAKKAAPCIIFIDEIDAVGRQRGAGLGGGHDEREQTLNQMLVEMDGFEGNEGIIVIAATNRPDVLDPALLRPGRFDRQVVVGLPDVRGREQILKVHMRRVPLDTDIDASVIARGTPGFSGADLANLVNEAALFAARGNKRVVSMVEFEKAKDKIMMGAERRSMVMTEAQKESTAYHEAGHAIIGRLVPEHDPVHKVTIIPRGRALGVTFFLPEGDAISASRQKLESQISTLYGGRLAEEIIYGPEKVSTGASNDIKVATSIARNMVTQWGFSEKLGPLLYAEEEGEIFLGRSVAKAKHMSDETARIIDQEVKLLVERNYQRARKLLLENMDVLHSMKDALMKYETIDAPQIDDLMNRKEVRPPAGWDNVTKNKSSDNDNTPTATMPADEPNTPTSGNTVSEQLGDK

SEQ ID NO: 28713 - protein, 664 aa, Yersinia pseudotuberculosis IP 32953
MTTELETSFADLGLSAPILSALTDLGYEKPSPIQLECIPHLLNGRDVLGMAQTGSGKTAAFGLPLLHNIKADLKSPQVLVLAPTRELAVQVAEALSSFSKHINGVNVVALYGGQRYDVQLRALRQGPQVVVGTPGRLLDHLKRGTLNLSNLSGLVLDEADEMLRMGFIEDVETIMAQIPAEHQTALFSATMPEAIRRITRRFMKEPQEVRIQSSVTTRPDISQSYWRVGGGYRKNEALVRFLEAEDFDAAIIFVRTKNATLEVAEALERSGYNSAALNGDMNQALREQTLERLKDGRLDILIATDVAARGLDVERISLVVNYDIPMDSESYVHRIGRTGRAGRAGRALLFVENRERRLLQNIERTMKLTIPEVELPNADLLSERRLAKFAAKVSQQLESSDLDMYRALLAKLQPEEEFDIETLAAALLKMAQGERPLILPPEAPRRPQREFNSRDDRGNDRGSRDRGDSRRDNRSDSRSADSRDGGERPARRERRDVGEMELYRIEVGRDDGVEVRHIVGAIANEGDISSRYIGNIKLFASHSTIELPKGMPGEMLSHFTRTRILNKPLNMQLLGDAQPHERRERPAGGNGGERRGGGRPFSGERREGAGAPPRRSFSGDRAPTGGGERRGNRDGQRSAAPRRDDAAAPAAAAAAPARRRFGDA

SEQ ID NO: 28714 - protein, 819 aa, Yersinia pseudotuberculosis IP 32953
MRVLKFGGTSVANAERFMRVADIIESNARQGQVATVLSAPAKITNHLVAMIDKMVAGQDISPNISDAERIFAELLRGLADTQPGFDYDRLKALVGHEFAQLKHLLHGISLLGQCPDSINASIICRGEKLSIAIMEALFQAKGYHVTVINPVEKLLAQGHYLESTVDITESTRRIGASGIPSDHIILMAGFTAGNDKGELVVLGRNGSDYSAAVLAACLRADCCEIWTDVDGVYTCDPRTVPDARLLKSMSYQEAMELSYFGAKVLHPRTIAPIARFQIPCLIKNTSNPQAPGTLIGGESIDEDSPVKGITNLNNMAMINVSGPGMKGMVGMAARVFAVMSRSGISVVLITQSSSEYSISFCVPQGELLRARRALEDEFYLELKDGVLDPLDVMEHLAIISVVGDGMRTLRGISARFFSALARANINIIAIAQGSSERSISVVVNNDAVTTGVRVCHQMLFNTDQVIEVFVIGVGGVGGALIEQIYRQQPWLKQRHIDLRVCGIANSKAMLTNVHGIALDNWRQELAEVQEPFNLSRLIRLVKEYHLLNPVIVDCTSSQAVADQYADFLTDGFHVVTPNKKANTSSMNYYRQMRAAATKSCRKFLYDTNVGAGLPVIENLQNLLNAGDELMRFTGILSGSLSFIFGKLDEGMSLSEATRQAKALGYTEPDPRDDLSGMDVARKLLILAREAGYKLELADIEVESVLPASFDASGDVDTFLARLPSLDAEFTRLVANAAEQGKVLRYVGVIEDGRCKVRMEAVDGNDPLYKVKNGENALAFYTRYYQPIPLVLRGYGAGNDVTAAGVFADLLRTLSWKLGV

SEQ ID NO: 28715 - protein, 575 aa, Yersinia pseudotuberculosis IP 32953
MEMLSGAEMVVRSLIDQGVKHVFGYPGGAVLDIYDALHTVGGIDHVLVRHEQGAVHMADGYARATGEVGVVLVTSGPGATNAITGIATAYMDSVPMVVLSGQVPSSLIGFDAFQECDMVGISRPVVKHSFLVKRTEDIPMVLKKAFYLASTGRPGPVVIDLPKDIVGPAVKMPYAYPEQVSLRSYNPTVQGHRGQIKRALQTIMAAKRPIMYVGGGAINAACHEELLILAEKLNLPVTSSLMGLGSFPGTHRQSVGMLGMHGTFEANMAMHNTDLIFAVGVRFDDRTTNNLAKYCPDATVLHIDIDPTSISKTVTADIPIVGDAKQVLTQMLDLLSQVGCTQDFDSLRDWWQSIEQWRTRNCLGYNKDSGKIKPQAVIEALHRLTKGDAYVTSDVGQHQMFAALYYPFDKPRRWINSGGLGTMGFGLPAALGVKLALPNETVVCVTGDGSIQMNIQELSTALQYNLPVLVLNLNNRYLGMVKQWQDMIYSGRHSQSYMDSLPDFVKLAEAYGHIGVAINTPDELESKLADALTQLSETNRLVFVDVTVDETEHVYPMQIRGGGMDEMWLSKTERT

SEQ ID NO: 28716 - protein, 465 aa, Yersinia pseudotuberculosis IP 32953
MSDQQEGAELKRGLKNRHIQLIALGGAIGTGLFLGIAQTIKMAGPSVLLGYAIGGFIAFLIMRQLGEMVVEEPVAGSFSHFAYKYWGHFAGFASGWNYWVLYVLVAMAELTAVGIYVQYWWPEIPTWVSAAVFFLAINAINLANVKVYGEMEFWFAIIKVIAIIAMILFGGYLLISGRGGPEATVTNLWAQGGFFPNGIMGLVMAMAVIMFSFGGLELVGITAAEAEDPAKSIPKATNQVIYRILLFYIGSLAILLSLYPWGKVVEGGSPFVLIFDALDSNSVATVLNIVVLTAALSVYNSCVYCNSRMLFGLAKQGNGPKILLKVDGRGVPVIAIAVSAFATAFCVLINYLLPGRAFELLMALVVSALVINWAMISLAHLKFRAAKNRQGVIPKFKAFWYPFGNCLCLLFLTGILVIMFLTPSIRISVILIPVWVVVLAIGYILKNQSQRQNQQLSASSRKATK

SEQ ID NO: 28717 - protein, 126 aa, Yersinia pseudotuberculosis IP 32953
MIRTMLQGKLHRVKVTQADLHYEGSCAIDQDFLEAAGILEYEAIDIYNVDNGQRFSTYAIAAERGSRIISVNGAAARCACVGDKLIICSYVQMSDAAARLHHPKVAYFEGENQLQRKAKAVPVQVA

SEQ ID NO: 28718 - protein, 262 aa, Yersinia pseudotuberculosis IP 32953
MNIKKRMLWLWAVLVLVQAPAVLADQLEKIQQRGVLRVAVPQDFPPFGSVGTDLQPQGYDIDMAQYLADKMKLKLQLVPVTSANRVPYLQTDKVDLVISSLGKNPEREKAIAFSRAYAPFFLGVFGAKDDELKQPEQLAGKTIGVTRGAVEDMVLSEIAPKAAQIRRYEDNNTTLSAYLSGQVNYLATGNLVISALARQNPKQAPVAKFMLKDSPCYIGLRQGEPALKAKVDALIGDALQDNTLNGLSEKWLKAPLPADLGA

SEQ ID NO: 28719 - protein, 386 aa, Yersinia pseudotuberculosis IP 32953
MSTLSFIPDSKLPAQGTTIFTQMSALAQKHQAINLSQGFPDFDGPDYLKQRLAYHVDQGANQYAPMIGVAPLRHAIAEKTANLYGWRPDAEHEVTVTTGASEALFAAITALVRPGDEVICFDPSYDSYAPAVKLAGGVLKRITLKPPAFTTDWAEFTRLLSERTRLVIVNTPHNPSATVWCAEDFEQLWQVIAERNIYVLSDEVYEHICFSRSGHASVLAHPQLRQRAIAVSSFGKTFHMTGWKVGYCIAPAAISAEVRKIHQYLTFSVCTPVQLALADMLNAEPEHWQQLPKFYRARRDRFVKALAASRLKILPSEGTYFLLADYSGISDLDDVEFCQWLTEHVGVAAIPLSVFCEAPFPHKLIRLCFAKQDATLDAAAERLCQL

SEQ ID NO: 28720 - protein, 407 aa, Yersinia pseudotuberculosis IP 32953
MEIILGVVMFTLIVLALTVMILFAKSKLVNTGDITVEINEDEDKSFTAPAGDKLLNMLSSHGIFVSSACGGGGSCGQCRVTIKEGGGDILPTELSHISKREAKEGCRLACQVNVKQNLKIELPEEIFGVKKWTCEVISNDNKATFIKELKLKIPDGDVVPFRAGGFIQIEAEPHTVKYADFDVPTEYRGDWDKFNLFRFESVATEPTVRAYSMANYPEEHGIILLNVRIATPPPSVPDAPPGIMSSYIWSLKPGDKVVISGPFGEFFAKDTDAEMVFIGGGAGMAPMRSHIFDQLKRLHSKRKISFWYGARSRREMFYEEDFDQLQAENDNFRWHVALSDPQPEDNWTGYTGFIHNVLLENYLKDHPAPEDCEFYMCGPPMMNAAVIKMLKDLGVEDENIMLDDFGG

SEQ ID NO: 28721 - protein, 463 aa, Yersinia pseudotuberculosis IP 32953
MELPVKNKLKRGLTTRHIRFIALGSAIGTGLFYGSADAIRMAGPSVLLAYLIGGVVAFVIMRALGEMSVNNPQASSFSRYAQDYLGPMAGYITGWTYCFEILIVAIADVTAFGIYMGLWFPDVAHWVWVLSVVLIIGAVNMMSVKVFGELEFWFSFFKVATIIIMILAGIGIIVWGIGNGGQPTGIHNLWTNGGFFSNGFVGMILSLQLVMFAYGGIEIIGITAGEAEDPKKSIPKAINSVPWRILVFYVGTLFVIMSIYPWNQVGTNGSPFVLTFQHMGITIAAGILNFVVITASVSAINSDVFGVGRMLNGMAEQGHAPKAFTAISKRGVPWVTVLVMMCAMLIAVYLNYIMPENVFLVIASLATFATVWVWIMILFSQIAFRRSLSKDQVKALDFPLRGGTFTSVLAIIFLVFIIGLIGWFPTTRISLYVGLVWIVLLLVGYYFKVKYQKKQATLIKNAD

SEQ ID NO: 28722 - protein, 555 aa, Yersinia pseudotuberculosis IP 32953
MSEAEARPSNFIRQIIDEDLASGKHTSVHTRFPPEPNGYLHIGHAKSICLNFGIAEDYQGQCNLRFDDTNPVKEDVEFVESIKRDVEWLGFTWSGDVRYSSDYFDQLYQYAVELINKGLAYVDELTPEQMREYRGTLTAPGKNSPYRDRSVEENLALFEKMRAGGFAEGTACLRAKIDMASPFIVMRDPVLYRIKFAEHHQSGNKWCIYPMYDFTHCISDALEGITHSLCTLEFQDNRRLYDWVLDNISIDCHPRQYEFSRLNLEYTIMSKRKLNQLVTEKVVEGWDDPRMPTISGLRRRGYTAASIREFCRRIGVTKQDNNVEMMSLESCIRDDLNEHAPRAMAVLDPIKVVIENRAAGEEWLTMPNHPNNPEMGSRQVPFDSEIYIDRADFREEANKQYKRLVLGKEVRLRNAYVIKAERVEKDAEGNVTTLYCSYDAETLNKDPADGRKVKGVIHWVSVAHALPAEIRLYDRLFNVPNPAAAEDFLSTINPESLVIRQGFVEPSLADAVSDKTYQFEREGYFCADSRYSRPGALVFNRTVGLRDTWAAKATQ

SEQ ID NO: 28723 - protein, 682 aa, Yersinia pseudotuberculosis IP 32953
MVTSDIDTKPQKDTLNPVVFFTSAGLILAFCLMTIFYTDLSNRWIGITLNWVSATFGWYYLLAATLYIVFVIYIATSRYGSIKLGPEQSKPEFSLVSWAAMLFAAGIGIDLMFFSVAEPVTQYMMPPEGQGQTLEAARQAMVWTLFHYGLTGWSMYALMGIALGYFSYRYNLPLTIRSALYPIFGKRIDGPIGHSVDIAAVIGTIFGIATTLGIGVVQLNYGLNVLFHIPESLAVQAGLILLSVVMAAVSVTSGVNKGIRILSEVNVLLALGLILFLLFWGNTEFLLNALVLNVGDYINRFLGMTLNSFAFDRPTQWMNSWTLFFWAWWVAWSPFVGLFLARISRGRTIRQFVVGTLIIPFVFTLLWLSIFGNSALYQILHGNIAFANEVMEFPERGFYSLLAQYPGFTLSASVATITGLLFYVTSADSGSLVLGNFTSRLADINNDSPNWLRTFWSITIGLLTLGMLMTDGVTALQNATVIMGLPFSFVIFFVMVGLYKSLKIEDYRKASSQQTPTPTLISGNEVLNWKQRLSRVMNYPGTTYTAKILDTICRPAMEEVAQELAVRGVKVEFNELPPKEDEQLNRLNHLELLVHLGDEQNFVYQIWPQRYSVPAFTYRARSGKSHYYRLETYLLEGTQGNDLMDYSKEQIINNILDQYERHMNFLHIQSEAPGNIMTFPDQ

SEQ ID NO: 28724 - protein, 451 aa, Yersinia pseudotuberculosis IP 32953
MSFDSLGLNADILRAVEEQGYLVPTPIQRQAIPVVLEGRDLMASAQTGTGKTAGFTLPLLQLLSQDQQPIKGRRPVRALILTPTRELAAQIDENVQSYSKYLKLRSLVVFGGVSINPQMMKLRGGVDILVATPGRLLDLEHQNAVDLSKIEILVLDEADRMLDMGFIHDIRRVLAKLPAKRQNLLFSATFSDEIKGLASKLLHNPASVEVARRNTASEQIAQSVHFVDKNRKRELLSQMIGEGNWQQVLVFNRTKHGANHLAEQLNKDGITAAAIHGNKSQGARTRALADFKDGKIRVLVATDIAARGLDIDQLPHVVNYELPNVPEDYVHRIGRTGRAERTGEAISLVCVDEHKLLRDIERLLKREIPRIALDGYEPDPSIKADPIQNGRQGRGAQRPGMGRGSSAGRPQNGGGAAGRGDSRNSRPRSQADGQRRPAGPSSRGRSRNPGE

SEQ ID NO: 28725 - protein, 571 aa, Yersinia pseudotuberculosis IP 32953
MMSQFNNEKIQLLLTQLQHIVGTRYLLTGERQTERYRTGFRSGKGVALAVVFPSTLLQQWQLLQACVAADTIIIMQAANTGLTEGSTPSGDDYDRPIVILNTLRLNNIQLLDDGKQVIGFPGSTLNQLEKRLKPYGREPHSVIGSSCIGASVVGGICNNSGGSLVQRGPAYTEMALYAQIDAQGELQLINHLGISLGNTPEEILQRLEQGQYGAEDIEQTGQQTSDSEYATRVRDIDATTPSRFNADPRRLFEASGCAGKLAIFAVRLDTFPSEKQQQVFYIGTNQTQVLTELRRIILRDFKHLPIAGEYLHRDIFDIAETYGKDTFVMINSMGTNNMPRFFTLKGKIDARLNKIPHLVDHLTDRVMQGFSQILPNHLPKRLKTYRNQYEHHLLLKMSGDGITEAQQHLRAFFATAEGNFIACTADEGKKAFLHRFAAAGAAVRYHAVHADQVEDILALDIALRRNEKQWFETLPPEIEKCLIAKLYYGHFLCHVFHQDYIVKKGVDVKALKEKMLSLLNDKGAEYPAEHNVGHLYLAKPALKDFYQQIDPTNSFNPGIGKTSKRKRWQQD

SEQ ID NO: 28726 - protein, 444 aa, Yersinia pseudotuberculosis IP 32953
MSTDDQKVGLIPVTLMVAGNIMGSGVFLLPANLASTGGIAIWGWLVTIIGALALSMVYAKMSSLDDSPGGSYAYARRAFGPFLGYQTNVLYWLACWIGNIAMVVIGVGYLSYFFPILKEPMVLTITCVVFLWIFVGLNIIGPKMITRVQAVATSLALIPIVGIALFGWFWFKGETYMAAWNVSGLGTFGAIQSTLNVTLWSFIGVETASVAAGVVKNPKRNVPIATVGGVLIAAVCYVLSSSAIMGMIPNAELRLSASPFGDAARLALGDTAGAVVSLCAAAGCLGSLGGWTLVAGQTAKAAADDGLFPPIFGKVNKAGTPVAGLLILGVLMTIFQISSISPNAAKEFGLVSSVSVIFTLVPYLYTCSALLLVGHGHLGNQVKTYVGITLIAFVYCIWAVVGSGAEEVMWSFVTLMVITALYTFNYNRTHKNPFPLDAPVKNGQ

SEQ ID NO: 28727 - protein, 340 aa, Yersinia pseudotuberculosis IP 32953
MTDFIPTDSPTPFCPNRMQVHSIVQETPDVWSLRLINHDFYSYLPGQYALVSIRNSDETLRAYTLSSTPGLSPFIQLTVRCLPDGEGSRWLTQQVNVGDYLWLSDAQGEFTCANADDDHYLMLAAGCGVTPVISMCRALLAQRPQADIRVIFNVRTPADVIFANEWHTLLQRYPQQLKLTLMAESAATAGFIEGRINARIMQQVAPDIAHRRVMTCGPAPYMVWVEQYCQQQQVPADHFQQEQFRTADEVIDTSNELTMTISRPLRSVNVPVGTSLLFALEQHKIPVMAACRAGVCGSCKTHILHGKYTTTSTMTLTPEEIAQGYVLACSCQLQGDVQLA

SEQ ID NO: 28728 - protein, 355 aa, Yersinia pseudotuberculosis IP 32953
MSQKFLFIDRDGTIIAEPPTDYQVDRLDKLALEPDVIPALLALQKADYKLVMITNQDGLGTSSFPQETFDPPHNLMMQILTSQGINFEQILICPHLPEDNCTCRKPKTALVESYLADGVMNSATSYVIGDRETDLQLAENMGISGLRYQRDGLNWTQIAKQLTQRDRHAYVNRVTKETAIDVNVWLDREGGSKIKTGVGFFDHMLDQIATHGGFRMDIQVSGDLYIDDHHTVEDTALALGEAINIALGDKRGIGRFGFVLPMDECLARCALDISGRPHLEYKAEFNYQRVGDLSTEMVEHFFRSLSYAMACTLHLKTKGRNDHHRVESLFKVFGRTLRQAIRVEGNTLPSSKGVL

SEQ ID NO: 28729 - protein, 463 aa, Yersinia pseudotuberculosis IP 32953
MAHDATVAVGTNQTGTNNRVQLRKTLTLVQVVMMGLAYLQPMTIFDTFGIVSGLTDGHVATSYAIALIAVLFTAVSYGKLVKRFPSAGSAYTYAQKSISPNVGFMVGWSSLLDYLFMPMINILLAKIYLEAIFPGVPSWIFVGALVSLMTLFNLRGINIVANLNSVIVVVQVAIMVVFMGLLIHGVYQGEGAGTLVSARPFYSENAHLVPMITGATILCFSFLGFDGISSLSEETPNAGKVIPKAIFLTALIGGIIFIAVSYCLQLYFPNISRFTDPEASQPEIMLFVAGKFFQSVILCFSCVTVLASGMAAHAGVSRLLYVMGRDGVFPEKVFGYVHPKWRTPAINVLLVGGVALSAISFDLVTATALINFGALVAFTFVNLSVIAQFYVRERRNSTFKDHFNYLILPMIGAGTVGVLWVNLESSSMTLGLVWGAIGLSYMVWKTRAFRRALPQFTEEPAQL

SEQ ID NO: 28730 - protein, 455 aa, Yersinia pseudotuberculosis IP 32953
MTTILKHLPINQRVGIAFSGGLDTSAALLWMQKKGAIPYAYTANLGQPDEEDYEAIPRKAMEYGAEKARLIDCRKQLVAEGIAAIQCGAFHNTTAGVTYFNTTPLGRAVTGTMLVAAMKEDDVNIWGDGSTYKGNDIERFYRYGLLTNAELKIYKPWLDTDFIDELGGRHEMSEFMIQSGFDYKMSTEKAYSTDSNMLGATHEAKDLEFLNSSVKIVNPIMGVKFWDENVVVKAEEVTVRFERGYPVALNGVVFDDSVELMMEANRIGGRHGLGMSDQIENRIIEAKSRGIYEAPGMALLHIAYERLLTGIHNEDTIEQYHANGRVLGRLLYQGRWFDPQALMLRDSIQRWVASEITGEVTLELRRGNDYSILNTVSDNLTYKPERLTMEKGDSVFSPDDRIGQLTMRNLDITDTREKLFNYVETGLLTSSAATGLPQVDNNNLSSGRGLQDKRQ

SEQ ID NO: 28731 - protein, 457 aa, Yersinia pseudotuberculosis IP 32953
MEQQLQNSSLKRGLKNRHIQLIALGGAIGTGLFLGIAQTINMAGPSVILGYAIGGFIAFLIMRQLGEMVVEEPVAGSFSHFAYKYWGDFAGFLSGWNYWAMFILVGMAELTAVGIYIQYWWPEIPTWVSAAVFFIIINAINLVNVRLYGETEFWFAIIKVAAIIGMIVFGAYLLASGSGGPAASVTNLWAQGGFMPHGFRGLIMAMAVIMFSFGGLEMVGITAAEAEDPRNSIPKATNQVVYRILIFYIGSLTVLLSLFPWNNVVEGGSPFVMIFDALDSPWVATALNVVVLTAALSVYNSGVYCNSRMLFGLASQGNAPKLLTKLNKRGVPIRSIALSALATSAGVVINYIMPGKAFELLMALVVSTLVINWVMICLAHLKFRKAKVKEGVVPRFKALWYPYGNYLCLVFLALILVIMYLTEGIRISVLMMPVWIALLWCGFVLTRRKCPKTVTSL

SEQ ID NO: 28732 - protein, 272 aa, Yersinia pseudotuberculosis IP 32953
MKRIFSPLKWAGSKGRIMPTLRQHLPAGKRLVEPFAGSCSVMLNTDYDEYLIADINDDLINFYQQLQRDCESIIVLAKELFKFDNSEANYYSNRQHFNERELSDEYRAAIFLYLNRHCHGGICRYNQKGEFNVPYGRYKAPYFPEAEIRYFAEKSQKATFVCCDFFEALTMTMPGDVVYCDPPYIPTSATADFTSYHTGGFSSNEQFWLSEILTIIADQGCHVIASNSDTPHGRYLYESFDIHSITAPRSASCKADGRKAVGEIIATLRAAI

SEQ ID NO: 28733 - protein, 315 aa, Yersinia pseudotuberculosis IP 32953
MPDMKLFAGNATPELAQRIANRLYTSLGDAAVGRFSDGEVSVQINENVRGGDIFIIQSTCAPTNDNLMELVVMVDALRRASAGRITAVIPYFGYARQDRRVRSARVPITAKVVADFLSSVGVDRVLTVDLHAEQIQGFFDVPVDNVFGSPILLEDMLQQNLENPIVVSPDIGGVVRARAIAKLLNDTDMAIIDKRRPRANVSQVMHIIGDVAGRDCVLVDDMIDTGGTLCKAAEALKERGAKRVFAYATHPIFSGNAVDNIRNSVIDEVIVCDTIPLSAEIKALKNVRTLTLSGMLAEAIRRISNEESISAMFEH

SEQ ID NO: 28734 - protein, 399 aa, Yersinia pseudotuberculosis IP 32953
MYSQNPPIYLDNNATTALDPAVLQAMMPYLTHAYGNAASKSHPFGWEASQAVQRARTLIATAINAVSPADIIFTSGATESINLAILGLQYQGNWGHIITSMIEHKSVLDCCAKLADSGVSVTYLQPQRDGIVSLDTLFQAIRPDTRLVSIMTANNETGTLQKVAEIGALCRDKGILFHTDATQAFGKIALDMQRMNISMATFSAHKVYGPMGVGALYVNTADPHLMLSPLIVGGGHERGLRSGTLNVPGIVGFGRAAELAMENMSVESARLCDLRNRLRQHILDTVPNMQVNGHLTECLPGVLNVSFEGIDADSLLLELSDVALSSGSACTSDQQTPSHVLQALGVSDEQLRGSVRFGLGRFNNESEIDYVCQRLENTVKMLRSMAPLSSATTTNETGV

SEQ ID NO: 28735 - protein, 579 aa, Yersinia pseudotuberculosis IP 32953
MQKKSLRYWMPGLTQLMAYERDWIKPDLRAGLSVAAVALPIAIAYAELTGVSAAVGLYSCILPMIAYAFFGSSRQLIVGPDAATCAVIAAVVAPLAAGNSEVHWQLTIMMTLMMGSWCLVASRFKLGALADLLSRPILTGLLNGVAITIIVDQLGKVFGFMTRPPQLIERVLALPYNMFNSHLPTVAISLLTFVVLYGVKWLRPNWPAPLLAIVIATFVSWAANMQQFGVDVVGGFEGGLPIVHWPDFQPGLLRDMVIPALNLAVVSFVSMMLTARSFAAKNGYDVDADVELRALGITNIVSALSQGFAISGASTRTAVNDANNGKSQLVSIIAALVIAMVLLFLTRPLQFIPIAALGVVLIYAAWSLLSFKSLWQLRKRNTQAFYLAIFTFVSVVLVGVISGIGLAVLLGLLQFLRTVFRPTEQLLGVNADGMIHSMGNGNGIKAVPGVMIYRFNSPLTYFNVAYFKRRILNLVDSTPHPADWVVIDAVASFTYADISVLAAIDELKRDLKQRNIKLILAGRRTELTRWFRINRLKSHDDDLVLVPDLYLALKLIQSKRRVAEKQEHESETGLEPEIG

SEQ ID NO: 28736 - protein, 221 aa, Yersinia pseudotuberculosis IP 32953
MELYLDTADVAAVKRLARVLPLQGVTTNPSILAKAGKSLWEVLPALRDALGGTGKLFAQVLASDSERMVSEAVQLSEQIPGLVIKIPVTAEGLAAIKKLKTMSIPTLGTAVYGAGQGLLSVLAGAEYVAPYVNRLDAQGSDGIAMVRELQQLLTLHAPNAKVLAASFRTPRQVLDCLLAGCQSVTIPVDVAEQFISTPAVKAAIEQFEQDWQGAFGTTMLS

SEQ ID NO: 28737 - protein, 555 aa, Yersinia pseudotuberculosis IP 32953
MRYTGAQLIVRLLEQQGITLVSGIPGGAALPLYDALGQSRIIRHVLARHEQGAGFMAQGMARATGETAVCLASSGPGATNLVTAIADAKLDSIPLVCITGQVPSSMIGTDAFQEVDTYGISIPITKHNYLVRDISELAQVIPQAFRIAQSGRPGPVWIDIPKDVQTAEIDLATLPPPGIADTPGPVDLSAIAQVAKMINQSVRPVLYLGGGIVSSGAHQQAIQLAELAGLPTTMTLMALGTMPVDHPLSLGMLGMHAARSTNLIMQQADLLIVLGARFDDRAIGKAEQFCPHANIIHIDIDPAELGKIRCPHLAMNADIAQVLTHLLPMIDAQLRSDWRSTVADMQREFPFNQPNSENPLCHYGLIRAAAEALDDETIITTDVGQHQMWVAQAYPLHRPRQWLTSGGLGTMGFGLPAAIGAALAKPESKVVCFSGDGSLMMNIQEMATAAEEQLNIKIILMNNQSLGLVHQQQDLFFGKRIFAADYAYRTNFIHIAEGFGFSTCDLNTASDPYTALHEALNRPGPVLIHALINVDEKVYPMVPPGAANIDMIGGE

SEQ ID NO: 28738 - protein, 508 aa, Yersinia pseudotuberculosis IP 32953
MRIGVPRERLANEARVAATPKTVEQLLKLGFTVAIESGAGHLASFDDAAYQEAGAIITDTTDVWQSDLILKVNAPFEDEIALMREGSTLVSFIWPAQNPELLQKLAERQVTALAMDSVPRISRAQSMDALSSMANIAGYRAIVEAAHEFGRFFTGQITAAGKVPPAKVMVIGAGVAGLAAIGAAGSLGAIVRAFDTRPEVKEQVQSMGAEFLELDFEEEAGSGDGYAKVMSEAFIKAEMELFAAQAAEVDIIVTTALIPGRPAPRLITKEMVASMKSGSVIVDLAAQTGGNCELTVADEVTITENGVKIIGYTDLPSRLPTQSSQLYGTNLVNLLKLLCKEKNGEIDIDFDDTVIRGVTVVKTGEVTWPAPPIQVSAQPQAAKAAPIAKEETKPSSPWTKYIIMAVAMVLFGWLANVAPPEFLSHFTVFALACVVGYYVVWNVSHALHTPLMSVTNAISGIIVVGALLQIGHGGWVSFFSFIAVLIASINIFGGFTVTQRMLKMFRKN

SEQ ID NO: 28739 - protein, 116 aa, Yersinia pseudotuberculosis IP 32953
MTTIDKIQRQITENPILLYMKGSPKLPNCGFSAQAVQALSACGERFAYVDILQNPDIRAELPKYANWPTFPQLWVDGELVGGCDILMEMYQRGELQTLLKETADKYRSQEDQPAAE

SEQ ID NO: 28740 - protein, 248 aa, Yersinia pseudotuberculosis IP 32953
MLSIKNLKVSVEGNEILKGLDLEIKPGEVHAIMGPNGSGKSTLSAALAGREEYEVTEGEVTFKGKDLLELAPEDRAGEGVFLAFQYPVEIPGVSNHFFLQTSVNAVRKYRQQAPLDRFDFSDFIEEKIALLKMPADLLTRSVNVGFSGGEKKRNDILQMAALEPSLCILDETDSGLDIDALKIVANGVNSLRNENRSFIIVTHYQRILDYVKPDFVHVLYQGRIIKSGDFTLVKQLEEQGYGWLTDQQ

SEQ ID NO: 28741 - protein, 316 aa, Yersinia pseudotuberculosis IP 32953
MKNSKQAVLIIAPVMDYLTEKLEQTFTVHKLYQVTDQAEFLAEQGKNIKGIVTRGDIGVTNEVLALLPEVQIISIFGVGTDAVDLDYTRERNIIVTTTPGVLTDDVADTALGLIIATSRRFYQASQFLRAGEWPNGSLPLSSKVTGKRLGIFGMGRIGRAIARRAVGFDMQIAYTDTVHDSSLPYQYVPDLISLAKQSDILVVAISGGKDSAGLVDKAIFAAMPNHGILINIARGSMVNQDDLISALQQQQIGGAGLDVFADEPHVPQALIEMDNVFLLPHIASATTDTRIQMSDIVFSNILAHFSGETAPTAITY

SEQ ID NO: 28742 - protein, 404 aa, Yersinia pseudotuberculosis IP 32953
MSPIEKSSKLDNVCYDIRGPVLKEAKRLEEEGNKVLKLNIGNPAPFGFDAPDEILVDVIRNLPTAQGYCDSKGLFSARKAIMQHYQARDIRDLTVEDIYIGNGVSELIVQSMQALLNLGDEMLVPAPDYPLWTAAVSLSSGKAVHYMCDEESGWFPDLDDIRSKITPRTRGIVIINPNNPTGAVYSKELLLEIVEIARQNDLIIFADEIYDKILYDDAQHHSIAALAPDLLTVTFNGLSKTYRVAGFRQGWMVLNGPKKHAKGYIEGLEMLASMRLCANVPMQHAIQTALGGYQSISEFIQPGGRLYEQRDRAWELINQIPGVSCVKPQGALYMFPRIDQKRFNLKDDQKLVLDLLLQEKVLLVQGSAFNWPYPDHVRIVTLPRVDELEMAVRKLGRFLETYHQ

SEQ ID NO: 28743 - protein, 400 aa, Yersinia pseudotuberculosis IP 32953
MSSKLVLVLNCGSSSLKFAIIDATNGEEHISGLAECFHLPEARIKWKVDGGKQEAALGAGAAHSEALNFIVNTILAQKPALSAQLTAIGHRIVHGGEKFTSSVIVTDDVIQGIKDSIPFAPLHNPAHLIGIAEALKSFPNLADKNVAVFDTAFHQTMPEESYLYALPYSLYKDHGIRRYGAHGTSHFYVSQEAAKILNKPLEELNVITCHLGNGGSVTAVRNGKCVDTSMGLTPLEGLVMGTRSGDLDPAIIFHLHDAMGMSVDQINTLLTKESGLLGLTEVTSDCRYVEDNYATKADAKRAMDVFCHRLAKYIGSYTALMDGRLDAVVFTGGIGENAAMVRELTLDKLGLLGFEIDHERNMAARFGKSGTITKDSSRLALVIPTNEELVIAQDAARLTA

SEQ ID NO: 28744 - protein, 759 aa, Yersinia pseudotuberculosis IP 32953
MDEQLKQSALDFHQFPVPGKIQVSPTKPLATQRDLALAYSPGVAAPCLEIAADPLAAYKYTARGNLVAVISNGTAVLGLGNIGALAGKPVMEGKGVLFKKFSGIDVFDIEVDELDPDKLIDIIASLEPTFGGINLEDIKAPECFYIEKKLRERMKIPVFHDDQHGTAIICTAAVLNGLRVVKKDISDVKLVVSGAGAASIACLNLLVALGLKQHNIIACDSKGVIYKGREANMAETKAAYAIDDNGQRTLGDVMPGSDIFLGCSGPGVLTPEMVKTMAPNPLILALANPEPEILPPLAKAVRPDAIICTGRSDYPNQVNNVLCFPFIFRGALDVGATTINEEMKLACVHAIADLALAEQSDVVASAYGEQDLSFGPEYIIPKPFDPRLIVKIAPAVAKAAMASGVATRPITDFNAYVEKLSEFVYKTNLFMKPIFSQAKKEMKRVVLAEGEEERVLHATQELISQGLAYPILIGRPSVIETRLKKLGLQISAGKDFEVVNNESDPRFNEYWHEYYQIMKRRGVSQEQARRAVIGNPTLIGSIMVHRGEADAMICGTIGTYHEHYDVVEKVFGFREGAHVAGAMNALLLPSGNTFIADTYVNNDPTAEQLAEITLMAAETVRRFGIEPKVALLSHSSFGTSDCPAARKMRQTLALVNQMAPELEIDGEMHGDAALVESIRHNLMPDSPLKGSANILIMPNMEAARISYNLLRVTSSEGVTVGPVLMGITKPVHILTPIASVRRIVNMVALAVVEAITLRP

SEQ ID NO: 28745 - protein, 495 aa, Yersinia pseudotuberculosis IP 32953
MIPVIALVGRPNVGKSTLFNRLTHTRDALVADFPGLTRDRKYGRAEVEGHEFIVVDTGGIDGTEDGVETKMAGQSLLAIEEADIVLFMVDARAGLMPADQGIAQHLRSREKATFLVANKTDGIDPDTATADFYSLGLGEVHAIAASHGRGVTQLIEDVMAPYMDAEEPEVELTDEEENAAYWAEQEAQGEDVPPEDPEDDFDPRTLPIKLAIVGRPNVGKSTLTNRILGEDRVVVYDMPGTTRDSIYIPMTRDDREYILIDTAGVRKRGKITETVEKFSVIKTLQAIEDSNVVLLVIDARDGISDQDLSLLGFILNSGRSLVIAVNKWDGMTEEARAQVKDMLDLRLGFVDFARIHFISALHGSGVGNLFESVQEAYDCSTKRVGTSLLTRIMQMAEEDHQPPLVRGRRVKLKYAHAGGYNPPIVVIHGNQVTDLSDSYKRYLMNYFRRSLKVMGTPIRIQFKEGENPFAGKRNPLTPNQMRKRKRLMSHLKKGK

SEQ ID NO: 28746 - protein, 409 aa, Yersinia pseudotuberculosis IP 32953
MTESKVKTPIYLDYAATTPVDPRVAEKMMQYLTLDGIFGNPASRSHKFGWQAEEAVDIARNDVAALVGADPREIVFTSGATESDNLAIKGAANFYQKKGKHIITCKTEHKAVLDSCRQLEREGFEVTYLAPQPNGIIDLKQLEATMREDTILVSIMHVNNEIGVVQDIAEIGEMCRSRGIIFHVDATQSVGKLPVDLSKLKVDLMSFSAHKVYGPMGIGALFVRRKPRIRIEAQQHGGGHERGMRSGTLPVHQIVGMGEAYRIAKEEMESEAARLRSLRLRLWNGIKDIEEVYLNGSLENGAPGILNVSFNYVEGESLIMALKDLAVSSGSACTSASLEPSYVLRALGMNDELAHSSIRFSLGRFTTEEEIDYAIALVHKSIGRLRDLSPLWDMFKQGVDISSIEWSHH

SEQ ID NO: 28747 - protein, 70 aa, Yersinia pseudotuberculosis IP 32953
MSNKMTGLVKWFDAGKGFGFISPADGSKDVFVHFSAIQGNDYKTLDEGQNVEFSIEQGQKGPSAVNVVAL

SEQ ID NO: 28748 - protein, 328 aa, Yersinia pseudotuberculosis IP 32953
MSTFDLQPGVDFQQAGKQVLQIEREGLAQLDQYINEDFSRACEAIFRCHGKVVVMGMGKSGHIGCKIAATFASTGTPAFFVHPGEASHGDLGMITPQDIVLAISNSGESNEILTLIPVLKRQKILLICMSSNPESTMGKAADIHLCINVPQEACPLGLAPTTSTTATLVMGDALAVALLKARGFTQEDFALSHPGGALGRKLLLRISDIMHTGTEIPTVSPDASLRDALLEITRKSLGLTVICDDSMRIKGIFTDGDLRRVFDMGIDLNNAKIADVMTRGGIRVPPNILAVDALNLMESRHITALLVADGDQLLGVVHMHDMLRAGVV

SEQ ID NO: 28749 - protein, 484 aa, Yersinia pseudotuberculosis IP 32953
MQTDVVLPLVGYLVLVFGLSIYAYTRRQTGNFLNEYFIGNRSMGGFVLAMTLTATYISASSFIGGPGAAYKYGLGWVLLAMIQLPAVWLSLGVLGKKFAILARRYNAVTLNDMLYARYQSRLLVWLASISLLVAFVGAMTVQFIGGARLLETAAGIPYDTGLLIFGISIALYTSFGGFRASVLNDALQGLVMLIGTILLLVAVIHAAGGLHKAVETLQHIDPALVSPQGGDQILDVPFMASFWILVCFGVIGLPHTAVRCISYRDSKAVHRGIILGTIVVAILMFGMHLAGALGRAVLPDLKIPDQVIPTLMITVLPPFAAGIFLAAPMAAIMSTINAQLLQSSATIVKDLYLNLWPAELKNERKLARISSLSTLILGLLLLLAAWRPPEMIIWLNLLAFGGLEAVFLWPLVLGLYWERANAHGALSAMIVGAVCYTVLASFDIKIAGLHPIVPSLTLNLLAFYIGNLFGDRARARHPAIVSAD

SEQ ID NO: 28750 - protein, 296 aa, Yersinia pseudotuberculosis IP 32953
MKQLQRIGFIGLGKMGTPMVQRLVKAGFELYLCDADITKVQILTAELNAESLTVDNAASLDALITMLPNSEAVEQALLGSDGISGWVAQLSQAAVVIDMSSSDPERSRRLAILLAVWELDYLDAPVSGGVKKAQNGTLSILIGGEDRVLKSCYTALAAMGEQILFVGPAGSGHAAKALNNYVSATGLLATIEALHVAQRFGIEPEVMTEVLNTSTGRSNTSENKVRQFMLNGSYASGFTLQLMNKDLHIARNLAQRLNYPMRLGMHCVDVWDEVSRRATPMADHTEMYRLLIDKEP

SEQ ID NO: 28751 - protein, 70 aa, Yersinia pseudotuberculosis IP 32953
MSNKMTGLVKWFDAGKGFGFISPADGSKDVFVHFSAIQSNDFKTLDEGQNVEFSIENGAKGPSAVNVIAL

SEQ ID NO: 28752 - protein, 70 aa, Yersinia pseudotuberculosis IP 32953
MSNKMTGLVKWFDAGKGFGFITPADGGKDVFVHFSAIQSNDFKTLDEGQNVEFSIENGAKGPAAVNVIAL

SEQ ID NO: 28753 - protein, 201 aa, Yersinia pseudotuberculosis IP 32953
MSQNKEWLAASDAWMIYSRELAALKENVDQQVWLQVLDALAECRGKIAVTGVGTSGIAARKVAHMLACVEQPAIYLNATDAAHGDLGFLGAQDIIILISRGGNSDELTRLLPTLQRKQVKIISVTENEQSAIAQVSALVLKTHVKQEIDPLNMLATTSIVLVLALFDAICACLMARTGFSKETLLAVHPGGDVGMALRKQQ

SEQ ID NO: 28754 - protein, 461 aa, Yersinia pseudotuberculosis IP 32953
MIQVAPQQTRDAPSATVVAKFGGTSVASFDAMSRSADVVLSNPDVRLVILSASAGITNLLVALADGSEPEKRADHLEEIRHIQYDIIARLTDSTVIREEIDRMLENIAMLSEAASLATSPALTDELVSHGELMSTLLFVELLRQRQVAVEWFDVRKVMRTNDRFGRAEPDTSALAELAQTLLAPRIEDAIVVTQGFIGSEGKGRTTTLGRGGSDYTAALLGEALNVSRIDIWTDVPGIYTTDPRVVPAAKRIDKIAFEEAAEMATFGAKILHPATLLPAVRSDIPVFVGSSKDPAAGGTLVCNETYNPPLFRALALRRKQTLLTLHSLNMLHARGFLAEVFNILARHSISVDLITTSEVSVALTLDTTGSTSTGDSLLTTSLLTELSSLCRVEVEEDLALVAIIGNNLSQACGVGKEVFGVLDPFNIRMICYGASSHNLCFLVPGNDADKVVQTLHYNLFE

SEQ ID NO: 28755 - protein, 467 aa, Yersinia pseudotuberculosis IP 32953
MKNDSSTLKRGLSARHIRFMALGSAIGTGLFYGSAEAIRLAGPAVLLAYLIGGAAVFMVMRALGEMAVHDPVAGSFGHYASRYLGPLAGFLTGWTYTFEMVVVALADVTAFGIYMGLWFPDAPQWVWVLSIIFFIGALNLCSVKVFGEMEFWLSLLKVAAIIAMIAAGLGIMMFGFGAGHDSTGVSNLWAHQGFMPNGITGVIASFAVVMFAFGGIEIIGVTASEAKDPGKVLPRAINTVPIRILLFYVLTLFVLMAIYPWKSIGQNGSPFVEIFSSLGINSAANILNLVVITAAISAINSDIYGAGRMMYGLAQEGLAPKSFSRLTRNGVPYMTILVMAITLLCGVVLNYLIPKNVFLVIASIATFATVWVWLMILVSQVAMRRSMSKAQVARLAFPVPFWPLAPILTILFMAFIIAVLGYFPATRIAMYVGLAWVALMTLAWWIWLRKAPSCVIQERVKSSEIPS

SEQ ID NO: 28756 - protein, 326 aa, Yersinia pseudotuberculosis IP 32953
MKPSIVLYKSIPTDLHQRLAQHFTVNSFDGLTPDNQPELLAALQQAEGLIGSGGKIDQDFLQLAPNLRAASTISVGYDNFDVEALSQRGIALMHTPTVLTETVADTMMALMLSTARRVVELAERVKAGEWQESIGDDWFGVDVHHKTIGILGMGRIGMALAQRAHFGFSMPVLYTSRRPHEAAEQRFGARHCSLDTLLAEADFLCITLPMTEQTYHMIGREQLAKMKSSAILINAGRGPVVDEQALIAALQDGTIHAAGLDVFEQEPLPVDSPLLTLRNVVAVPHIGSATHETRYNMAACAVDNLINALTGTVKENCVNPQVLITH

SEQ ID NO: 28757 - protein, 397 aa, Borrelia garinii PBi
MKKVAIIDGLRMPNTKFGGSFKGLDIIDESSKVVKALLKRNNLCEVDEVIVGNVISSGLGQNIARQIALKSSLGDNVPAFSVNKVCGSGLKALELAFNSIVLGNNDIVLAGGMEDLTNSPYLLPRKVRFDGLKFGNFGIEDSIQKDALIDSLNFISMGLTAENLSEKYKITREMQDEFAYNSHVKALKARELGYFEDEIHPLTILDKKTNSSRIVSSDEEIRDNLTLNKLASLNPVFKESGTVTAGNSSSLNDGACFLILASEERVKSLGVMPLAYIGGFESVGLSPLYMGFGAYMAIEGIISKLSLNPSEIDLIEVNEAFAAQALSIEKALFKKYNIASDIINVNGGAIALGHPFAVSGSRILLTLARSMKMKNKTKGIASVCVGGGQGISSFLYR

SEQ ID NO: 28758 - protein, 544 aa, Borrelia garinii PBi
MNQSKKILRTVYLSLFLIGLFMLINDIFSSIMLSFKSSDKEVQFDLNKSFDDNEIFLSKSNGFDLINKSQNIVVETEIYFATFSTFRGNLVSLKLKNHLNLEKDPTDLINVDYKNETFFDVSLDYLVEDLFLYKKIDNLNHEFKAYFKNHGKIYEYVKKYTFSEKNEYLMKFTVIVNSLNDYDLFDIDSYKIVFSSEIERLSDKAKLQYNNYLSQIIYYDNKLKYGKDGLSINNPRWIGSSTKYFEVLISRENMEVEFKKERGVLKSFIVNNVGNKKNISDEFFIYAGPKDNRYLDIFDKSGDNTFGLSDIAFGMSVEKSLWYLIQVPMQMVMQVFYDVIPNWGLSIIFLTIVVRILIFPLTFKGFRATAELSKLQPKMKELQVKFKHDPKKLNEEMGRLYKEEGVNPLGGCFPVILQLPIFFALYSLVNNLFLLRGASFIPGWIDDLSIGDSVYNFGYRLYFVSWTDIRILPFIMMFTQLGSTIVSSNLDLKNLGAQQKFLYFGMPIMFFFILYNMPSGLLIYWITTNIFTILQQYYIKMHLS

SEQ ID NO: 28759 - protein, 635 aa, Borrelia garinii PBi
MGKIIGIDLGTTNSCVAIMEHGKPVVIQNSEGGRTTPSIVAYTNKGERLVGQVAKNQMVTNPENTIYSIKRFMGRRFEEVASEIKMVPYKIEKGLNGDARVNISNIKKQMSPPEISAATLTKMKETAEAYLGEKVTEAVITVPAYFNDAQRQATKDAGKIAGLEVKRIVNEPTAAALAYGIEKKHEEIVAVYDLGGGTFDISILELGDGVFEVKSTNGDTHLGGDNFDDEIIKHLISEFKKESAIDLSNDKMALQRLKEAAEKAKIELSGAQEASINLPFITADANGPKHLQYTLTRAKFEQMVDHLVQKTKEPCLKAIKDAGLKASDINEVILVGGSTRIPAIQKIVKDIFGQDPNKGVNPDEAVAIGAAIQGGILTGETKDMVLLDVTPLSLGIETLGGVMTKLIERNTTIPTKKSQVFSTAADNQTSVDIKVLQGEREMAAQNRILGNFILDGIPAAPRGVPQIEVSFDIDANGIVHVSAKDMGTGKEQKIRIESSSGLSESEIDRMVKDAEAHAEEDKKLKENIEAKNTANSLIYQTEKSLKEYSEKISSEDKEAIENKIKELKESLDKEDISLIKSRTEELQKASYKIAEMMYKDSSQQNASNQQENGTQSNTSEEGKEADYEVVDEDKK

SEQ ID NO: 28760 - protein, 406 aa, Borrelia garinii PBi
MNLLKKKSIGIIACPGGRVFANKIIEELERIFINVENDIVDSICQDSKALKEEIFKIEKVLSPFLEGLSLSTFKSKEPLEIPVKFVKFANGEFKTEILKTIRNKDIFIVQDVANTYEVEINSSEKIIMTVNDHIMNLMTTIDACMQAKANSVSVIIPSYPYSRQDKKHSRECLTASLIGRFLEELGIRHILTLDIHSKAIENVFRKVYFENLNVSYEIFKSLGDLIDIRDSNLVIVSPDTGAVSRNKFFASSLKSPLALLYKERDYSRVSNDVADSNISVTKLLGDVEGKNVFMSDDMLATGGTLIKAMKLLKSMGAKKIICGISLPFFNGDAIKYFDKAYEEGYFYKIIGTNAVCHNDELINKPWYHETNVAHLFANAIFAIYNKVGLQKILDRRDDIQKLITKG

SEQ ID NO: 28761 - protein, 345 aa, Borrelia garinii PBi
MFCLKDYVFNKARIFVKENKFKASVVFPESSDSRVLKAAVIVLQKNLANSVILVGKKDPVINSLKKFSNCNNILERIEVIDPNSFPDIEMYLDEYWSLLKLKGATKQSLKTQVLDEITFAMLMVRFGHVKSCVCGAISTSAKVLSNVLRIIPKLDGVKTVSSFMIMDTLNIARNLDFCFGHNGILFFADCSLVVNPNSLELAEIALQSAKSFKDILNAKPKVALLSFSTKGSSNARETEKVKNALNIVKNKESDLLIDGELQLDSAIIKDVAEKKCSESLLAGSANVLIFPNLDAGNIGYKLVERFAFAKAYGPFLQGLSKPISDLSRGCSVDEIVFASALMIGI

SEQ ID NO: 28762 - protein, 405 aa, Borrelia garinii PBi
MKILIINTGSSSLKFAIYQYENSKKLISGVIEKIKEQKSIIKIINTDGSITERFEKGIENHPKAIEKMFKILLNSNSKILKNISEIKIIGHRVVHGGSYFKNSVILKNSNLDKLKQSSKLAPLHNPSAIAAIETVLKILPHAKQVLCFDTSWHQTIKKHAFLYATPYSWYKEHNIRKYGFHGLSYSYVTKRSSEILNKKIDNLNLIILHLGNGASINAVKDGKSYDTSMGITPLEGLVMGTRSGDIDPSIINLMSTILNKNTKQIEEILNKESGILGISEKSNDMRDIWNKIEEGEYQSKLAVEIMTYRVKKYIGSYIAILDFNVDAIVFTGGIGVVDYEVRELALKGFEKIGIELDLEKNKMAQNKNLESEISTIKSKVKILAIPTNEESTILEDIYNLIPKNL

SEQ ID NO: 28763 - protein, 290 aa, Borrelia garinii PBi
MKSGFAAILGRPSTGKSTLLNSICGHKISIISPIPQTTRNKIKGIFTDDRGQIIFIDTPGFHLSKKKFNIAMMKNIHSSIGEVELILYIIDIQDKPGEEENKILEIIKNSKIKFLVLLNKVDLKNTKIKEITQFLKEKEIEDNNIIKISAEKKINTEELKNKIYENFSEGPLYYPQEYYTDQEINFRISEIIREKAIENLKEELPYSLYVDIDILENKKGSLFIRANIFVANESQKGIIVGKNGKEIKSIGERARITIAKIFETKCNLFLQVKLKKNWNKEDKLIKRLIN

SEQ ID NO: 28764 - protein, 536 aa, Borrelia garinii PBi
MKEDVLVLENITKKYGDFVANDDVSIKFKAGEVHAILGENGAGKTTLMKTIYGIHQVDSGRIILKGQEVSFKDSSEAIHNGIGMVFQHFMLIPQFTAVQNIILGYENSKFGFLDYKQAKRKINYLSEKYGLKIDLEKKVEDLSVGMEQKIEILKVLYRNADIIIFDEPTAVLTPSEVDDFINILKILTQEGHTVILITHKIKEIRSIAKRCTIMRLGRAVKTVDIAEINDKDLTKLMIGKEISLRSSKIQFENHFNVLEIKNLSVKDERGVLKVKDVNLNLKNGEILGISGIEGSGQEDLVDAILGLKNIFKGDIFKKNSSGSLESLKGLTIKQIIDKKIGNIPSDRQRHGLILEFNVMQNIGLKSFDNPDYLGLKKNHSKSNFDLKFNFFNFIKRQFDKVKRQFVGFDLDILKKLSNQLVNYFDIRPRGILNKVKYLSGGNQQKVIIAREISLEPDILLAIQPTRGLDVGAVENIYKRIIEQRDAGRSVLLVSLELDELVNVCDRIAVMHDGRIVGILEDNFDIDVIGKMMMGLS

SEQ ID NO: 28765 - protein, 329 aa, Borrelia garinii PBi
MYNFKDSVSITVISGNGGSGCVSFLREKFNAKGGPDGGNGGSGGSVIFKVKENLRTLSSYKNGHVLCAKNGRPGMSFKRSGANGKDLILFVPPNTDIYNENDEALLCRLEKLNDEFVILKGGRGGLGNWNFKTSIRRAPRFAQPGESGNSLNVRLELFLVADIGLVGPPNAGKSSLLNRITSAKSRVANYPFTTKIPHLGVLRYSYDDLIIADIPGIIKGASFGVGLGTKFLKHITKTKILALVIDISEANFLESYNILLNELKSYSYKLFNKKKIIIANKLDLDSSEKNFNCLIKALGKEEKIIGISIYENRGIDELIKEFFILAKAF

SEQ ID NO: 28766 - protein, 539 aa, Magnaporthe grisea
MPSLGFLKKKRTRDGNNDNSSQPASPVTPTAAQSFEQAQVLGAPSAINNSHAHTQQQSYLVPQPGYSVGTEVQAQQPQMNSISQQQQQAFAPPAHTPSPGTIDPQQSLPSISNLMNPAVQQQNSQPSANFQPQSQSQSQSQSQFPLPPSHGNGDQSQQQNFQVQQQIQSQQDAMDIQPSQVQDQSHSQQAQPQHQPQHHVQHHVNHAHQGSQDQQTRVTKGKYSLTDFEILRTLGTGSFGRVHLVQSRHNQRFYAVKVLKKAQVVKMKQVEHTNDERKMLGEVKNPFLITLWGTFQDCRNLYMVMDFVEGGELFSLLRKSGRFPNPVAKFYAAEVTLALEYLHAKNIIYRDLKPENLLLDRHGHLKITDFGFAKRVPDKTWTLCGTPDYLAPEVVSNKGYNKSVDWWSLGILIYEMLCGYPPFWDSGSPMKIYENILKGKVRYPAYINPDAQDLLQRLITADLTKRLGNLYGGSQDVRNHPWFAEVTWDRLARKDIDAPYTPPVKAGAGDASQFDRYPEETERYGQTGHDEYGNLFPGF

SEQ ID NO: 28767 - protein, 548 aa, Marchantia polymorpha
MGNCVGGHSDRKNALNPNEPAATNVQRGTGAPQGSHGGSGAAGVSAQASHPAPLGGISAKQKPTLTGNVLGRPLEDVRSIYTLGRELGRGQFGVTHLCTHKVTGELLACKSIAKRKLTNKDDVEDVRREVQIMHHLEGQKNIVELKGAYEDKHNVHLVMELCAGGELFDRIIQRGHYSERAAAALCRTIVQVVQTCHSLGVMHRDLKPENFLLANKKEDAPLKATDFGLSVFFKPGEVFTDIVGSAYYVAPEVLRRNYGPEADVWSAGVILYILLCGVPPFWAETEQGIFDAVMHGHIDFTSDPWPSISQKAKDLVKRMLKQNPKERLTAHEVLSHPWISVDGEAPDKPLDNAVLSRLKQFTAMNKLKKLALKVIAESLSEEEIMGLKEMFKSMDTDNSGTITFEELKDGLQKQGSNLAESEVRQLMAAADVDGDGTIDYLEFITATMHLNKIDKEDHLYAAFQHFDGDNSGFITMEELEQALIKHGMGDPDTLKEIIREVDTDHDGRINYDEFVAMMRKGTPGHQEGHRRSISNMAPVGAPRQHHHK

SEQ ID NO: 28768 - protein, 548 aa, Marchantia polymorpha
MGNCVGGHSDRKNALNPNEPAATNVQRGTGAPQGSHGGSGAAGVSAQASHPAPLGGISAKQKPTLTGNVLGRPLEDVRSIYTLGRELGRGQFGVTHLCTHKVTGELLACKSIAKRKLTNKDDVEDVRREVQIMHHLEGQKNIVELKGAYEDKHNVHLVMELCAGGELFDRIIQRGHYSERAAAALCRTIVQVVQTCHSLGVMHRDLKPENFLLANKKEDAPLKATDFGLSVFFKPGEVFTDIVGSAYYVAPEVLRRNYGPEADVWSAGVILYILLCGVPPFWAETEQGIFDAVMHGHIDFTSDPWPSISQKAKDLVKRMLKQNPKERLTAHEVLSHPWISVDGEAPDKPLDNAVLSRLKQFTAMNKLKKLALKVIAESLSEEEIMGLKEMFKSMDTDNSGTITFEELKDGLQKQGSNLAESEVRQLMAAADVDGNGTIDYLEFITATMHLNKIEKEDHLYAAFQHFDEDSSGFITMEELEQALIKHGMGDPDTLKEIIREVDTDHDGRINYDEFVAMMRKGTPGHQEGHRRSISNMAPVGAPRQHHHK

SEQ ID NO: 28769 - protein, 1388 aa, Colletotrichum lagenarium
MTTSELVPPPPARRSPRTRRRRQDKPALSARLVLDDHEINGDVGVLSEDLFTDLFPHLRNVPSREDGSEDIHHVAIAPWEPSPSPTETAWTVVPVLKSSALKPSTVQFSPSSLSLQSFATILQQVAPSKLSSHSRSGIEVQILDVVALSLDTVFVSLESELTKRLEQGEGTFFRDRPNKGKGKAPAQPDTPEDRLISALRVALGSLKVLHSGDLFSLPLPPHPVTHVPPNPGKIMLCEPVSREYLSDDTKIVLMRGRVHAKRGQSAPAIPPNRSLNGVPEDDEDDTANDQFYSAAEDRYKTDAATTEMDTVTETEESDLSGVDHDDDLSDDFMDDMISLQAPTLPTTASGVSTMQPGTPMTIGRGRKTNGIATPASVFSNFTATTARPDRPRGRLFKAQGLIRPILIDLLHPKPAPEDDEEARIFVDIASLSKIGCFSGDWVRVEAAEEPPANGFGAFGLGSFTSLEPTESNWRPVRVYGLPEGYSQRPVTRIPSAKHGERRMSFFESQLQKPTSPTAYISPVLLANLESPSYLRLSPIKRGTYQGKGTLPKFTSASRPPYARDITIQHVRSPVTAERAYQSAVLGGLKRYFAQKIRLVRTGDLIAVPIDTQLGKALQEQPSANGSEVDDVMALAKDESCRFDQVAWFKVGHIQTQKTDADHDQTEDLWGGVACIDSSSVAMHGSGFATSRTPATKASTWPYYLGVKKMPMKSNGASALMVPEQDQRFVSPLRRRLRELLAAATSPRAIHLKMPPVAILLTSTHRNIGKATLASEACSDIGLHTYAIDAYDILSEAGTSGGDVKTEGLLRTRSERAMSCGPDTTALLIKHVEALTADRMVSTMKEILQDTRVLVATTSDVDKVPDGVRGLFSHELEVGAPDEAEREGILRTIVEDRGINLDPEVDLNGIALKTAALVAGDLVDVVDRALVAQRLRLEQISSKTGQAVTVRDLQVAGGAMARCVTKGDFDVAVEAARKNFAGAIGAPKIPNVTWDDVGGLNNVKDAVTETIQLPLERPELFAKGMKKRSGILFYGPPGTGKTLLAKAIATEYSLNFFSVKGPELLNMYIGESEANVRRVFQRARDARPCVVFFDELDSVAPKRGNQGDSGGVMDRIVSQLLAELDGMSGGDDTSGGVFVIGATNRPDLLDPALLRPGRFDKMLYLGVSDTHDKQLKILEALTRKFTLHPSVSLHSVAQQLPFTYTGADFYALCSDAMLKAVTRQAASVDAKIRELEAQPRSRTGPISTAYFFDHHATPEDIAVMVTEEDFLAANRELVPSVSAGELSHYEQVRAMFEGPPEKDRQQQQQQQQRPSGLRAVSGSSVVSKGKGKAIAGGSGKGKGKAVATGSDDEYGSEGEVAVVNGKGKGKGKAVAGFQDGTASDDEGLY

SEQ ID NO: 28770 - protein, 348 aa, Acinetobacter sp. ADP1
MSLYLNRIPAMSNHQVALQFEDGVTRFIRIAQGETLSDAAYRQQINIPMDCREGACGTCRAFCESGNYDMPEDNYIEDALTPEEAQQGYVLACQCRPTSDAVFQIQASSEVCKTKIHHFEGTLARVENLSDSTITFDIQLDDGQPDIHFLAGQYVNVTLPGTTETRSYSFSSQPGNRLTGFVVRNVPQGKMSEYLSVQAKAGDKMSFTGPFGSFYLRDVKRPVLMLAGGTGIAPFLSMLQVLEQKGSEHPVRLVFGVTQDCDLVALEQLDALQQKLPWFEYRTVVAHAESQHERKGYVTGHIEYDWLNGGEVDVYLCGPVPMVEAVRSWLDTQGIQPANFLFEKFSAN

SEQ ID NO: 28771 - protein, 338 aa, Acinetobacter radioresistens
MSNHNVALQFEDGVTRFISVAQGETLSDAAYRQKINIPLDCRDGACGTCRAFCESGSYDMPEENYIEDALTPEEAEEGYILACQCRPTSDAVFQIQASSDVCKTEIHKFQGTLSRVENLSDSTITFDIELDEGQPDIHFLAGQYVNVEIPGTTETRSYSFSSKPGNRLTGFVVRNVPNGKMSEFLSKTVKPGDKMSFTGPFGSFYLRHINRPVLMLAGGTGIAPFMSMLQVLQEKGCEQPVRLVFGVTNDFDLVALEKLDELQEKFPWFEYCTVVANPESLHERKGYVSNHIDHDWLNSGDVDIYLCGPVPMVEAVRGWLDAEGVKPANFLFEKFSAN

SEQ ID NO: 28772 - protein, 742 aa, Halobacterium salinarum
MNEVQLEVAKAYPNDSGRGIARLDPDTLLHLKLSPGDIIDIEGAETTAAKVWRADRQDWNTDTIRIDGFTRQNAEVGIGERVKIRKADAEKADTLVLAPPEEASVQFGSDAAGMVKRQILKRPVVARDIVPVMSSTNHPFMRSPGQAIPLIAVETEPEGVCLVTEDTDVELREEPISGFERTGGGITYEDIGGLENEIQRVREMVELPMKHPQIFQKLGIEPPQGVLLHGPPGTGKTLLAKAVANETSASFFSIAGPEIISKYYGESEQQLREIFEDAKDDSPSIIFIDELDSIAPKREDVTGEVERRVVAQLLTMMDGLEGRGQVIVIAATNRVDAVDPALRRPGRFDREIEIGVPDEIGREEILKIHTRGMPLSDDVNLSTLADDTHGFVGADIESLSKEAAMRALRRYLPEIDLDEEDIPPSLIDRMIVKREDFKGALSEVEPSAMREVLVELPKITWDDVGGLTEAKNNVKESVEWPLNQPEKFTRMGVEPPAGVLLYGPPGTGKTLMAKAVANETNANFISVRGPQLLSKWVGESEKAIRQTFRKARQVAPTVIFFDELDSLAPGRGQTGGNNVSERVVNQLLTELDGLEEMEEVMVIAATNRPDIIDPALIRSGRFDRLVQVGQPGIEGREQILKIHTQDTPLAADVSLRELAERADGYVGSDLANIAREAAIEALRDDEDADDVGMAHFRAAMENVRPTITDDLMEYYDQVEDQFKGSQGPNVNSRQGSEHIGFQ

SEQ ID NO: 28773 - protein, 244 aa, Gentiana triflora
MGRGKVELKRIENKINRQVTFAKRRNGLLKKAYELSVLCDAEVALIIFSNRGKLYEFCSGSSTTETVERYQRYTYGLQDAGHPSDDPQNSYQEYVKLKARVEVLQGYHRNFLGEDLGSLSCKELEHLEHQVETSLKQVRSTKTSFMLDQVADLQRKEEMLAEENKALRGKLDERANQVPLRLSWEGRQQAPTGYNNVPAHTQGFFQPLGLNSTLQMGYNQGGAEGNYNVHAGNNINGFMPGFMN

SEQ ID NO: 28774 - protein, 507 aa, Saccharomyces cerevisiae
MTMTHQQDLKGVFTAKDLDFKPAGKITKKDLNTGVTKAEYAVRGAIPTRADELKEELKKNPEVLPFDDIINANIGNPQQLDQKPLTFTRQVLAILEYPEILRVGHNELASLNLFSRDALERAERLLNDIGGSIGAYSHSQGVPGIRQTVADFITRRDGGEPATPEDIYLTTGASSAATSLLSLLCKDSQTGLLIPIPQYPLYTASASLFNAQVLPYYLDEESNWSTNSDEIEKVVQDALKKQIRPSVLIVINPGNPTGAVLSEETIARICLIAAKYGITIISDEVYQENIFNDVKFHSMKKVLRKLQHLYPGKFDNVQLASLHSISKGFMDECGQRGGYMEIIGFSQEIRDALFKLMSISICSVVTGQAVVDLMVKPPQPGDESYEQDHDERLKIFHEMRTRANLLYETFKELEGIECQEPQGAMYLFPRLVLPKKALCESERLGIEPDEFYCTSLLESTGICTVPGSGFGQRPGTYHVRTTFLAPGTKWIQDWKEFHQDFFSKYRN

SEQ ID NO: 28775 - protein, 679 aa, Candida tropicalis
MALDKLDLYVIITLVVAVAAYFAKNQFLDQPQDTGFLNTDSGSNSRDVLSTLKKNNKNTLLLFGSQTGTAEDYANKLSRELHSRFGLKTMVADFADYDWDNFGDITEDILVFFIVATYGEGEPTDNADEFHTWLTEEADTLSTLKYTVFGLGNSTYEFFNAIGRKFDRLLSEKGGDRFAEYAEGDDGTGTLDEDFMAWKDNVFDALKNDLNFEEKELKYEPNVKLTERDDLSAADSQVSLGEPNKKYINSEGIDLTKGPFDHTHPYLARITETRELFSSKDRHCIHVEFDISESNLKYTTGDHLAIWPSNSDENIKQFAKCFGLEDKLDTVIELKALDSTYTIPFPTPITYGAVIRHHLEISGPVSRQFFLSIAGFAPDEETKKAFTRLGGDKQEFAAKVTRRKFNIADALLYSSNNAPWSDVPFEFLIENVPHLTPRYYSISSSSLSEKQLINVTAVVEAEEEADGRPVTGVVTNLLKNVEIVQNKTGEKPLVHYDLSGPRGKFNKFKLPVHVRRSNFKLPKNSTTPVILIGPGTGVAPLRGFVRERVQQVKNGVNVGKTLLFYGCRNSNEDFLYKQEWAEYASVLGENFEMFNAFSRQDPSKKVYVQDKILENSQLVHELLTEGAIIYVCGDASRMARDVQTTISKIVAKSREISEDKAAELVKSWKVQNRYQEDVW

SEQ ID NO: 28776 - protein, 470 aa, Rhodobacter sphaeroides f. sp. denitrificans
MSRLVVVSNRVPLPDENGNPPPGGLAVAVHVALRKNGGIWMGWSGRSTGEEEPQGLTTLEQDKISYVLTDLSQADLDEYYNGFANRVLWPIFHCRLDLAEYARQEMAGYFRVNRLFADRLVPMLEPDDVIWVHDYHLIPLAQELRKRGVRNRIGFFLHIPWPPADIVTALPVYEIIMRGLAAYDLVGFQTDYDLDNFVGCLRREGWGDWSTPGWLRAFDKEVAAAAFPIGIETGDFARLAAKTDGLDLVTDMQQSLHGSALIIGVDRLDYSKGIAARIDAFERYLMRNPDQAGKVTLLQVAPHSRSDVPEYLEMQGQVESHCGRVNGAHGTIEWVPIRYVNQSLTRPVLAGLYRLAKVGLVTPLRDGMNLVAKEYVASQDPADPGVLILSRFAGAARELDGAIFINPYDTEQTAGAIGRALSMPLDERIARWRRMMDHLESHDVLWWCRTFLAALNEAPEDNGALTRESD

SEQ ID NO: 28777 - protein, 334 aa, Nannochloris bacillaris
MLIYIKTPPIIIFLPYLIKNSYFLSLQVLEEDFAQDDGDGGPSTQEVALRASKLRKRPPVWQLIAKNIYMHRERKQLDEDEVMICQCKPIWGTDTTTIGCGENCLNRMLNIECVAKYCPCGERCTNRGFSKRAYAKLEIRRAGAKGFGLFAAEDVKAGQFIVEYVGEVLEEEEYARRKEFYIATGQRHYYFMNVGNGEVIDAARRGGLGRFINHSCEPNCETQKWVVRGELAIGLFALEDVPAGSVLTFDYNFERYGDKPMKCLCGSKACRGVIGGSQETAARMTETIVAPEEEEEQDLEPIMVTEKEADAAVSAILDRAVGLGWEDGFDARLQ

SEQ ID NO: 28778 - protein, 236 aa, Oryza sativa Japonica Group
MHKLDTMMMKNVRSAVGSADCVLVVVDACKMPEKIDEILEEGVGNKDTELPVLLVLNKKDLIKPGEIAKKLEWYQKFTNADDVIPISAKFGHGVDDIKEWILSKLPLGPAYYPKDIASEHPERFFVGEIVREKIFLQYRQEIPYACQVNVISYKSRPTAKDFIQVEILVEKESQRSIILGKDGKAIKMLATASRLDIEDFLQKKVYLEIMVKVKENWRQDELLLKRYGYGGEIQAL

SEQ ID NO: 28779 - protein, 188 aa, Clostridium tyrobutyricum
DTAFHQTMPAHAYRYALPKFLYTQHNVRRYGFHGTSHAYVSERGSELAGSYKHGGWLTAHLGNGSSTCAIWNGQSVDTSMGLTPLEGVVMGTRSGDVDPSIHSFLASNLGWDIYKIDKMLNSESGLLGLSDLSNDMRTLIEASEQGNEDATLAIEVFCYRLAKSLAALSCGLPRIDGLFFTGGIGENS

SEQ ID NO: 28780 - protein, 548 aa, Lactococcus lactis subsp. lactis
MYTVGDYLLDRLHELGIEEIFGVPGDYNLQFLDQIISHKDMKWVGNANELNASYMADGYARTKKAAAFLTTFGVGELSAVNGLAGSYAENLPVVEIVGSPTSKVQNEGKFVHHTLADGDFKHFMKMHEPVTAARTLLTAENATVEIDRVLSALLKERKPVYINLPVDVAAAKAEKPSLPLKKENSTSNTSDQEILNKIQESLKNAKKPIVITGHEIISFGLEKTVTQFISKTKLPITTLNFGKSSVDEALPSFLGIYNGTLSEPNLKEFVESADFILMLGVKLTDSSTGAFTHHLNENKMISLNIDEGKIFNERIQNFDFESLISSLLDLSEIEYKGKYIDKKQEDFVPSNALLSQDRLWQAVENLTQSNETIVAEQGTSFFGASSIFLKSKSHFIGQPLWGSIGYTFPAALGSQIADKESRHLLFIGDGSLQLTVQELGLAIREKINPICFIINNDGYTVEREIHGPNQSYNDIPMWNYSKLPESFGATEDRVVSKIVRTENEFVSVMKEAQADPNRMYWIELILAKEGAPKVLKKMGKLFAEQNKS

SEQ ID NO: 28781 - protein, 713 aa, Gossypium hirsutum
MDCGSGGGGLGASGSGGDHDSSDLSRRKKPYHRHTAHQIQRLESMFKECPHPDEKQRLQLSRELGLAPRQIKFWFQNRRTQMKAQHERADNSALRAENDKIRCENIAIREALKNVICPSCGGPPANEDSYFDDQKMRMENAQLKEELDRVSSIAAKYIGRPISQLPPVQPVHISSLDFRMASFDGYGVGAGPSLDLDLLPGSSSSMPNLPFQPVVISDIDKSLMSDIAANAMEELLRLLQTNEPLWIKSTNDGKDALNLESYERIFPKPNNTHFKSPNIRVEASRDSGVVIMNGLALVDMFMDSNKWLELFPTIVSIAKTIEVISPGMLGTHRCSLQLMYEELQVLSPLVPTREFYTLRYCQQIEQGLWAIVNVSYDLPQFASQCRSHRLPSGCLIQDMPNGYSKVTWLERVEIEDKTPIHRLYRDLVHSGSAFGAERWLTTLQRMCEWFACLRVSSTSTRDLGGVIPSPEGRRSMMKLAQRMVNNFCTSVGTSNSHRSTTLSGSNEVGVRVTVHKSSDPGQPNGIVLSAATTFWLPVSPQNVFNFFKDERTRPQWDVLSNGNAVQEVAHIANGSHPGNCISVLRAFNTSHNNMLILQESCIDSSGSLVVYCPVDLPAINVAMSGEDPSYIPLLPSGFTITPDGHLEQGDGASTSSSTGHGRSSGGSLITVAFQILVSSLPSAKLNLDSVTIVNNLIANTVQQIKAALNCPSS

SEQ ID NO: 28782 - protein, 540 aa, Symbiobacterium thermophilum IAM 14863
MKILVTEAISETGISLLRDEHEVDVRKVTSEELLEIIPEYDALITRSETKVTAEVLARGTRLKVVGRAGVGVDNIDVAAATERGVVVVNVPGANTYSTAEHAFGLLIAVARNIPQAHHALAREGRWDRMSFVGTELHGKTLGIIGLGRIGSEVAVRARAFGMRVLAYDPYVPHSRAEHLGVTLVPSLRGLLPEVDFLTIHAAKTPESARLIGAAELALMKPTARIVNCARGGMVDEEALYRALKEGRLAGAALDVFAAEPCTDSPLFGLPNVVVTPHLSASTAEAQDANGRYIAQYVLRALRGELVPEAVNLPQIPRDGVQVVTDHLPLAETLGSFLAQAFPGHADRITVAYSGELAKHPTALLTNTVLKGYLATQLGEHVNYINAPALARRRGIAVNESKSLTHAPLGENGTLSPASSLITVRSEGPQGAHEVTGMLRRDGGMRFVAVDGLHIDMAPSRHMLVSQHRDQPGMVGRFGMALAARDINIAGLHLGRHQPRGMALMLLQIDEPAPPDLVAELREAMAVDTVQAVTLPLGRQP

SEQ ID NO: 28783 - protein, 293 aa, Symbiobacterium thermophilum IAM 14863
MSPRSLPGFPHIERLADFMAASDDYATARAVLWGIGQDFTTSYRPGTRFGPGRIREASYGIEEFSYHSRMSLTDKNFFDLGDVAVVFGDVQESLRRAEEVARRLFADGKLSLMMGGEHLVTLPVVKAAYEKYGDDLVLLQFDAHADLREDYLGNPLSHATVMRRCLDFLPAQNLYQFGIRSGTREEYEFGTSRCHLFPHQVLEPLRQVIPTLGDRPVYVTIDIDVMDPAFAPGTGTPEPGGITSREMIDAVLAMRGLNVVGLDVVEVAPGLDQTDRTPVLAAKLIREAILAFA

SEQ ID NO: 28784 - protein, 419 aa, Symbiobacterium thermophilum IAM 14863
MNLDGWTVGIDSAWTMVAASLVFFMQAGFAMVEAGFTRSKNAVNIVLKNLMDFVVASIAFWAVGFGLMFGADAGGLVGLGGFGSPESRFLHLGLAIPFFVFLWFQTTFAGTAATIVSGAMAERTKFSAYLLFSAAITLLVYPVGGHWIWGGGWLAQLGFVDFAGSTVVHSVGAWAALAGLLLLGPRIDRYDKQGRPRKIVGHNLVLAALGVFILWFGWFGFNPGSTLSATDPNIGRIAVTTNLGAAAGALAALLSAYLRTRTWEAEAALNGALAGLVGITAGCAFVSPAASILIGAVAGMLLAPGTALLERFRIDDAVGAIPVHGFAGLWGTLAVGLFHETQGLLVGGGPQLLAIQALGAAAVFAYAFAVCLLIFATIKATVGLRVSQEEELSGLDTEHGARAYPDFQPAAAHGYTGDD

SEQ ID NO: 28785 - protein, 1552 aa, Symbiobacterium thermophilum IAM 14863
MRIVRSEREIRRYLAENEHDACALMAAVRKDGHPTHAVVADALAALDRMVHRSGDVDGEGDGCGVQIDIPRRLWASILREAGQDPRLAEAPQFAVAHIFIPRREAYWSGSLKEQVCRRLAADGFRLLAQRSGAVNREALGTRAREDEPEFWQVAVLAPTADRQAAARDCFGLTLALEAETDLHICSFSPDTAVYKVRGNAAVLAAYYPDLRDPRCETRAVLGHNRYSTNTSTAFERVQPFSVLGHNGEINTIRALREQAPLVGIPLPRGGSDSQDLNRTLEGLIHLHGITLFEAVEMLFPPIIGEIKQMPPALQDLYMYYRQAWGPFAQGPAAIAARSGDALVASVDALGLRPFWLLETEESLLFSSEPGIVSSLDLVRDPHPLAPGERVGVLLPQGRSPELLTYTELQDRVLQLSRQRFPDPVNHRRFIAVGGPAETDRGPLPEATGPTATEPGRAAAGVERERLMAAMGWSVEDLEQVAAMARTGAEPIGSLGYDGPLACLAETRQNLADYFKESVAVVTNPALDREREIEHFSTRTVLGVRPPIRMRGEDDARSLAATRVELGIPVLLGGERGEPLVSRAVGRRLARTAGTWLLDDLLAAFEAGAPGAVRRIAVWFRPTETLAQALSRLSAAAVDAVRTGAQVLLLDDGDAFAGDRLWIDPHLSLSAVDRALHAADGADGRQRLRRRCSLVLRSGALRSLHDVALALGLGADAVNPYLMLEAAAQAAPAPEEGLANLLAALRKGMEKVISTLGIHELRGYARCFSHIGLRPEVAAYFAAEGFVGSEQGGLSLARLKADAHERYQVAAGQCSGRLPRTPRFWPRLWKAAGEAAADSSKYADYLARLRKQEQESPVCLRHLLDFRPHGRKRPLTAEVDTTVEGYRYPITISGMSFGSQGETAFRAYAEAARRLDIVCMNGEGGEISDMVGRYWRWRGQQVASGRFGVHAEMLNGSRFIEIKIGQGAKPGEGGHLPGAKVSAKVARARNATPGVDLISPSNNHDIYSIEDLAQLVEELRTVNPLAKIVVKMPVVPGIGTIAVGVAKAGADVVALCGYDGGTGAARQHALRHAGLPVEIGVREAHLALVASGIRDRVEIWADSGMRSGLDVVKMLLLGANRVGFATLAMVAVGCTVCRGCHLDTCHVGIATQIESLAEARAKGLKSFVPRHYEEAVQRLVTLFTCVGEEVRQLTAQLGFRRTQDLVGRAELLWQARGLGRVDLAELVAPAPWEAPAVPAAERAPVRRYARSELTREIAAVAAGRARAGEPQVCHRQAGVTAGDRIIGTSLAGDVARARVRPAVEGARLPDLPPDFAATIELGEGSIAGNGLAAFSTGVLSVRVQGGAQDGVGKGMLGGRVVILKNRNQRGQWVNGSVGKSFAYGAQRGLFVVQGDADARCGIRLSGADLILGGRIREPLRDDLGSIGTRANLKGFAFEYMTQGRVVVLGDPGPWICSGMTGGVVYVRLQPELGLDREALRRRIAKGARVQLTPVGEQGEKDLTELLSAYHRILLEAQQPEEAAEVMGLMLDCGRHFIAIRPVTRQVDPGVTTE

SEQ ID NO: 28786 - protein, 614 aa, Symbiobacterium thermophilum IAM 14863
MCGIAGWADWKRDLSREGPVLETMIAPLADRGPDAGGIWCSGHCAFGHRRLAVVDLVGGAQPMVRSRGDRTYVLVYNGQLYNTQELKEELTARGHAFSTQSDTEVLLVAYMEWGPECTRRLNGIYAFAVWDEAGQQLFLARDRFGVKPLFYKTMGSAILFGSELKALLAHPLVQPEVDAEGLAEVLYLGPSRTPGHGVFRGVREVLPGHWLLFDRAGVRTQPYWQLESRPHTDGPAETAERVRELLREAVRRQLVADVPVATLLSGGLDSSAITAFAAEAFRAQGRGPLHTWSIDYAENDRHFRAHAFQPDPDSAYAGTMAESLGTVHHEVVIDTPQLVDALEKAALIRDLPGMADVDAALFLFCREIKKGATVVLSGECADEVFGGYPWFHRPGPETGRTFPWIRSLEARTALLQPGVTGPIRAEDYVAQRYSNTVARVPRLPGEEPEEARIRELFYLNLAWFMATLLDRNDRMSMAVGLEARVPFCDHLLVEYVWNIPWRLKTYGGREKGILREALRGVLPEAVRTRRKSPFPKTHHPEYFRAVRDRVLALLDDPACRLHKIVRADRVRALARQDHEATDLPWFGQLMSGPQYFAWLIQLEAWLRHYKVVLV

SEQ ID NO: 28787 - protein, 506 aa, Symbiobacterium thermophilum IAM 14863
MSGIAGILGKPDKARIVRMLEQQAHRGPDGRGIWTATAGFGLGHVRLATVDVAGGGQPLSNEDGSLWLAMTGAIYNHGALRRELEGRHAFRTQSDAEVVVHLFEEYGPACVERLDGMFAIAIWGEEVGLFLARDPLGIQPLYWGEDEEGNVLFASEIKALVGETRFVREFPPGHRWRAGEPLEPYERLPAHTGELADPDQIVLALDRLLHAAVRKQLAADVPVGCLLSGGLDSSLVTAIARQHAEGELHTFAVGLEGSADLEQARMVAGELGTIHHERVLTEKEVTAVLPRVVDALESCDPALVRSAVATYYVAELAAGHVKVVLSGEGADELFAGYDYLAEFERDAGALGAELYEITAAMHNCNLQRVDRMTQVHGVEARMPFADQAVVDFAFRIHPRLKRRDGESKWILRRVAEQYLPPAIVWREKQKFAIGSGIAPLLEHYAAKAVPDAAFRRARSPKGVPFASKEEFLYWSLFRERYGREDVLALMGRSRSLNQGQRWVGAL

SEQ ID NO: 28788 - protein, 104 aa, Symbiobacterium thermophilum IAM 14863
MTYAIVETGGKQYRVQEGDTLRVEKLTAGEGETVVFDKVLAISRDGKVTVGTPYIEGAKVTAKVAAHGKGPKIIVFKYRNKTNYRRKTGHRQPFTAITIESIEG

SEQ ID NO: 28789 - protein, 425 aa, Symbiobacterium thermophilum IAM 14863
MFVDVARIYVKGGDGGRGSNSVRREKYVPQGGPWGGDGGRGGDVVFVVDPGLNTLVDFKYQKHFKAERGEHGGPKGMHGRKGEDLVIKVPPGTVVKDDDTGEVLFDLVEPGQRAVVARGGRGGRGNMRFATPTNKCPTFYEKGEPGEERWLLLELKVVADVGLVGFPNAGKSTFLSAVSAARPKIANYPFTTLTPVLGVVDLGEGRSFVIADIPGLIEGAHQGVGLGHEFLRHVERTKVLIHVLDGAGTEGRDPLSDFDVIHNELRAYNPELAARPTLVAFNKMDLPDARENLPRVREALEKRGYRVFPISGATREGFRPLLEAAYDLIRQWVPPEPAAPEAEMVYRPKEEGWRIYKYGGVWHVEGKEIERLVAMTMWENDEAVARFLRILRLKGVEQALREAGAEDGDTVRVCDIEFELMADPV

SEQ ID NO: 28790 - protein, 275 aa, Symbiobacterium thermophilum IAM 14863
MKRRWGATVAALLCAAVLAGCGGRSSAPAGGGAGGGASDLPAQVQKIRDAGVLRVGVKEDVPKFGYFDPAKNAHEGLEIDLARRIAKEIFGDESKVQFTGVNAKTRGPALDNGEIDLVIATFTITEERKKSWNFSDPYFTDYVGFLVLADSGIQSWKDLDGKVIGVAQSASTRAALTEQAEKDGIKVEFMEFATYPEIKAALDSRRIDAFSVDQSILWGYKDDKNVMLPDKFAPQEYGIATKLSNTELAEFVNNILKGMKESGELDQLYEKWGLK

SEQ ID NO: 28791 - protein, 612 aa, Symbiobacterium thermophilum IAM 14863
MAKVIGIDLGTTNSVVAVMDGSEPTVLENREGDRTTPSVVAFTKTGERLVGKVAKRQAITNPDRTIISIKRHMGSDYKVRIDDKAYTPQEISAMILSKLKADAEEKLGEKITQAVITVPAYFTDAQRQATKDAGTIAGLEVLRIINEPTAAALAYGLDKGEDQRILVFDLGGGTFDVSILELGGGTFQVIATAGNNKLGGDDFDERIVNYLADRFQREHGIDLRKDKQALQRLREAAEKAKIELSSVTTTNINLPFISMTADGPVHMDETLTRAKFEELTADLVEATMGPTRQALQDAGLEPGEIDKVLLVGGSTRIPAVQEAVRRFFGKEPYKGINPDEVVAMGAAIQAAVIKGDVKDVLLLDVTPLSLGIETLGGVFTKLIERNTTIPTRKSQIFSTAADGQTQVEIHVLQGEREMAAYNKTLGRFILDGIPPAPRGVPKIEVTFDIDVNGIVHVSAKDLGTGKEQKITIQSQTSMSKEEIERAIKEAEAMAAEDKKRREEAEIRNNADAAVYNAEKLIKESEGKGIDPSLIDAVKGAIEPVKEALKGTDVNAVKQATEKLTEAVYKLSSAIYEKTGSAGTGAGSQAGSAAGSGDGQSMDAEFKVKDEDK

SEQ ID NO: 28792 - protein, 316 aa, Symbiobacterium thermophilum IAM 14863
MNGAPFRSGFCSIVGRPNVGKSTLLNAFVAAKLAIMSDKPQTTRNRILGVYNRPDAQVVFLDTPGIHKPRHRLGEYMNKVAIGTIPEVDVVLFVVDGSVPEPGEGDRYVADVVARSGRPAILVVNKMDRVKRGDWYAVMDAYKALAQPEARSENPDPGAPTIEWIDIVPVSALEHKNIDALLDLIVQQMEEGPKYYPEDMITDQPERFVIAEFIREKILQLTRDEVPHSVAVEVEELQRRPTGTVYVSASIYVERESQKGIIIGKRGAMLKEIGARARQDIEQMLGSKIYLELFVKVKEDWRNKESVLRSLGYREE

SEQ ID NO: 28793 - protein, 597 aa, Symbiobacterium thermophilum IAM 14863
MRVFARLRRFFVPYIGWGLGSVLAMACLTAVGLVRPWLLEQLIDRVIREQRFAELPYWTAAVLAVALVRAVFNFLRQYLGHSFGQNATLDLRNALYDKLQYLHFKYYDNAYTGDLMSRVTADVEAFRMFLSFGWVHLMDILFMTLFSLVVMLSMSVRLTLVTLLAMPFLLAVVLRFERRVHPAFRRVREALAGLSTAAQENLNGMRTVKSFAREDFEVRKFAAHNQEYLEANLATTGLWARYFPVMELLSNLALTLMLAYGGLLVLRGELSLGELVAFNSLIWYWIWPMREVGYRINELTQAIASGERLLEVLEHPVAVQSPPEPVRLPEMKGHVRFEGVWFQYDSPRPGTGEISPHPALADIHLDAPPGSVIGLIGATGSGKSTLVALIPRFYDVTRGRVTIDGIDVRDLDLDDLRRQIGIVQQETFLWSASIRENIAYGRRTATMEEIIAAAKLARAHDFIMETPAGYDTIIGERGLGLSGGQRQRIAIARAILNNPRILILDDATASVDMETEHEIQVALQNAMRGRTTFIIAHRLSSVKHADEILVLDQGRIVERGTHEELLARGGVYRAIYDIQFRDFEEQRAAEAGKGGSR

SEQ ID NO: 28794 - protein, 380 aa, Symbiobacterium thermophilum IAM 14863
MERPIYLDYNATTPVDPAVVEAMLPYLTDHYGNPHSTHRLGAVAAAAVATAREQVAGLIGASAGEIVFTSCASESINLAVKGVAFARGRGHIITSAIEHPATLEACRYLERHFGFALTVLPADEQGRIDPDAVRRALRPDTILITLLHAQNETGVIQPVEEVGRIAREAGVLFHVDAAQSCGKIPVDVRAIGCDLLTVAGHKLYAPKGVGALYVRSGVVLHPLIHGADYEGGRRAGTENVPYLVALGRAAEIAEAKLAIGEGRRLAELRDRLQQRLAAALPIRVTGLGAPRLPNTLHLLVEGLVGNDLLDAAPEVAASTGSACHAGVSEPSAVLLAMGLAPEEALGSVRLSLGRYTTAEEVDAAADALIAAARRLRPAAR

SEQ ID NO: 28795 - protein, 404 aa, Symbiobacterium thermophilum IAM 14863
MAEAVIVDAVRTPIGRYGGALRDVRPDDLAAVVIRALLQRNPAVSPGSIDDVYLGCANQAGEDNRNVARMAALLAGLPVTVPGVTVNRLCGSGLEAVAQAARAVWCGEGEVLVAGGTESMTRAPFVMAKPAVPWARQVEVYDTTLGWRFVNPRLAERYPPISLGETAERVAERWNVTREDQDRFAWQSQMRCAAAVREGRFDAEIVPVPVPGEDGRTELVVRDEHPRPDITLERLARLRPVFRENGTVTAGNASGINDGASALLIMSGKRAAALGLVPMARIVATAVVGVDPSIMGMGPVPATRKALQRAGLTVDQIDLVELNEAFAAQALACIRELGLDPARVNVNGGAIALGHPLGCSGARILTTLVHEMVRRGSRYGLATMCIGVGQGIAMIVEAIRPKSA

SEQ ID NO: 28796 - protein, 393 aa, Symbiobacterium thermophilum IAM 14863
MEDVLILGGARTPFGTFGGALRDISAVDLGVAAARAALERTGVPAAAVDEVVVGNVIHTGKDGPYLARHIALYAGVPVETPALTVNRLCGSGLQAAVSAAHTIRAGEASVALVGGVESMSQAPYHLRGRFGAGIGAPELGDALWETLTDSYCGCGMAITAENLAERYGISREEQDRFALLSQQRAAAARERLAEEIVPVELPARRGAPSRLEQDEHPRPDTTYEALARLPARFKEGGTVTAGNASGINDGAAMLVLASERRAGAEGWRPLGRLVSWAVAGVDPRYMGMGPVPASRKALERAGLTLEEMDLVEVNEAFAAQYLAVEKELELDRERTNVNGGAIALGHPVGASGARLLLTLLLELRRRGGRYGLATLCIGGGQGIAAVVEAFPAS

SEQ ID NO: 28797 - protein, 235 aa, Symbiobacterium thermophilum IAM 14863
MFPVPERILVVDDEPSILELVAYNLRRAGFEVLTADNGEDGLRIAREEEIDLVILDVMLPGIDGFEVLRALRRHSELPVLMLTARGEEIDRVVGFEIGADDYVTKPFSPRELTGRVKAILRRARRSAEPQDQDTLVLGPLTINFASYEVLRDGRRVDLTPTEFQILGVLARSPGRVFTRDELVDRVMGPDFYGDVRTVDVHIRHLRAKLEENPSEPRLIETVRGVGYRFAGPRRR

SEQ ID NO: 28798 - protein, 392 aa, Symbiobacterium thermophilum IAM 14863
MREAVIVSAVRTPIGSLGGALSTVKSYELGAAAIAEALRRAGIRGEQVDEVIIGQVLEAGEGQHPARIASLKAGIPYTVPVTGVNKVCGSGLKAVALAAQAIMLGDADVVVAGGQESMSGAPYLVPRARFGYRMGHGQLVDSMIADALTCGWEHVHMGLTAENIAEQFGISREDQDAFAAASQQKAEAAIKAGRFREEIVPVTVPGRKGDTVVDADEHPRFGTTVEALAKLRPAFKEGGTVTAGNASGINDGAAAVVVMSAEKAASLGVRPMAVIRSYAAAGVEPRIMGTGPIPATRKALARAGLTIDRLDLIEANEAFAAQALAVVRGLELDPGKVNVNGGAIALGHPVGASGARILVTLLYEMQRRRSRYGLATLCIGGGQGIAMVVERA

SEQ ID NO: 28799 - protein, 294 aa, Symbiobacterium thermophilum IAM 14863
MMANLGFIGLGRMGRHMARNLIRAGHTVTLYNRSQAVVDELVAEGGRRAAGPAEVARDARVLFTCLTTPDVVESILRQALEGAQPGDIFVDHSTIGVRDAKRIAAMCAEKGVQFIDAPVSGGPWGAEAGTLTIMCGGDRAAFEAVLPYLQVEGKAIHHLGPVGAGSVAKLCNNLLVGIHTAAMAEAFVLGTKAGVDPKALYEIISNATGHSAQIARNIPQFVFPGKFDAAFSIDHLHKDVALAVELGKDENVRMVLGAVTQQLLAEARALGYGGSDQAALIRPLEELAGVKVRA

SEQ ID NO: 28800 - protein, 551 aa, Symbiobacterium thermophilum IAM 14863
MKGEREMSFAHAGKLVARALRNEGVEVVFTLCGGHVMSIYDGCLDEGIRVVDVRHEQTAAFAADAWSRLTGRPGVAILTAGPGVTNAVTGIANAYRAQSPMVVIGGQGPRSLAGKGALQEMDVLSVIRPITKGQVSISDPARIPEIVSWAFRTAMSGVPGPVYLEMPLDLLFAPWEDGGSRLPAPYPGRPAMPGDESRVAAAAELLRAAERPVVLIGSQVRWSPHWQAAREFAEKVGAPVYVSGMARGLLPPRWARSRKAALAEADVALVFGTPLDFRLGYGGSPVWNEQCRLIQVDLDPAEPGRNRDAAVAIPGDSGTVMMQLLALGDLGAGRPARRAWLERLEAEEEKRLARMQPDLTSEAMPVNPLRLCAEIDRALPEDAILIGDGGDFVATAANVVRVRRYPAGWMDPGPLGTLGIGMGFAMAARLAHPDVPVVLLLGDGTAGLNLMEVEAAVRQNLPFVVVVGNDAGWTQIRRGQVEMFGSERAPATALSYTRYERVAEALGGHGIWVERPEEIGPALRQALAADRLTVINVKMGGSDFRAGAISV

SEQ ID NO: 28801 - protein, 397 aa, Symbiobacterium thermophilum IAM 14863
MRLSARARALTPSPTMAIDAMSKQMVAEGIDVVNFSVGEPDFDTPESIKAAGIAAIQQGETKYTPAAGTLELRKAICEKLERDNGLQYRPEEIVVSNGGKQSLYNAYQVLLDPGEEVIIQAPYWVSYPEIVRLAGGVPVVVETDESTGFRLTADMIREKLTNRTRVINLNSPSNPTGAVLSRRELEEIAALAVEHDLMIVTDEIYEKLLYDGAEHVSIASLGEEVKRRTITVNGLSKAYAMTGWRMGYTASERIYAKAMADLQSQSTSGPSSISQAAAVAALRGSQESVEQMRQEFDRRRRHMLERLNRLPGFSVKVAPAGAFYLFPNVSALFGETIAGRKITSSDDLAEVILEQAHVAVVPGTGFGAPHHIRFSYATSMERIDEGLDRIARLLARG

SEQ ID NO: 28802 - protein, 366 aa, Symbiobacterium thermophilum IAM 14863
MSKVIVAPGKYIQGPGELDRLAEHTGQLGAHAFVIADEFVMNLTGDRVTASYAKAGAAVTMERFQGEITQAEIERLTARCKESQADVVVGIGGGKTLDSAKAVAYYCGNLPAVVVPTVASTDAPCSALSVIYKEDGSFERYLFLPSNPAVVVVDTAIIANAPVRLLVAGMGDALATYFEARAAQRAHKLNIVGGHGTQAAMALARLCYDTLLQEGIKAKAAAEAHVITEALERIVEANTYLSGLGFESCGLAAAHAIHNGLSALEETHGAYHGEKVAFGTLAQLVLENAPLDEIEEVIEFCLNVGLPVTLADLGVHTVREEQIRRVAELSCAEGETIFNMPFEVTPEKVYAAILTADRLGHLYKGG

SEQ ID NO: 28803 - protein, 406 aa, Symbiobacterium thermophilum IAM 14863
MRIIVQKFGGTSVATPEGREAVVRRVRQALDDGYATVVVVSAMGRQGDPYATDTLIQLAQSAGPDLAPREMDLLLSCGEIISSVLMAATLTAAGIPAVALTGGQAGIQTDENYGNAQIVKVDPAPVLSRLKEGLVVVVAGFQGVNAAGEVTTLGRGGSDTTAAALGGALRAEVVEIYTDVDGVKTADPRLVAEARTLSVTTYDEIAQMAHYGAKVVHPRAVEIAMQHRVPIRVRSTFSDNPGTLITYSAEAGVIWSEPFSDRVVTAVTHVVGLAQVVVKTGRDWATPRLFRRLANAGISVDLISVSMESSAFSIPESRAAQAEMILTELGLVDLQVRHGCAKVTVVGSGMRGRPGVMATVAEALYAAEVPIWQTADSHVTISCLIPAADVQRAVQALHDAFELGRI

SEQ ID NO: 28804 - protein, 526 aa, Symbiobacterium thermophilum IAM 14863
MTETKLTFRDLALSEKVLKALDDMGFEEPSPIQAQAIPALLQGKDVIGQAQTGTGKTAAFGVPIVERLVPGQRAVQALVLTPTRELAIQVAEEITKIGRHARVKTIAIYGGQSIERQIRSLRFGVDVVIGTPGRILDHLGRSTLDLSQVRMVVLDEADEMLDMGFIEDIEKILQNTPAERQTLLFSATMPPEIRRLAGRYMRDPITISVTPQQLTVPQIDQYFCEVRPSFKTEALTRILDIENVERGICFCRTKKGVDELVEALQARGYQAEGIHGDMNQAQRNRVMSRFKEGYIELLVATDVAARGLDISDVTHVFNYDIPQDPESYVHRIGRTGRAGRTGTAITLVTPREFPQLRLIERVIKARLQRRPVPTLSDVAEKQREQLKERLIKILEEDKLGEFRELAEDLLAEYDPSDLVAAALKLVSGEGKPAQQAQMEFGDTGAEAGMVRLFLNVGRAQAIQPADIVRTIAQEANIPGSSIGIINIYDRFTFVEVPKEVAAQVMQAMQGATIRGYQVNMEPAKPR

SEQ ID NO: 28805 - protein, 421 aa, Symbiobacterium thermophilum IAM 14863
MGLVVQKFGGSSVATAEKYRRVARRIAWKKRQGNDVVVVVSAPGDMTDDLIERARSITDRPSAREMDVLLATGEQISIALLTMALHELGVDAVSLTGPQAGFQTDDHHRAARIVNIDTARIRRELAAGRVVIVAGFQGMDDHGDITTLGRGGSDASAIALAAYLSADQCQIFTDVDGVYSADPRIVPTARRLDEISYDEVLELAAAGAQVMQLRSVELAKQYGVEFEVLSSLAPLPDEGGEERGTKVVAKLSPNNHRIVSGVAVDSKVAHITLLGLPDRPGVAYRAFKALGDARINLDMIVQSAGTGCGNGPTADISFTCARDDLETALEVCNRLLPEFPGARVVYDTDVAKVSIVGSGVASNYGVAARMFEALAEKDINIELITGSEIKISCLVRASRAMEAVRAVHDKFELGDVAPIVQ

SEQ ID NO: 28806 - protein, 372 aa, Symbiobacterium thermophilum IAM 14863
MRVGVVRELKAYENRVAMTPAGVMAMVRAGHEVYVEHDAGRGSGFDDSEYVAAGARILPSNEDVWATADMIVKVKEPLPPEYDLMREGQIIFTYLHLAAEPELTRKLIERKSIAIAYETVQPADRSLPLLTPMSEVAGRMAVQIGAHYLEKAHGGRGVLLGGVPGVAPGRVAIIGGGTVGTNAAKIALGMGAHVTILDINADRLRYLDDIFGSRVETRISNEFEIANAVAQADLVIGAVLIPGAKAPKLVTAEMVKRMAPGSVIVDVAIDQGGSVETIDRVTTHQDPVYERFGVVHYAVANIPGAVPRTSTWALTNVTLPYALKLANLGWKEALRQDPALAKGANVVSGHVTYPAVAEAHGLEYVELDNVLR

SEQ ID NO: 28807 - protein, 361 aa, Symbiobacterium thermophilum IAM 14863
MQQRLLIINPGSTSTKIAVYDDDSPLFAETLRHSAADLACFRDVAAQFPFRRDLILEALDAHGVSLSSLTAVVGRGGLLRPVRGGTYRVDAAMLAELSRAAHGEHASNLGALLAHEIAQAAGGVPAFIVDPVVVDELEPVARLTGLPEMPRRSVFHALNQKAVARRAAADLGRAYTEVNLVVVHLGGGISVGAHRRGRVVDVNNALDGEGPMAPERAGTVPSLGLVHLAFSWQHTLREVGRMLVGRGGLVAHVGTNDARRVEERIAAGDEAARVAYRAMAYQVAKEVGRAAVALGGQVDRIVLTGGLAHSEMLTGWIAEQVEWIAPVAVYPGEDEMAALAAGALRVLRGEEPAQVYGEAGE

SEQ ID NO: 28808 - protein, 358 aa, Symbiobacterium thermophilum IAM 14863
MSAEGFRILVINPTATATRIALFDDDEERLAADLAHSPDELARFERVWDQYLYRKDRITERLQAEGIRLESLHAVVGRGGLLKPVPGGVYRVSGAMLDDLRAGVQGEHASNLGGILAYGIAHALGIPAFVVDPVSTDEMWPEGHLTGIPQIRRTSLAHALNMRWVGRRAAAALGKTYDESNLVMAHLGAGISVAAHRQGRMVDATNALEDGPFGPERAGRLPAGDLVRLCFSGRYTERELIRRLTSGGGLVAHLGTRDWREVEKRIAAGDGEARLVYQAMAYQVAKEIGAMAVALRARADAVVLTGDLAHSRLLTDWITGWVDWIAPVLRFPGSEENRALAAGALRVLRGEEEARTYA

SEQ ID NO: 28809 - protein, 261 aa, Symbiobacterium thermophilum IAM 14863
MTTGVPLTVRNLHVSIDDKEILKGVDLEVKPGEIHAIMGPNGAGKTTLGFALMGHPRYEVTEGTVMLGDQNVLEMEVSDRAKAGLFLAFQYPFEVSGVTVANFLHQAVNAVRGEEISVWDFQEKLAEKMELLEMDESFAGRYLNEGFSGGEKKRNEMLQMLLLEPKIAILDETDSGLDIDALKVVAKAVNSLRGPNFGAIVITHYHRILDHIKPDVVHVLMDGRIVKTGGPELALEIEKKGYDWIKAELGLADEAAEAGVK

SEQ ID NO: 28810 - protein, 570 aa, Symbiobacterium thermophilum IAM 14863
MYTLAFGVFVVVLWLMESAGLIGSRAIGWTFMVLTIGIYATIGILSRTGNLDEYYVAGRTVPGIFNGMATASDWMSAASYISLAGTLYVLGQEGLSYTVGWTGGYVLLAMFLAPYIRKLGAYTIPDFVGVRYPGAFPRVVAVIAAIIVSGTYLIAQVSGVGIIMSRFLGIDFRVACFVGLLGILVCSMLGGMKAVTWTQVAQYIILIIAFIVPTVFVSQKITGIPFPQLMYGKALTDVAATEAALGIAKDYLTPFNDWTRAQFLALITCLMCGTAGLPHVIVRFYTTPNVRETRFSVGWALFFIGLMYITIPAYAAFARWEVLHNVVGQPIDALPGWVEAWTKTGLLTIDDANGNGLVEYAEFGLNSDLVVLAMPEIAGLPYVVAGLVAAGGLAAALSTADGLLMVVATAISHDIYFKLINRSASDRTRLTISRVMLVTVAAIAAYIASLRLSIISDIVAWAFSLAAASFFPILVLGIFWKRINTAGAITGMIAGLVTTLGYIIWSYNTGQSIGGILPNAAGIFGMPLNFLLTIAISLATAPPRQEIQALVDRLRFPKHLHDAAAPATGD

SEQ ID NO: 28811 - protein, 402 aa, Symbiobacterium thermophilum IAM 14863
MSEKGSRTAMRTVYCDHAATTRCHPEVARLVYEFLTEHYGNPSSIHAVGRRARKGVEEARAQVAALIGAQPGEIFFTSGGTEADNWALRGAMAANRAKGRHLIISPFEHHAVLDTAEALVREGYEVTLVDVEPGTGIIRPEALLAAMRPDTVLISIMAVNNEIGTVQDIAALCAAAKAKDPDVIFHTDAVQAAGYVPLDVKALGVDLLSISSHKIYGPKGVGALYVRKGFRFGPGLTTGGGQERKMRAGTENVPGIVGFGLAAEIAARELERRAAHAREMRDRFLRGVLAIEGVRLNGVDPFVHPELRHPGNANVSVDGIEGEALLLRLDMAGVYASSGSACTSGSLQPSHVLLAVGCSREEAQSSLRFSFGEENTAEDVDYAVEQFVKSVEFLRKLAAPGR

SEQ ID NO: 28812 - protein, 398 aa, Symbiobacterium thermophilum IAM 14863
MKILVLNCGSSSIKYQLLDMETESVLAIGKVERVGMEDAIFEYKGAGEKIKEIGTILDHTAGVRKVLKALTDPVHGVIQAPEEIAAVGHRVVHGGEAFVKSVIITDEVKRTLRELFDLAPLHNPANLTGILAAEAALPHAPGVAVFDTAFHATMPRKAFLYALPYAMYKGHKVRRYGFHGTSHKYVSQRAADLLGRPLEEVNLITCHLGNGSSVTAVQGGKSVDTSMGFTPLAGLIMGTRAGDLDPGVIPYIMAREEIGISEVNSMLNKHSGILGISGISSDMRQIEEEMEKGDPRAVETFEMMEYRLRKYIGAYAAVLGRVDGIVFTGGIGENSPLFRKAVCQNLGFLGVTFDEEANNCRGQERIISGPDSKVAVMVIPTNEELMIARETAELIRNR

SEQ ID NO: 28813 - protein, 599 aa, Symbiobacterium thermophilum IAM 14863
MAMRGGPGAFRLDDYDVKLSQVDPRIYRLLGTLIRPYVPKLAAGVLLMVATALTGLVGPYLTQVAIDRFVAERDPAGLDLVALAFLATALLNWWSSYGQTYIVSYVGQSIIYDLRDRMFRHLQRLSFRFFDSMATGRIMSRLMSDVDAINQLVSSGLVSLFADSMVLVTIMGTMLWMNWRLALVSFITIPTLLLVLRLFRGWMRDAFMAQRRRAADMNAHLAEAIAGIRVTQAYVREARNQAQFDGINERLRQANLGAVRVWATMMPSIEVVSAFGVTLVLWYGGILLRGGTADVTVGQVAAFILYLNRFFQPIRDLSQVFNVFQAAVVSAERVAELLDQQPEIVDRPGARDLPRVAGRVEFRDVVFGYEPGQVVLKGINLRAEPGETIALVGPTGAGKSSVINLLARFYEPQEGQVLVDGVDLSTVTQRSWRSQLGIVLQDTFLFSGTIRDNIRYGRPDATDEEVEAAARAVGAHDFIVRLEKGYDTEVHERGAKLSVGQRQLIAFARALCADPAVLILDEATSNIDTHTEAVIQEALQTLLRGRTAFVIAHRLSTIRSADRIYYIEDGQVVEQGRHAELLALGGRYARMYRGQWEGE

SEQ ID NO: 28814 - protein, 603 aa, Symbiobacterium thermophilum IAM 14863
MQILKRLWPLYRPGLPLVVLSLTQIALVSLLGTAQPQIIRFVTDLVLENGEWQYLVPGALAVIAVAVVQGGLRFGQRYTMEIVSTRVVAQLRAQVYSHLQRLSWAFYDRAQTGELMSRVTADVDAVRMAAGMALVNGLTHLGTIVAVVVAMFLMDWRLAIVSLLFLPLLVHAIARFQAGSRAAWSDVQARTAELSASLQENIAGVRVVKAFAREEGEIARFRTANDAFQAANLRAIRVSAFWTNYMNFLTAVGAVAVLWYGGRRAMTGAISVGTLVAFNAYVTQLAGPVRMLGMAISHFTRAAASLQRIYALLDTPVEVADRPGARDLEAVVAEQGTTAAAPDGADPAGGDGTRRVAGRVTFEDVSFRYPGGEAVLQDIHLDVAPGMKVAVLGLTGSGKSTLLHLIPRFYDPTAGRVLIDGVDVRDVTLASLRRQIAIVPQETFLFSATLRENIAYGRPDATQEEIEAAARAAQIHDFILSLPQGYDTVVGERGVGLSGGQKQRIAIARALLTDAPILLLDESTSAVDVATERHIQKALDRLMSGRTTFIIASRLSTVMKADLVLVLEDGRIAARGTHEELIRRDGLYRRIYELQLRPVEEVV

SEQ ID NO: 28815 - protein, 401 aa, Symbiobacterium thermophilum IAM 14863
MAKKKCVLAYSGGLDTSVAIHWIKENYDADVVALAVDVGANDKDLEFIRQKALSIGAVKSYVYDARKEFAYDFILPTLQANACYESKYYLSAALSRPLIAKLLVQIAEEEGADFVAHGCTGKGNDQVRFEVSVAALNPNLQVLAPVREWGWSREEEIDYAQKHGIPVPVGKENPFSIDVNLWGRSCEAGVLEDPWAEAPEEAFEWTVNPKDAPDEPEYVEIGFEQGVPVSLNGEALDLVTLIERLHAIAGRHGVGRIDHVENRLVGIKSREVYEMPAAAVLTLAHKELETITLPRELHHFKLGLEQKYAELVYNGLWFHPLKEALDAFIKKSQETVTGTVRVRLFKGSAFCVGRTSPYTLYSYDLATYDKADKFDHKAAKGFIDIFGLPTKVYAAVQKSKA

SEQ ID NO: 28816 - protein, 395 aa, Symbiobacterium thermophilum IAM 14863
MGREAVIVSAARTPFGAFQGALKDLSATDLGAVAIREALRRVELLERPEEIDQVLMGQVVQAGAGQIPARQAAHKAGLPFGVVSATVNKVCASSLWAVNLADTLIRAGDADVVVAGGMESMSNAPYLLQGARRGYRMGHGQLIDGVIHDGLWCAFGDVHMGTYGGRGAREYGVAREELDAWAYRSHVRAAAAWDRGFFAEEVTRVVVPQKKGETVVLEDEPIRRDTSPEKLAALRPAFEPDGPITAGNAPGLSDGASALVIMSREKATALGLEVLATIVAQGQYSDEPHLLHEVPARAGQAALRRAGLTAKDLHLVEINEAFASVTLISTRLLGVDPEIVNVNGGAIALGHPIGASGGRILMHLVYELRRRGGGFGLAAICSGGGQGEATLVRVD

SEQ ID NO: 28817 - protein, 223 aa, Symbiobacterium thermophilum IAM 14863
MPDLDFLRSLSLFQGLSDEELARIAAIARERHYRKGTILFNEGDPGEAIYFIKKGRVRVSRLAANGQEQVLRVWGPGHEVGLVVLADKAPYPATAQVTEDSVLIAFRVDDLVQLLPESRTLAANAFCLVGRRLRLARDTAHELAVHNTHGRLAALLLRMKAEQGSDVINLGMTHQEIAGMIGTSRETVTRVLGDFRRTGCIAVQGESVVIRDERKLREWMGES

SEQ ID NO: 28818 - protein, 392 aa, Symbiobacterium thermophilum IAM 14863
MREAVIVTGVRTALGKAPRGSLRHVRPEDLAATVIKEAIARTPGLDPAAVEDVVLGCAFPEGEQGLNIARNAAIRAGLPTSVPGFTINRFCSSGLNAIAIAANAVMAGNLDIAIAGGVESMSRVPMGGHTPRPHPEVVESYPQLYMSMGHTAEVVCARYNVSREDMDAFALASHRKAAAAIDAGKFKDEIVPITVKERVFDGKRVVEKEFVFDTDEGVRRDTSMEALAKLRPAFSANGNVTAGNSSQTTDGAAAVVVMSAEKAQEMGLKPLAIFRSFAVGGVDPEVMGIGPVVAVPKALKQAGITLADVDLIELNEAFASQSLAVIRKLEMDPDKVNVNGGAIALGHPLGCSGARLTVTIMHEARRRKARYGLVTMCVGGGMGAAGVLEFVH

SEQ ID NO: 28819 - protein, 290 aa, Symbiobacterium thermophilum IAM 14863
MPNFSEGRRPEVIEAIAGAIAAQGVKVLSVSADVDHNRCVVTFIGSPEAVVRAALRGAEAAIRLIDLNHHKGSHPRMGAVDVIPFVPVSGCTMEDCVALARQVGEALGNMGVPVFLYEEAATRPDRRNLADVRRGEFEGLRELIGVDPAKDPDFGPRKIHPTAGCTAVGARMPLIAFNVNLGTSDLSIARKIAKAVRGSSGGLVHCKAIAVPLADRNQVQVSMNMVNYKETPLHRAFELIRIEAERYGVPVVGSEIVGLVPVDALVGVARHYLRLEGFKTDQVLEKRLVD

SEQ ID NO: 28820 - protein, 626 aa, Symbiobacterium thermophilum IAM 14863
MNKLFRSLAFYMLILVISVAIAVQLGGTSQQTTQLVYSDLVRYIQQGEVRSITLSGAYAEGELVSGEKFTVQLPPSSSQAPLVEMLQQHPNIKLDFRQDNTSGIWAMLLQTLVPVVLVLLAFFFIMQQTQGSGNRVMQFGKSRARLVTDDRKRVTFDDVAGIDEVKEELAEIVDFLKHPKRYLELGARIPKGVLLYGPPGTGKTLLAKAVAGEAGVPFFSISGSDFVEMFVGVGASRVRDLFEQAKKNSPCIVFIDEIDAVGRQRGAGYGGGHDEREQTLNQLLVEMDGFSANEGIIIIAATNRPDVLDPALLRPGRFDRQIVIDRPDLKGRLAIFQVHAKGKPLEPDVDLEVLAKRTPGFTGADIANLMNEAALLAARRRKKKISMQDVEDAIDRVLAGGPEKKSRVISEKEKRVTAYHEAGHAVVGHMLPHMDPLHKITIIPRGRAMGYTLFLPVEDRYNISKSEILDRMTMALGGRAAEEITFGEITSGAQDDIERTTQWARRMVTEWGMSEKLGPLTYGMKQDEVFLARDMTRLRNYSEEVAGLIDEEVRKFVHMAYQRAIDILTEHRDALEKVSEVLLEKETLEGKELQDLLEQLLPPRPKPEPLKPRMVGGGTSQVAPAF

SEQ ID NO: 28821 - protein, 332 aa, Symbiobacterium thermophilum IAM 14863
MAKPRVFVTRRIPDEALSILRTACEVHTWDHEDEPVPQDELVRGLQEADGALVVGPHRIDAALMDAAPRCRVYANMAVGYDNIDVAAATARGILITNTPGVLTETTADLAFGLMIAAARRLYEGQRTIVEGRWKGWSPMFMTGQDVYGATLGIVGAGRIGQAVARRARGFDMRILYHNRRPNPAFEAEVGASYRLLDDLLRESDFVVVLVPLTPETRGLIGARELALMKPTAVLVNAARGPVVDERALYEALRDRRIYAAGLDVFDREPIPADHPLLSLPNVTAVPHIGSATVRTRTRMATLAAENLVAALTGKQPPTPVNPEVLRREERQP

SEQ ID NO: 28822 - protein, 321 aa, Symbiobacterium thermophilum IAM 14863
MVPYQDRKLKIFSGNANLPLARAIADHMGISLGNMNVGRFSNGEIRVDINESVRGTDCFVIQSGVHPVNENVMELLVIGDALRRASARRITAVVPHFPYARQDRKARGREPITAKLLANLITTAGFRRLLTIDLHAAQIQGFFDTPVDHLHAGPLIANYFRQKGLQNAVVVSPDTGGVPRARDLAERLGVGLAIIDKRRPEPNVAEVMNIIGDVEGKTAILVDDLIDTAGTIVKGAEALLERGATEVYAACTHPVFSGPAYERLAASPIKEIVVTDTIPVDADKMGGKLRVVSVAPLLGKAIIRIHEDLSVSKIFEEEPRL

SEQ ID NO: 28823 - protein, 469 aa, Symbiobacterium thermophilum IAM 14863
MAEEQARTPLFSALREYVARVRAPLHVPGHKMGRAAPSAWREFLGPNALAIDLTEAPGLDDLHAPEGVIAEAQELAARAFGAWRSYFLVGGTTAGLHALILAACHPGEAIAVPRNAHRSVLGALILAGVRPHWVRVAFDPDLGIATGPVLTSLEEALSGAAAAVLVHPTYYGIAGDTAAAIDLIHRAAVPALVDEAHGAHFPFHPALPPSALELGADGVVQSLHKTGGSLTQSSLCHLGHGSRIAPERLQEMLRLVQSTSPSYLLMASLDLARRELALGGREAWGRALELAHEAKRRIDALPGLRVRPTDDPTKLLIDVRGRSISGFRAAERLWEEAGVAVEASGLTYVLAVLSPGDSREQIDALVAGLERLSSEGDVPALPPEPPWPEVVLPPREAYLARKKAVPLRQARGRIAAELVAPYPPGIPVVAPGERLTADVLDYLRRAADAGWHLQGPADPALRSIQVVEE

SEQ ID NO: 28824 - protein, 488 aa, Symbiobacterium thermophilum IAM 14863
MNQHETPLFTGLVRHAERNPIQFHIPGHKKGTGMAPEFRAYIGERALAIDLINIAPLDDLHNPHGIIREAQALAAEAFGADHSFFSVQGTSGAIIAMIMTVCGPGDKILVPRNVHKSVLTGIVLSGALPIFMNPDLDYELGIAHGVSLEAVRHALDQHPDAKGVLVINPTYYGVAADLKGIVELAHSRGVPVLVDEAHGVHLCFHDELPLSAMQAGADMAATSVHKLGGSLTQTSILNVREGFINPGRVQAILSMLTTTSTSYLLLASLDVARKQLATRGRELIDRAVRLAERARREIAEIPGLYCLGPDVVGQSSSRFDLDPTKLCINVKELGVTGVEVEAILREEFNIEVELSDLYNILCIISLGDTAEDVDALVAALGEISRRFYRQRPANVVKVKVPVTPILAMHPRTAFYAETEVVPIREAEGRVIAESIMVYPPGIPILLPGEIVAEENLDYLEECIQAGLPVQGTEDPEIRMVKVVKDAHR

SEQ ID NO: 28825 - protein, 612 aa, Symbiobacterium thermophilum IAM 14863
MADFREEEALGKVYDARLMARLLSYARPHWKALLVCIAMLGVAVSLDLLVPKLVQVAIDDYLVLGDAPAAAVGLNRLAFWLIAALVANFFVSYGEVLLLQFTGQKIIYAIRKDLFGHLQRLHLQFFDRNPAGRLVTRVTNDTETLSEMYTSVLVNLFRDVFTLVGVAVVMVRTHPRLAAVSLALIPLVAYYTRFFAAKARDAWREVRVRLARINAFVSEHVSGMRVVQLFAREAQTFAEFKRENDEYNRASWRQLMVWAVFRPVLDLLASVTIALVLWYGGLQALGGGLTPGVLLLFVTLSRRFFEPLMQLAEKFNILQSAMASAERIFMLMDTPPAIVDPPDPKPLGRVTGAVEFRNVWFAYNEGDWVLKDVSFRAEPGQTIAFVGHTGAGKSSIINLLCRFYDVQKGQVLVDGLDVREVATAELRRSIGLMAQDVFLFSGDIRSNIRLGNTEISDERVREAARIVGADEFIRELRNGYDEPVAERGATLSAGQRQLLSFARALAFDPPILVLDEATASIDSETEALIQKALRELTKGRTTFIVAHRLSTIQHADQIIVLHKGRIHEQGTHEELLARQGLYYKLWRLQFEEHLEERDAPTETLMPATHPSA

SEQ ID NO: 28826 - protein, 287 aa, Symbiobacterium thermophilum IAM 14863
MAFASPQETALAVAQANETRASNSIPKLIVLGLLGGAFTGMGAEAATMICHDFTFLGAGLQQFAKGSLFSIGVIFAVICGGELFTGDALLWLAFMDERVGWKKMLKVLGVVLLANVVGATAYAWLYYQSGLFLFNNAELGAEAVRTAVTKVNLTWWQVFVRGVLCNWLICLGVWMAFASKEVISKIASLYIGVMVFVMSAFENSVANFYYLPAGWFAKHIPAVVEAANLGAKLDTLTWSNIITRNWIPSALGNFVGGALFVATAYWFVYVRQAPATPDQSMAASAAD

SEQ ID NO: 28827 - protein, 249 aa, Symbiobacterium thermophilum IAM 14863
MPPLSSGRVRPGPLAADIPNSPGGFPYLITSFLVPEWLVQPMTKLLEVFLKWTGNYGLAIILLTVVVRIVILPLTVYQMRSMKRMQEVQPLMKELQDKYKDNPEKLNQELMALYQREKVNPFSGCLPLLVQLPILYALFAVFNAFDPTKFNYTYQFLWADLSQRDIPLAILTVVSMILQQYLTGMPTTDPNQRVMMWIMPIMFGWIAFTMPTSSIVLYWVVSTFFGLIQQAIYPGFPRFKGSLGSKGEA

SEQ ID NO: 28828 - protein, 403 aa, Arabidopsis thaliana
MASLGLSFPPAAKTPTYLASSSSTFFSNSSLSVRTSQFRSRNSVFACVKCDMPESLNVGNGNPSIPIINERTLPKFLESARMEKSVNRTNTRLKLFSGTANPALAQEIAWYMGLDLGKVNIKRFADGEIYVQLQESVRGCDVYLVQPTCTPTNENLMELLIMVDACRRASAKKVTAVTPYFGYARADRKTQGRESIAAKLVANLITEAGADRVLACDLHSGQSMGYFDIPVDHVYCQPVILDYLASKSIPSEDLVVVSPDVGGVARARAFAKKLSDAPLAIVDKRRSGHNVAEVMNLIGDVRGKVAIMVDDMIDTAGTIVKGAALLHQEGAREVYACCTHAVFSPPAIERLSGGLLQEVIVTNTLPVAEKNYFPQLTILSVANLLGETIWRVHDDSSVSSIFL

SEQ ID NO: 28829 - protein, 335 aa, Arabidopsis thaliana
GSISQVATMATSSSTEKLPRVLIVKRPDAMAVLGDGFVASTKFEILKAFESPLPLPEFLAYHSDSISAIIAPVAAPVTADLIRILPNLRLVVTTSAGVDHVDLVECRRRGISVANAGSSFSEDVADTAVGLLIDVFRRISAANRFVKQRFWPLKGDYPLGSKLGRKRIGIVGLGSIGSKVATRLDAFGCQISYSSRNRKPYDVPYHYYMDIEEMAANSDALIICCELNEKTLRLINKDVLSALGKRGVIVNVARGAIIDEEEMVRCLREGEIGGAGLDVFEDEPNVPKELFELDNVVFSPHSAFMTLEGLEELGKVVVGNIEAFFSNKPLLTPVL

SEQ ID NO: 28830 - protein, 350 aa, Thalictrum flavum subsp. glaucum
MEMINKENLSSQAKLWNFIYGFADSLVLKSAVQLDLANIIHNHGSPMTLSELSLHLPSQPVNQDALYRVLRYLVHMKLFTKSSIDGELRYGLAPPAKFLVKGWDKCMLGAILTITDKDFMAPWHYLKEGILNDGSTSTAFEKALGTNIWDYMAEHPEKNQLFNEGMANDTRLIMSALVKECSSMFDGITTIVDVGGGTGTAVRNIAKAFPHIKCTVYDLPHVIADSPGYTEINSIQGDMFKYIPNADAIMMKCILHDWDDKECIEILKRCKDAVPRDGGKVIIIDIILDVKSEHPYTKMRLTLDLDMMLNTGGKERTEEEWKKLIHDAGYKGYKITHISAVQSVIEAYPY

SEQ ID NO: 28831 - protein, 348 aa, Thalictrum flavum subsp. glaucum
MAAFQGKDASVDIKAQAHVWKIIYGFADSLVLRCAVELGIFDIIDNNNQPIPLADLASKLPISNVNLDNLFRILRYLVKMELLSYAADDKYALEPIAKLVLRNEKRSMVPMVLGMTQKDFMTPWHSMKDGLTDNGVTAFEKAMGMTIWEYLEGHPDQSQLFNEGMAGETRLLTSSLISGSKDMFQSIDSLVDVGGGNGTTIKAISVAFPHIKCTLFDLPHVIANSYDHPNIERIGGDMFKGMPSAQAILLKLILHDWNDEDSIKILKQCRKAVPKDGGKVIIVDVALDEDSDHELSSTRLILDIDMLVNTGGKERTKEDWEKLVKCAGFSGCKIRHIAAIQSVIEVFP

SEQ ID NO: 28832 - protein, 408 aa, Pirellula sp.
MLSEKTIRIVKEITPLVAANAETITRRFYERMFEANPEVKAFFNQAHQHSGGQQKALAGAICAYFTHIDNPAVLMPAVELIAQKHVSLGIKPEHYPIVGSNLLAAIGDVMGDAATPEIVEAVSEAYGFLADIFIGREGAIYEEQASMPGGWNGTRTFVVTKKVRESEIVTSFYLKPEDEGPLPPFKPGQYITVHMDHPHTPTSPRNYSLSDCASQPHYRISVKREERLVPDAPDGLISNHLHDGIEEGHRIELGPPCGEFTVDPATIAKPIVLIAGGIGVTPLLSMAKSIVHANPNAELHFIQAARNSKVHAFADELRRLAQAGPNVHTKVIYDSPLPGDVEEGKCDEAGFVTENQIRESTPFTDADFYFCGPKPFMKNVHSCLRELGVDEHRVRYEFFGPKEELVAV

SEQ ID NO: 28833 - protein, 393 aa, Burkholderia sp. TH2
MLSAEHRAIVKATVPLLESGGEALTTHFYKTMLAEYPSVRPLFNQAHQQSGDQPRALANAVLMYARHIDQLEQLGGLVSQIVNKHVALNILPEHYPIVGACLLRAIREVLGAEIATDAVIEAWGAAYQQLADLLIGLEENVYVEKETATGGWRGTRAFVVARKVKESDEITSFYLRPADGGELLEFHPGQYIGLKLIVDGEEIRRNYSLSAAANGREYRISVKREPNGKASNYLHDSVNEGATLDLLTPSGDFTLEHNDKPLVLISGGVGITPTLAMLNAALQTSRPIHFIHATRHGGVHAFRDHIDELAARHPQLKRFYVYEKPRHDDEAHHAEGYIDEARLIEWLPATRDVDVYFLGPKSFMQAVKRHLKTIGVPEKQSRYEFFGPASALD

SEQ ID NO: 28834 - protein, 307 aa, Cenchrus ciliaris
MAAPTLMQCLLAISLLSFTAHAQLSTTFYASSCPNLQTVVRAAMTQAVSSEPRMGASILRLFFHDCFVQGCDASILSRSGGEKSAGPNANSVRGYEVIDTIKKNVEAACPGVVSCATIVPLAARPGPNLLGGPTWNVPLGRRDSTTAMLSLANQNLPPPTSLGTLISLFGGRLSARDMIALSGAHHAQARCTTFRGRIYGDTNIDASFAALQQQTCPRSGGDGNLAPIDAQTPARFDNAYYTNLVSRRGLFHSDQELFNGGSQDALVRQYSSSPSQFNSDFVAAMIKMGNIGANAGQVRRNCRVVNS

SEQ ID NO: 28835 - protein, 313 aa, Cenchrus ciliaris
MASSVSGLLLMLCMAAVASAQLSATFYDTSCPNALSTIKSAVTAAVKKENRMGASLLRLHFHDCFVQGCDASVLLDSGGEQGAIPNAGSLRGFDVIANIKAQVEAICKQTVSCADILAVGARHSVVALGGPSWTVPLGRRDSTSGSAALANSDLPASRSFNLSQLIGSFDNKGFTATEMVALSGAHTIGQAQCLNFRDHIYNDTNINTGFASSLKANCPRPTGSGDGNLASLDTSTPYTFDNAYFKNLLSQKGLLHSDQELFNGGSTDNTVRNFASNPSAFSSAFAAAMVKMASLSPLTGSQGQIRLTCSKAN

SEQ ID NO: 28836 - protein, 980 aa, Oryza sativa Japonica Group
MAAARAPWLWWWVVVVVGVAVAEAASGGGGGGDGEGKALMGVKAGFGNAANALVDWDGGADHCAWRGVTCDNASFAVLALNLSNLNLGGEISPAIGELKNLQFVDLKGNKLTGQIPDEIGDCISLKYLDLSGNLLYGDIPFSISKLKQLEELILKNNQLTGPIPSTLSQIPNLKTLDLAQNQLTGDIPRLIYWNEVLQYLGLRGNSLTGTLSPDMCQLTGLWYFDVRGNNLTGTIPESIGNCTSFEILDISYNQISGEIPYNIGFLQVATLSLQGNRLTGKIPDVIGLMQALAVLDLSENELVGPIPSILGNLSYTGKLYLHGNKLTGVIPPELGNMSKLSYLQLNDNELVGTIPAELGKLEELFELNLANNNLQGPIPANISSCTALNKFNVYGNKLNGSIPAGFQKLESLTYLNLSSNNFKGNIPSELGHIINLDTLDLSYNEFSGPVPATIGDLEHLLELNLSKNHLDGPVPAEFGNLRSVQVIDMSNNNLSGSLPEELGQLQNLDSLILNNNNLVGEIPAQLANCFSLNNLNLSYNNLSGHVPMAKNFSKFPMESFLGNPLLHVYCQDSSCGHSHGQRVNISKTAIACIILGFIILLCVLLLAIYKTNQPQPLVKGSDKPVQGPPKLVVLQMDMAIHTYEDIMRLTENLSEKYIIGYGASSTVYKCELKSGKAIAVKRLYSQYNHSLREFETELETIGSIRHRNLVSLHGFSLSPHGNLLFYDYMENGSLWDLLHGPSKKVKLNWDTRLRIAVGAAQGLAYLHHDCNPRIIHRDVKSSNILLDENFEAHLSDFGIAKCVPSAKSHASTYVLGTIGYIDPEYARTSRLNEKSDVYSFGIVLLELLTGKKAVDNESNLHQLILSKADDNTVMEAVDSEVSVTCTDMGLVRKAFQLALLCTKRHPSDRPTMHEVARVLLSLLPASAMTTPKTVDYSRLLASTTTAADMRGHDVTDIGDNSSSDEQWFVRFGEVISKHTM

SEQ ID NO: 28837 - protein, 237 aa, Oryza sativa Japonica Group
MQPPYTYSNSYHHIHSSLPPEMSDRDVDMHILTALMADMADSSSSSSSSSSSSSSDDSDMRASAAAAEPEHRRSPAPPPPPRQQQLIGVRKRPWGKFAAEIRDSTRKGARVWLGTFDSPEAAAMAYDQAAFSVRGASAVLNFPLHRVQESLQALALGAAGGSPVLALKRRHSIRKRRKPTKHMLLMQQQQQEPTVVELEDLGADYLEELLRLSESSSSSSSSSISNFTTTPNRHCQS

SEQ ID NO: 28838 - protein, 480 aa, Bacillus licheniformis ATCC 14580
MKTPLYTALVNHAEGHHYSFHVPGHHNGDVFFDEAKTFFETILKVDLTELTGLDDLHEPSGVIKEAQDLVSRLYGAEESFFLVNGSTVGNLAMILAVCQPGDTILVQRNCHKSVFHAIELSGAHPVFLTPEIDEAMAVPTHILYETVEDAISQYPHAKGIVLTYPNYYGHAVDLKPIIEKAHQHDISVLVDEAHGAHFVLGHPFPQSSLKAGADAVVQSAHKTLPAMTMGSYLHLNSGRINRDRLAYYLSVLQSSSPSYPIMASLDIARAYAEDILKTNRTADIEKELINMREVFSQINGADIVEPADARIRQDPLKLCIRSAYGHSGFELKSIFEANGIHPELADERQVLLILPLEGKNMPAPELISTISKDMKDTAVRNDLPAGIGIPSEKVTALPYRKSKLSAFKKESVPFTEAAGRISAESVTPYPPGIPLIMAGERITKETISRLTRLVDLNVHIQGSNQLKQKQLTVYIEEEKS

SEQ ID NO: 28839 - protein, 316 aa, Bacillus licheniformis ATCC 14580
MSKYEDDNLKIFSLNSNPGLAKEIADIVGVELGKSSVKRFSDGEVQINIEESIRGCDCYVIQSTSAPVNEHIMELLIMVDALKRASAKTINIVMPYYGYARQDRKARSREPITAKLVANLLETAGATRVIALDLHAPQIQGFFDIPIDHLMGVPILGNYFEEKNFKDIVIVSPDHGGVTRARKLADRLKAPIAIIDKRRPKPNVAEVMNIIGHIEGKTAILIDDIIDTAGTITLAANALVESGAEEVYACCTHPVLSGPAIERIDNSKIKELVVTNSIELPEEKKIAKFKQLSVAPLLAEAIIRVHEKQSVSFLFD

SEQ ID NO: 28840 - protein, 578 aa, Bacillus licheniformis ATCC 14580
MKTENNNSMKPFFSMILTSGVPRLALSAGLTASLVTTLVGLSIPLLTREMVDGFSANSINLALSGILALVFIVQAVCDGFSTYFLSYAGQKVVASLRERMWFKLLRLPVRYFDEKTSGETVSRVVNDTGIVESLISDHFPQFVSGIITIVGSVVILLIMDWKMTLLMLISVPITTFIMIPLGMKMQRISKTMQDETASFTGHVQQTLSEIRLMKASNAEHTEKMKGLSGISKLFQYGLKEARIFALVSPFMHLVIMIVIVAIIGYGGIRVSEGTMSAGSLIAFLLYLFQIIFPITSFTMFFTQLQKAKGATERIIEIMHSEEEEGQEGLEMDISNLPIHVENVTFTYAGGEPVLRGVSFDVDPGQMIAFVGPSGGGKTTMFGLLERFYEPDSGAINIGETPISKLSMKSWRSQIGYVSQDSPMMSGTIRENLCYGLDHADSIDDQELWKVAEMAYADTFIKQFPEQLDTEVGERGVKLSGGQRQRIAIARAFLRDPKILMMDEATASLDSQSEAIVQQALARLMEGRTTFVIAHRLSTIVNADQIMFIEKGEITGRGRHHELIASHALYREFAERQLT

SEQ ID NO: 28841 - protein, 351 aa, Bacillus licheniformis ATCC 14580
MQPEDIVRSGPNQYVCREGIVKELPSFANAFERPVIISGVKSFKAFTRYTTPPADWKVVQHTGCSSLNKIKKAAEEAESADVIIGIGGGTVLDTAKAAADLLNIEVMTIPTIPGTCAASTPLSVIYDDEGNFSGVQYQKRSSYLTLVDPLLLLSSPVAYVKSGIGDTLAKWYEAEAIIRNTADSLSIMVQTGLRQSVYIRDILLTESLKAIESLEKGESSPAFTNVLEAVIALAGTVGGYAGRYGRMAGAHAIHNGLTFIPETHRVLHGQKVAYGILVQLALEGRTDEIAELIPFYEGLGFPRRLSDLGILENIEAAKRIIAAHAARPDESLCLMGSFHEADVIAAIESLE

SEQ ID NO: 28842 - protein, 481 aa, Bacillus licheniformis ATCC 14580
MNHENREQYTLKRTMKSRHLFMISLGGVIGTGFFLGTGYTINEAGPIGAILSYLAGGMIMYFTMLCLGELAVAMPVSGSFQTYATKFIGPATGFAVGWIYWLGWSVTVALEFLSAGQLMKRWFPDVGVWIWCLIFGLLLFSLNALSAKAFGESEFWLSGIKIIVILLFIILGGGAMFGLIDLKDGQAAPFFSNLIGDGIFPNGFGAIFITMITVNFAFQGTELIGIAAGESENPEKTVPRSIKQTVWRTLVFFGLSVFVLAGLIPWEKAGVVESPFVVVFEQIGIPYAADLMNFVILIALLSVANSGLYASTRMLYSLAKEGMAAQALSRVNKRGIPMNALWITLGFAGLSLISSVVAAETLYIWLLSLAGLSAQVGWITITVSQLLFRRRYVKEGGKVEDLKFKTPLYPYLPLTGFILNSAVLVSLAFDSEQRMALYCGILFMSACYFVYHVFVKKRQALDRQEAMIYQNKTNDEVVIDE

SEQ ID NO: 28843 - protein, 297 aa, Bacillus licheniformis ATCC 14580
MNKQVSLIGMPMDLGQARRGVDMGPSAIRYAHIVERLNELGYDIDDLGDVPINRDQPKGDEGLKNLVSVLEGNRKLADIVDNVVEQRRFPLVLGGDHSIAIGTLAGVAKHYQQLGVIWYDAHGDLNTLETSPSGNIHGMPLAVSLGVGHEKLVNLHGYAPKIKPEHVVIIGARSLDEGERKYIRETGMKVYTMHEIDRLGMTKVMEETIEYLSANCDGIHLSLDLDGLDPSDAPGVGTPVVGGISYRESHLAMEMLYDADIITSAEFVEVNPILDHKNKTGEAAVELIESLLGKKLL

SEQ ID NO: 28844 - protein, 453 aa, Bacillus licheniformis ATCC 14580
MKVVKFGGSSLASGAQLEKVFQIVTSDPERRAVVVSAPGKRHPEDTKVTDLLIECAQQYLLSKEATGLVEAIVGRYADIALELGLADDVINRIRADLLQLLEGDKTNPERFIDAIKASGEDNNAKLVAAYFRHRGVEAHYVSPKDAGLFVTSEPGNAQVLPESYDNLFQLRQQKGIIIFPGFFGFSQEGEVMTFSRSGSDITGSILANGLKAELYENFTDVDAVYSVNPAIVSNPKEIRELTYREMRELSYAGFSVFHDEALIPAFRARIPVQIKNTNNPDAEGTRVVATRDNTNGPVVGIAGDSGFCSIYISKYLMNREIGFGRRVLQILEDEGLTYEHIPSGIDDITIILRQNQMDQAAEKRMIKRIKEELDADEVAIEHNIALIMVVGEAMRHNVGTTARASKALSEAGVNIEMINQGSSEVSMMFGVKEAQEKQAVRALYQEFFAKVLV

SEQ ID NO: 28845 - protein, 463 aa, Bacillus licheniformis ATCC 14580
MGKQQMKKTMSQTDVLFLAIGAMLGWGWVVLSGDWISTAGFLGSTIAFIIGGILVILIGLTYAELSSAIPETGGGLIFVYRAFGRKTAFVAAWGVLFGYVSVITFEAVALPTVIDYVLPVEHQGFLWSLSGWDVYVTWVLIGSGGAVVLTALNYFGVKPAAIFQSVFTIAIIATGFLLLGGALVNGDFEHVQPLFKDGFSGMMSVLVMIPFLFVGFDVIPQVAAEINAPKKIIGKILIISIISAVVFYLLIVFGVTMGLSESELATTSLATADAMVNLLGNQLFGTVLVLGGVAGIITSWNAFIIGASRILFAMSEKGMVPKWFGFIHPKYKTPTNAILFLGALAFFAPLLGRPALVWIVNAGGTGIIVGYLIVSIAFMKLRKTEPDLHRPYKINKWKTTGISAILLSVIFLAFYLPGMPAALTWPYEWLILAGWTLIGFLLYNSSSKRKGEEIQHDQHARSI

SEQ ID NO: 28846 - protein, 67 aa, Bacillus licheniformis ATCC 14580
MEQGTVKWFNAEKGFGFIERENGDDVFVHFSAIQSDGFKSLDEGQKVTFDVEQGPRGAQAANVQKTA

SEQ ID NO: 28847 - protein, 460 aa, Bacillus licheniformis ATCC 14580
MTEDVTDNDIHEQKLSRGLKNRHIQLIAIGGAIGTGLFLGSGKSIHFAGPSILFAYLITGIICFFIMRSLGELLLSNLEYHSFVDFVRDYLGDMAAFITGWTYWFCWISLAMADLTAVGLYTQYWLPDVPQWLPGLIALIILLIMNLATVKLFGELEFWFALIKVIAILALIAIGLFMIFKGFSTHSGTAAFHNLWSHGGMFPNGLHGFLLSFQMVVFAFVGIELVGLTAGETKDPEKVIPKAINNIPVRVLLFYIGALLVIMSIYPWNVINPNESPFVQVFAAVGIIAAASIINFVVLTSAASASNSAVFSTSRMIYSLAKEHNAPGAMTKLTSRKVPGNALFFSAVVILIGIMLNYIMPEQVFTLITSISTICFIFIWGITVICHLKYRRTRPDLAKRNKFKMPLYPFSNYVVLGFLAFILIVLALAQDTRVSLFVTPVWFIMLIAIYKLRKPKSRQV

SEQ ID NO: 28848 - protein, 367 aa, Bacillus licheniformis ATCC 14580
MSKSVKSVTSPKKFITGKRLLENLNDYIEDFGDNAYIICDEFILERAQKEAGNSIQKAGNQAVFEKFNYECTQEEIDRNRELARNAGANIIVGIGGGKTLDTAKATAYYEKLPVVIFPTIASTDAPCTALAVIYKHDGSFDRYLFLPTNPDVVLADSEILASAPPRFFAAGIGDALATYFEARACFKANGDNLVLMKPSTTGLGLARLCYDTLLENGVKAMQAVKHGVSTRAVEDTIEATIYLSGVGAESGGLAAAHAIHNGMTAVPSLHRAQHGEKVTFGLLAQLVLENAPAEELETVIDFIKGVGLPLTLKDLGVDEFVEEEWRQVAQSACAEGDTMGNMPFPVTPDDVYNAIVAANAIAESYHD

SEQ ID NO: 28849 - protein, 580 aa, Bacillus licheniformis ATCC 14580
MGVIRRYMEFVKPYKWKIVLTVLIGIIKFSIPLVIPLLLKYVVDDIIQGSGTAEEKTSTLFMVMAVMFAIFLVLRPPVEYYRQYFAQWTASKVLYDIRDKLFAHIQKLSLRYYANTRAGEIISRVINDVEQTKEFVIIGLMNVWLDVMTIFIAIAIMMTMDVKLTLISIVLFPLYGLSVKFFYGRLRKLTRERSQALAEVQGHLHERVQGMPVIRSFAIEDYEQKQFDHENGNFLGKAIRHTAWNAKTFAVVNTVTDLAPLIIITVAGYHVIHGNLTVGTMVAFFGYIERLYNPLRRLINSSTTLTQSIASMDRLFEFIDEPYDLKDKPNAVKAERLKGIVEFKNVSFQYEKSEEMILQDLSLKAERGETVALVGMSGGGKSTLVSLIPRFYDVSAGSLEIDGIDVRDYEARSLRNQIGMVLQDTFLFSESVRENISIGNPEASMEDIIEAAKAANAHDFIMELPQGYDTKVGERGVKLSGGQKQRISIARVFLKNPPLLILDEATSALDLESEHYIQEAMEKLAKDRTTFIVAHRLSTITHADKIVVIENGRVAEIGTHDELMSRDGHYKHLFTIQKLN

SEQ ID NO: 28850 - protein, 66 aa, Bacillus licheniformis ATCC 14580
MLEGKVKWFNSEKGFGFIEVEGQDDVFVHFSAIQGEGFKTLEEGQSVSFEIVEGNRGPQAANVTKA

SEQ ID NO: 28851 - protein, 266 aa, Bacillus licheniformis ATCC 14580
MAFRKPDEIANAAIEAGMKKVQLPLPSLLVLGFLGGAFIALGYLLDIRVIGDLPKEWGSLSSLIGAAVFPVGLILVVLAGAELITGNMMSVAMALFSRKISLKQLAVNWGIVTIMNLIGALFVAYFFGHLVGLTETGPYLEKTIAVAQGKLDMSFGKVLISGIGCNWLVCLAVWLSFGAQDGAGKILGIWFPIMAFVAIGFQHVVANMFVIPAAIFAGSFTWGQFIGNIIPAFIGNVIGGAVFVGLIYFIAYPKKDRSRKEMKQVS

SEQ ID NO: 28852 - protein, 404 aa, Bacillus licheniformis ATCC 14580
MLSEKTMQIVKSTAPVLKEKGTEITTCFYKRMFDAHPELKNIFNMSRQQTGGQPKALAFTVLQAAENIDRLEDLLPVVKQIGHKHKSLHVKPEHYPIVGQHLLEAIEIVLGEAATEDILQAWAEAYEEIARVFIEVEKQMYEEDKKQDGNWEGFKPFVIMDKRVESDTITSFYLKPADGTALPAFSPGQYVSVCIKIPGEPYFLTRQYSLSDAWNKDYYRISVKLEAEEGQPVGKVSSYLHENMEIGGSLEVSAPAGDFTLSEGTDRPVYFISAGSGITPVMSMVQTLAQKESRREITFVHAAKTERHHAFKEETEKLLGANPANRLLFVYSRGAEATEEHTVKGRVNEELLKSVVIDPNGEFYVCGPLSFMKSVIEGLQNLGVSMENIRYESFASSLDMQIAN

SEQ ID NO: 28853 - protein, 613 aa, Bacillus licheniformis ATCC 14580
MCGITGWVDFKKPLVREQSIMEKMTDTLSKRGPDDTNIWGKRHVLFGHKRLAVVDLEGGRQPMTRTHQGYDYTICYNGELYNTEDLRKELRRRGHQFKSHSDTEVLLHSYMEWKEECIDRLNGIFAFAVWDEKRDLLFAARDRLGVKPFFYTEQGSSFLFGSEIKAILAHPEVKAKVDRSGLAEIFGLGPSRSPGSGVFKGVKEIRPGHAMIFSKDGLTVWRYWNVKSEKHTDSFDETVENVRSLFQDAVTRQLVSDVPVCTFLSGGVDSSAITATAAKHFEREGKAPLHTFSIDYEDNEQYFTSSSFQPNADGPWIKKMSDAFGTVHHNCVISQEELAAYLEEAVLVRDLPGMADVDSSLLWFCREIKKDFVVSLSGECADEIFGGYPWFHSAEDVKGFPWMRSMEERIGLLQDGWQKKLNLSEYVKAKYEETVKETPLLEGETGAEKRRRELFYLNMLWFMTTLLDRKDRMSMGASLEVRVPFADHRLVEYVWNIPWDVKMHGSREKGIFRKALEGILPDEVLYRKKSPYPKTHHPAYTKAVIRWLESLLEQKDSALYAFLEKKKLERLIETEGASFQVPWYGQLMKGPQLIAHLAQIHTWFESYRIDIEE

SEQ ID NO: 28854 - protein, 442 aa, Bacillus licheniformis ATCC 14580
MNAEANGLKKEIGLLFALSLVIGTIIGSGVFMKPGSVLSYSGNAQIALFAWLLGGILTLAGGLTIAELGAQIPKTGGLYTYLEEIYGEFWGFLCGWVQIIIYGPAIIGALGLYFGSLVANLFSWDKSWTALIGIITVAFLCIVNIVGTKYGGAVQTITTIGKLIPIVCIIVFGLWQGDEYIFSSVTESIASQNFGAAVLATLFAYDGWILLAALGGEMKNPEKVLPKAMTGGILIVTACYLFINLALLHILPADQIVKLGENATSTAATMLFGPLGGKLISIGIIVSIFGCLNGKVLSFPRVIFAMAEKKQLPFSRWISHVHPAFHTPWIAVIVQMIIAVILMIISNPEKLSEVSIFMIYIFYVMAFFAVFILRRRKNGQGRSYSVPLYPYLPVAAILGSLFVLVSTLITDFYSCLWSILIGLVGLPVYFWMKKRNKNGSAA

SEQ ID NO: 28855 - protein, 290 aa, Bacillus licheniformis ATCC 14580
MKKTVGFIGLGVMGNSMASHILAAGYPVSAYTRTKHKADSLVEKGAEWKSSVKALAQSSDVIITMVGYPKDVEEVYFGSEGIIENAKKGSYLIDMTTSKPSLAKQIETAAKEKGLYALDAPVSGGDVGARNGTLAIMVGGERKAYDECYPLFSIMGENIQYQGPAGSGQHTKMCNQIAIAAGMIGVAEAMAYAEKSGLDPDNVLKSITTGAAGSWSLSNLAPRMLKGDFEPGFYVKHFVKDMGIALEEAELMGEKMPGLELAKSLYDTLVEKGEENSGTQSLYKLWTEYK

SEQ ID NO: 28856 - protein, 389 aa, Bacillus licheniformis ATCC 14580
MEHLLNPNVKEIEISGIRKFSNLVSQYENVISLTIGQPDFFTPHHVKQAAKKAIDENQTSYTHNAGYPELRQAVQLYMKKKADLNYEAESEIIVTTGASQAIDSAFRTILSPGDEVILPGPVYPGYEPIIKMCGASPLIIDTTSHGFKLTAKLIEEALTPKTKCVVLPYPSNPTGMTLSEEELKDIASLLKGRNVFVLSDEIYSELTFDRPHHSIATVLRDQTIVIGGLSKSHSMTGWRIGFLFAPKEIAKHILKVHQYNVSCASSISQKAALEAVTNGFDDALIMREQYKKRLDYVYDRLVTMGLDVIKPSGAFYIFPSIKSFGMSSFDFCMSLLEEEGLAIVPGSSFSEYGEGYVRISYAYSPDTLREGLDRLESFVFNKRQSIQTT

SEQ ID NO: 28857 - protein, 585 aa, Bacillus licheniformis ATCC 14580
MESLKKLKDFYWPYKKMFLWSIASMLLMTAITVVYPIILQMTIDEVILGGKYGLVIWISLGFIAVMAAKGAATFFHQYLGDMFGIRSVYRLRKELYAKLQRLPFKYYDSAKTGDLMSRLTADVEGIRFFLSFGFAEAIRFILLVTFSLSVMFSYSVPLTLVTIASLPFLGAAVYRFDKKVHPAFRNIRKSFARLNTKVQENISGMNTVKSLSKEDFEIQNFTHSNDHFRTKNLNASFIMSKFFPLMEFIGNICLVALLSFGGWLVMQNSLKPGELVAFFSLVNYLMWPIMNLGYVINLFSQAKASGERLLEILDAEEEITDTEQAVKSGRLNGDVAFSDVSLQYTKENAEALHGVSFQAERGKTIGLIGATGSGKSSIIQLLSRFYEPTSGRITIDGKPLEHYSLKMLRSNIGVVPQESFLFSSTIRSNISYGKPDASMDEIIESAKRAQAHDFIMELPNQYDTMLGERGLGLSGGQKQRIAIARAICMNPGILILDDSTSAVDMETEHRIQLALREVMRDRTTFIIAHRISSLKHADEILVLDKGVVKERGTHEQLMEANGLYKRIFDLQYKDQNVLNEPHFAG

SEQ ID NO: 28858 - protein, 496 aa, Bacillus licheniformis ATCC 14580
MKVGKQLLQHETPLYTGLKKHAGKNPIQFHIPGHKKGSGMDPEFREFIGENALSIDLINIEPLDDLHAPKGIIKQAQDLAAEAFGADYTFFSVQGTSGAIMTMVMAVCGPGDKIIVPRNVHKSVMSAIVFSGAVPIFIHPEIDDELGISHGITPESAKKALLEHPDAKGLLVINPTYFGIAADLKSIVELAHSFHVPVLVDEAHGVHIHFHEDLPLSAMQAGADMAATSVHKLGGSLTQSSILNMKEGLVSKERVQSILSMLTTTSTSYLLLASLDVARKRLATEGHELIEQTIKLANETRERINNINGISCVGREILGSKAAFDYDPTKLIISVKDLGLTGHDVEKWLRESCQIEVELSDLYNILCIFTPGDRKEDADALIKGLTEIAQQAASSAENRRKPEVLLPNIPALAMTPRDAFYANTEIIPFKKAAGRMIAEFVMVYPPGIPIFIPGEIITEDNINYIEKNLEAGLPVQGPEDDTLHMIRVIKEQQAIL

SEQ ID NO: 28859 - protein, 404 aa, Bacillus licheniformis ATCC 14580
MKIIVQKFGGTSVKDDRGRKLALNHIKEAVNEGYKAVVVVSAMGRKGDPYATDSLLDLLYGGQDTITEREQDMLLSCGETISSVVFASMLLENGIKAAALTGAQAGFLTDNNHTNAKILEMKPERLVSMLADHDAVVVAGFQGATAKGDITTIGRGGSDTSAAALGAALDAEFIDIYTDVEGVMTADPRIVEKAKPLPVITYTEICNLAYQGAKVIHPRAVEIAMQAKVPIRVRSTYSNETGTLVTSHHNSKAGSDVFERLITGIAHVKDVTQFKVPAKEGQYNVQTEVFKAMANAGISVDFFNITPSEIVYTVAGNMTDRAHSILKELGYEPAVTRNCAKVSAVGAGIMGVPGVTSKIVTALSEKGIPILQSADSHTTIWVLVHEKNMATAVNALHEVFELSK

SEQ ID NO: 28860 - protein, 525 aa, Bacillus licheniformis ATCC 14580
MSNQGNFKKTISLLDLILIGMGAIFGSAWLFAVSNVASKAGPAGSFSWIIGGVIILLIGLVYAELGAALPRTGGIIRYPVYTHGHLVGYLISFITIVAYTSLISIEVTAVRQYVAYWFPGLTIKGSESPTIIGWLLQFALLCLFFLLNYWSVKAFAKSNLIISVFKYFVPLTIIIVLIFHFKSANFAGEFAPFGFGGVQTSISTGGVMFAYLGLHPIVSVAGEVKNPQRNIPVALLICIIVSACVYTILQVVFIGAIPTDMLNDGWKAIGREFSLPFKDIAVLLGMGWLATLVVLDAILSPGGNGNIFMNTTSRLVYAWARNGTLFKIFAKVNKPTGIPRPSLWLSFALAVFWTLPFPSWDALVNVCSVALILSYAIAPVSAAALNVNAKQLKKPLQIKGMAVIAPVSFIFASYIVYWSGWNTVSWLLGSQLVMFAVYCACKKYVPQDDVSFAQQLKSSWWIVGYYVMLLILSFLGSFGNGLGLLRTPVDLILIALGSIAVFYWAKYTALPKAVIDYDEKKEETV

SEQ ID NO: 28861 - protein, 237 aa, Bacillus licheniformis ATCC 14580
MNISVRKSDTDLLSDDLHHLLESISTRRKIRQDTFLFQEGMDAEELYLIQSGLVQIGKLTSDGKELTLRMCKKNDIVGELTLFTEDAKYMLSAKILSDGEVLVINKDKLEKELIQNGALTFEFMKWMSTHLRKIQSKIRDLLLNGKKGALYSTLIRLANSYGITRSDGILINIVLTNQDLAKFCAAARESINRMLSDLRKNGVISIEDSGKIVIHQINYLKREIDCENCPLEICNID

SEQ ID NO: 28862 - protein, 295 aa, Bacillus licheniformis ATCC 14580
MKKIGFIGLGNMGLPMSKNLLQENFTVYGMDLNKEAELALHHAGGTIGISVEKMVEECDAILTSLPSSNAAEEVFLGKKGLVHLAEPGVLLIDTSTVAPELNIRIAEEAKSKGIDFLAAPVSGGVIGAVNRTLTFMVGGPKSVFDKALPVFNALGENIFHVNENIDSGTNTKLINNLLIGFYTAGVSEALHLAKNSNLDLDQLFEMLNVSYGQSRIYERNYKSFIADENYKPGFSLKLLLKDLGFALDLAEKNNVELPVSKILFGIYEEADQNGYGEKDMSVLYKKISEQKTTYQ

SEQ ID NO: 28863 - protein, 607 aa, Bacillus licheniformis ATCC 14580
MSQQPKHHGSIPKGMHKTKPKEFKKTLLRLARYLKPRTFQLVLVVFAAILATLFNVISPKLLGDATSSLFASFKEGTGVQFGFLGRITLILAGLYLLSALFTFLQHYLMAGVAQKTIYEMRQEVNEKLTRLPLKYYDKHSHGDTLSRAVNDIDNINTSLQQALTQMITSVITIVGIIVMMLLISPVLTLVVFITVPLSMLAVRFIASFSQKHFAAQQKELGDINGHVEEMFTGHQEVKAFGHEEKAIQQFDEVNERLYQSGWKAQFISGLMMPMMTFIGNLGYVFVSITGGIFVLNGTLLIGGVQAFIQYTQQFSQPLVQAAGIANTIQSAIASAERVFSLLDEEEETGETPASIDTGKLKGDVSFEHVAFGYDKNVPVIRDLSLHAKEGQTIAIVGPTGAGKTTIINLLMRFYELNKGSIKVGGTDISELSREQARSMFAMVLQDTWLFNGTIRENIAYGREGATEEDIIRAAKGAYADDFIRTLPDGYDTVLGEDAQNISQGQRQLLTIARAILADPKILILDEATSSVDTRTEMNIQKAMNKLMANRTSFVIAHRLSTIKDADMILVMKNGDIIEKGSHEELLRKNGFYADLYNSQFSREEAVS

SEQ ID NO: 28864 - protein, 493 aa, Bacillus licheniformis ATCC 14580
MQGNLTALLITAGIILAVVCIGFIAGSNKQSRKSVEEWSVGGRRFGGLLVWFLVGADLYTAYTFLGLTSTAFTSGSVAFFAIPYSVLAYFIAYFFLPKIWKVAKVHQLTTLADYARERFSSKLLSSLVAIVGVLMLIPYICLQLSGIQDTLQVAGTGFINVNAVVIISFILVALYTFFSGIKGPTYTAIIKDILVWVMMLFMVVSLPLIHFNGWTPMIDKLANEAPHMLTIPSDGPRGIAWFITASIVSAFALFMWAHAATGVFTANSADALRKNSMFLPLYNIVLILVIFLGFIAFLVLPDDINPRFALLYLIQSSYGGVTQGFAYSTIALASLIPCSIMAIGASNLFANNLYRDLINPRVSGQKLTIITRSMVFVVIGLALLFGMLFPAALVTLQLLGVSGMVQIFPAIVISLFWKNQTKEATIIGLLIGLAVTFTVYLTGATFGIYEGFWGLAANLLTVVLLNPFFVKNVKHNSVINYLFHTKKNVQKSA

SEQ ID NO: 28865 - protein, 66 aa, Bacillus licheniformis ATCC 14580
MQNGKVKWFNNEKGFGFIEVEGGDDVFVHFTAIEGEGYKSLEEGQEVSFEIVEGNRGPQASNVVKL

SEQ ID NO: 28866 - protein, 394 aa, Bacillus licheniformis ATCC 14580
MNLAKRVSALTPSATLAITAKAKELKAAGHDVIGLGAGEPDFNTPEHIIEAAVRSMNEGHTKYTPSGGLAALKDSIRDKFKRDQGIEYSQSEVIVCTGAKHALYTLFQVLLDEGDEVIIPTPYWVSYPEQVKLAGGKPVFVEGLEENSFKISPEQLEKAVTEKTKAVIINSPSNPTGMMYTEEELKALGEVCLRRNVLIVSDEIYEKLIYGGKKHVSIAQLSPELKNQTVIINGVSKSHSMTGWRIGYAAGSEPIIKAMTNLASHSTSNPTSVAQYGAIAAYNGPNEPVEEMRKAFEERLNKVYELLVDIPGLTCLKPEGAFYLFPNAKKAAESCGFSSVDEFAEALLEEEKVAIVPGSGFGAPDNIRLSYATSLSLLEEAVERIRRFVVNRSR

SEQ ID NO: 28867 - protein, 127 aa, Bacillus licheniformis ATCC 14580
MYRTLMSAKLHRARVTEANLNYVGSVTIDEDLLDAVGMMANEKVQIVNNNNGARLETYIIPGERGSGVVCLNGAAARLVQVGDVVIIVSYAMMSEEEAKTHKPKVAVLNERNEIEEMLGQEPARTIL

SEQ ID NO: 28868 - protein, 525 aa, Bacillus licheniformis ATCC 14580
MFRVLVSDKMSSDGLKPLMEADFIEIVEKNVAEAEDELHTFDALLVRSATKVTEELFKKMTSLKIVARAGVGVDNIDIDEATKHGVIVVNAPNGNTISTAEHTFAMFSALMRHIPQANISVKSREWNRSAYVGSELYGKTLGIIGMGRIGSEIASRAKAFGMTVHVFDPFLTQERASKLGVNANSFEEVLACADIITVHTPLTKETKGLLNKETIAKTKKGVRLVNCARGGIIDEAALLEALESGHVAGAALDVFEVEPPVDSKLIDHPLVVATPHLGASTKEAQLNVAAQVSEEVLQYAQGNPVMSAINLPAMTKDSFEKIQPYHQFANTIGNLVSQCMNEPVQDVAIQYEGSIAKLETSFITKSLLAGFLKPRVAATVNEVNAGTVAKERGISFSEKISSNESGYENCISVTVTGDVTTFSLRATYIPHFGGRIVALNGFDIDFYPAGHLVYIHHQDKPGAIGHVGRILGDHDINIATMQVGRKEKGGEAIMMLSFDRHLEDDILAELKNIPDIVSVKAIDLP

SEQ ID NO: 28869 - protein, 368 aa, Bacillus licheniformis ATCC 14580
MQVQEKRILVINPGSTSTKIGVFHDDRSIFEKSIRHDEAELQQYQTIIDQYSFRKQAILETLHEQGINISKLDAVCARGGLLRPIEGGTYEVNDAMIVDLKNGYAGQHASNLGGIIAREIADGLNIPAFIVDPVVVDEMAPIAKISGTPAIERRSIFHALNQKAVARKAAWQFGKRYEDMKMIITHMGGGITIGVHCRGRVIDVNNGLHGEGPLSPERAGTIPAGDLIDMCFSGEYTKDELMKMLVGGGGLAGYLGTTDAVKVEKMIKEGDQKAALIYEAMAYQIAKEIGAASAVLKGEVDVIILTGGLAYGKSFISSIRQYIDWISDVVVFPGENELQALAEGAFRVLNGEEEAKQYPNQRRESHGN

SEQ ID NO: 28870 - protein, 301 aa, Bacillus licheniformis ATCC 14580
MTQESFKSGFVSIIGRPNVGKSTFLNRVIGQKIAIMSDKPQTTRNKVQGVLTTDTSQTIFIDTPGIHKPKHKLGDFMMKVAHNTLKEVDLILFMINAEEGYGKGDEFIIERLKGVKTPVFLIVNKIDRIHPDELLVLIDEYRTRYPFQEIVPISALEGNNIDTLLKQIEDYLPEGPQFYPSDQVTDHPERFIISELIREKVLHLTREEIPHSIAVSIESIQERENGSVYVSATIVVERDSQKGIVIGKRGSLLKEIGKRARTDIEALLGSSVFLELWVKVQKDWRNKMSQLRDFGFREDEY

SEQ ID NO: 28871 - protein, 366 aa, Bacillus licheniformis ATCC 14580
MEKVVCIGCGVAIQTEDKNKLGYAPEASLLKEDVICQRCFRLKNYNEIQDVSLTDDDFLKILHGIGETDSLIVKIVDIFDFNGSWINGLNRFVGGNPILLIGNKADILPKSVKRERLVNWMKREAKELGLRPVDVLLVSAGRGQGMKDAIDAIEHYRQGKDVYVVGCTNVGKSTFINRIIKEVSGEDDIITTSQYPGTTLDAIEIPLDDGSAMYDTPGIINHHQMAHYVAKRDLKILTPKKELKPRTFQLNEEQTLFFGGLSRFDYASGGRSSFVCYMPNELKIHRTKLENADQLYEKHAGEMLAPPAKEDLDSFPALVKHTFTIKEPKTDVVFSGLGWVTVQGANQKIVAHAPKGVHVFLRRSLI

SEQ ID NO: 28872 - protein, 379 aa, Bacillus licheniformis ATCC 14580
MERIYLDHAATSPTDPRVVEKMLPYLTENFGNPSSIHSFGRESRKWLDSTRELIAQEIGAHPNEIVFTSGGTEADNMAILGSALAREKQGRHIITTKIEHHAVLHTCNRLEEMGFDVTYLDVDESGRISAEQVKDALRDDTILVTVMYGNNEVGTIQPIDEIGDLLKDHPALFHTDAVQAFGFLPIDVQKSRIDMMSVSGHKLNGPKGTGFLYVNENVKLSQLLFGGEQERKRRAGTENVPGIAGLGEAVLLSGREREEKSDLYRRFKDIITRTLEAEGVSFDVNGSRRHSLPHILNLYFPGVSVESLLVNLDMAGIAVSSGSACTAGSVLPSHVLSAMFGEEDDRLTSSVRISFGFGNTEEQVERAAKELAKVVKRLS

SEQ ID NO: 28873 - protein, 392 aa, Bacillus licheniformis ATCC 14580
MIYLDYAATTPASKEALDAFQKLSTDVYGNSSSLHDAGGKAENILRCCRQRMAELLSGEEEGVYFTSGGTEANFLAIHSILNGLPAGKKRFLMTEMEHQSIHILKRHLEMLGFDVDLMKPNASGIITTDILERHLRPDTGLVSIQHANSETGVIQPLAKLSAYLHKRDVLLHSDCVQTFAKIPVRIDELGADALSVSSHKVYGPKGVGAVYIRPGVNWKPVYPGTLHENGFKSGTVNVPGIGAFITAADSTINRMDAAHLKFQELRAGFLEGVKDRKLPVSLAVPDSANSHVLPHIIGCFFHSFEGQYTMLECNRRGICISTGSACSAGYHEPSNTMKALLIPRELALQFVRISFGCDTTSEHVDRLLDVLEDMMNEKGDHRIDRRIKTYGS

SEQ ID NO: 28874 - protein, 428 aa, Bacillus licheniformis ATCC 14580
MFVDQVKIYVKGGDGGNGMVAFRREKYVPKGGPAGGDGGKGGDVVFKVDEGLSTLMDFRYQRHFKAARGEHGMSKNQHGRNAEDMVVKVPPGTVVIDDDTKQVIADLTEHGQEAVIAKGGRGGRGNTRFATPANPAPQLSENGEPGKERYIVLELKVLADVGLVGFPSVGKSTLLSVVSSAKPKIADYHFTTLNPNLGMVETEDGRSFVMADLPGLIEGAHEGVGLGHQFLRHIERTRVIVHVIDMSGLEGRDPYEDYVTINKELEQYNLRLTERPQIIVANKMDMPDAEENLKAFKEKLTDDYPVFPISAVTRQGLRDLLFEIADRLETTPEFPLYDEEDMAENRVMYKLEDEEAPFEISRDPDGTFVLSGAKLERLFKMTDFSRDESVKRFARQLRGMGVDDALRARGAKDGDTIRLLEFEFEFID

SEQ ID NO: 28875 - protein, 102 aa, Bacillus licheniformis ATCC 14580
MYAIIQTGGKQIKVEEGQTVYVEKLAAEAGETVTFDNVLFVGGENVKVGSPTVEGATVTGKVEKQGRAKKITVFKYKPKKNQHKKQGHRQPYTKVVIEKINA

SEQ ID NO: 28876 - protein, 409 aa, Bacillus licheniformis ATCC 14580
MGLIVQKFGGTSVGSVEKILNVAYRVIEEKQRGHDVVVVVSAMGKSTDSLVALAKEITEQPSSREMDMLLTTGEQVTISLLTMALQNKGYDAVSYTGWQAGIETENIHGNARITNIDTAKLKERLNEGKIAVVAGFQGVTAEGEITTLGRGGSDTTAVALAAALKADKCDIYTDVPGVFTTDPRYVKTARKLAGISYDEMLELANLGAGVLHPRAVEFAKNYQVPLEVRSSTEKEAGTLIEEESSMEQNLIVRGIAFEDQITRVTVCGLASGLTTLSTIFTTLAKQNINVDIIIQSVTGTSKTSISFSVKTEDLKRTVEVLEEYKDALDYEQIETENRLAKVSIVGSGMISNPGVAAEMFAVLAEKNIQVKMVSTSEIKVSTVVNEGDMVKAVEALHDAFELSKQTAVI

SEQ ID NO: 28877 - protein, 403 aa, Bacillus licheniformis ATCC 14580
MTQKKKVVLAYSGGLDTSVAIKWLQEQGYDVVACCLDVGEGKDLAFVQQKALQVGASNSYVIDAKEEFAKEFALTALQAHTLYEGKYPLVSALSRPLIAKKLVEVAEKENAQAVAHGCTGKGNDQVRFEVSIKSLNPDLEVLAPVREWKWSRDEEIAYAEKHGIPIPINLDSPYSIDQNLWGRSNECGVLEDPWAAPPEGAYDLTKPLEKTPDTPDVIEIAFEEGVPVSIDGTHYPLSDLILKLNELAGAHGVGRIDHVENRLVGIKSREVYECPGAMTLIKAHKELEDLTLVKEVAHFKPIIEQKMAEVIYNGLWFSPLKDALSGFLKETQKHVTGVVRVKLFKGHAIVEGRKSEYSLYDEKLATYTKDDAFDHHAAVGFIELWGLPTKVNSIVQKKEQIKA

SEQ ID NO: 28878 - protein, 381 aa, Bacillus licheniformis ATCC 14580
MIYLDNSSTTKPYPELLQIYEQVNQRFFGNPSSLHRHGVEADQLLSEARKQIKSALSLKNHDIVFTSGASEANNMALKGIALAHAQKGKHIIASSIEHPSVTESLEQLKTAFGFEVTYLPVDGHGFVSLEDLKQALRKDTILVSIMHVNNETGVIQPLEEIGKIVKENTRAYFHVDHVQGINKVPLDISGAAIDLCTISGHKFHGLKGTGALILNERISLFPLISGGEQQNNRRAGTENTAGAVTLAKAINLSKQDYNHYIEEIKAAKSAFIKELKELKGVILNTPEENSAPHIINFSVPGLKAEVLLHMLEERDIFVSTTSACSSKQHKPSKVLLEMGKGEGAASSSIRISMTYRDNHEIVGPFMTALKESLHKLKGIMR

SEQ ID NO: 28879 - protein, 510 aa, Bacillus licheniformis ATCC 14580
MKNISSVFWIVIVITAAAVLWGIVAPDNLQALTTSIQGYVTNTLGWYYLLVVSLFVAFSIFLIFSPIGKIRLGKPEEKPEFSRLSWFAMLFSAGMGIGLVFYGAAEPISHYAISSPSGETETAQAFRDSLRYTFFHWGLHAWAIYAIVALCIAYFQFRKDAPGLISATLFPVFGDRVNGPLGKGIDCIAVFATVVGVATSLGIGATQINGGLHYLFGVPNSFQVQLAIIAVITVLFLISAWSGIGKGIKYLSNTNMVLAGVLMIFMLFVGPTVLIMNSFTDTIGTYISNVVQMSFRLAPNDPDSREWINSWTIFYWAWWISWSPFVGIFIARVSRGRTIREFLIAVLFAPTVLAFLWFSIFGVSAMDLQQKGIFNVAKLSTDTMLFGMFDHYPLAMITSIVALLLIAVFFITSADSATFVLGMQTTYGSLNPENSVKISWGIIQSAMAGALLYSGGLSALQNTAILAALPFSVVVILMIVSLYKSLSQERKEIKQAEKFQKPRSPRVKKA

SEQ ID NO: 28880 - protein, 632 aa, Bacillus licheniformis ATCC 14580
MCGFVGVFNHRPSSETAAQEELIKQMNEMIVHRGPDDDGYYHDEHVGFGFRRLSIIDVENGGQPLSYEDDSYWIIFNGEIYNYIELKDELLSKGYEFKTDSDTEVLLATYRHYKQEAASKLRGMFAFLIWDKKEQLLYGARDPFGIKPLYFTKTDGHVYFASERKSLMAVDADLELNEKALQQYTSFQFVPEPETLDKKVQKVESGHQFTVRPGEDIQFKTYWKVQFKPVQTEEDKLVQEVRDAIFDSVKVHMRSDVPVGSFLSGGIDSSFIVSVAKQFHPNLKTFSVGFEHEGFSEVDVAKETADKVGVENFSAIISPEEYMNELPKIVWHLDDPLADPAAIPLYFVAKEAKKQVTVVLSGEGADELFGGYNIYREPLSLKPFERIPSPLKKMLLRVASAMPEGMKGKSFLMRGCTPLEDRYIGNAKIFEEGMKSKLLRQYDSNLSYCDVTKPYFEESRSYSEINKMQYVDIHTWLRGDILLKADKMTMANSLELRVPFLDKVVFEAASKIPEELKTKNGTTKYLLRKAAEGIVPEHVLNRKKLGFPVPIRHWLKNEMHDWAVNIIKESETDAYIHKDYVLQLLEDHCANKADNSRKIWTVLIFMIWHSIFVEKRFVPEELNHQPKEVIIV

SEQ ID NO: 28881 - protein, 390 aa, Bacillus licheniformis ATCC 14580
MRTTYISKAAQQIKPSGIRKFFDLASTMEGVISLGVGEPDFVTAWNVREASILSLEQGYTSYTANAGLLSLRKEISAYLNKRFHLDYAPDDELIVTVGASQALDIAVRAILDPGEEVLIPEPCFVAYEALVSLAGGKAVHIHTNAERGFKASAADFEAVLTERTKAIILCTPSNPTGSVYSKKELEEIAAFAEKHDLIVIADEIYAELTYDEAYTSFAEIAGMKKRTILISGFSKGFAMTGWRLGYVAAPAYLRDPMLKIHQYSMMCAPSMAQFAAEEALKNGLEDVEKMKKSYRRRRNVFVDSLNEIGLDCHQPGGAFYAFPSVKKTGMSSEQFAEELLISEKVAVVPGNVFGPSGEGYIRCSYASSLEQLQEALVRMKRFVEKVGAVK

SEQ ID NO: 28882 - protein, 379 aa, Bacillus licheniformis ATCC 14580
MIIGVPKEIKNNENRVALTPGAASQLIAAGHRVIVEKDAGTGSGFENEDYVSVGAEISEQAEAVWEAAEMVMKVKEPLPEEYPYFREGLILFTYLHLAAEPSLAEALKQKGVTAIAYETVSNGRSLPLLTPMSEVAGRMAAQIGAQFLEKPKGGKGILLAGVPGVARGKVTIIGGGVVGTNAAKIAAGLGADVTMIDLSADRLRQLDDQFGNQIKTLMSNPVNIADAVAEADLLICAVLIPGAKAPTLVTEEMVKQMKPGSVIVDVAIDQGGIVETVDHITTHDNPTYVKHGVVHYAVANMPGAVPRTSTVALTNVTVPYALEIANKGAEKAILENPALKAGVNTANGHITYEAVARDLNYGYVPAELAIENSSSAAGA

SEQ ID NO: 28883 - protein, 320 aa, Bacillus licheniformis ATCC 14580
MDKPFVYVTRKLPEEQLSALKEEAHIEMWEKEEEPCPRAILKEKAKKAHGLLTMLSDTIDEELLKGAPHLKVVANLAVGYDNIDVEAAQKHRVICCNTPGVLTESTADLTFALLMASARRIVEASDWIRQGKWTGWGPLLLAGADVHHKTIGIVGMGSIGQAVARRAKGFGMKILYHNRTRNPDAEAELGASYLPFDELLEQADFVVCLTPLTHETKHLFNRSAFKKMKRSAIFINVSRGQVVNEDDLYEALVEKDIAGAGLDVFAEEPVQKDHPLVSLPQVTALPHIGSAAVETREAMMRLCAENIALVLRGKQAKTEI

SEQ ID NO: 28884 - protein, 261 aa, Bacillus licheniformis ATCC 14580
MAASTLTIKDLHVEIEGKEILKGVNLEIKGGEFHAVMGPNGTGKSTLSAAIMGHPKYEVTKGSITLDGKDVLEMEVDERAQAGLFLAMQYPSEISGVTNADFLRSAINARREEGDEISLMKFIRKMDENMEFLEMDPDMAQRYLNEGFSGGEKKRNEILQLMMIEPKIAILDEIDSGLDIDALKVVSKGINKMRGENFGCLIITHYQRLLNYITPDHVHVMMQGRVVKSGGPELAQRLEAEGYDWIKHELGIEDETVGQEA

SEQ ID NO: 28885 - protein, 391 aa, Bacillus licheniformis ATCC 14580
MKEAVIVSGARTPIGKAKKGSLRTVRPDDLGAYAVRETLKRAGGYEGNIDDLIIGCATPEAEQGLNMARNIGALAGLPHTVPAVTINRYCSSGLQSIAYGAEKIMLGAADTIIAGGAESMSIVPMMGHIVRPNAALAETAPEYYMGMGHTAEQVAVKYGVSREDQDAFAVNSHQKAAKAIAEGKFEDEIVPVDVTVREVDEHHNLKERTFTFSADEGVRPGTTKDVLSTLKPAFSANGSVTAGNSSQTSDGAAAVMIMDREKADALGLKPLAKFRSFAVGGVPPEVMGIGPVEAVPRALKMAGLELSDIGLFELNEAFASQAIQVIRSLGIDEEKVNVNGGAIALGHPLGCTGTKLTLTLIHEMRRRSEQFGIVTMCIGGGMGAAGVFELV

SEQ ID NO: 28886 - protein, 467 aa, Bacillus licheniformis ATCC 14580
MEQTKKWGFWLLTAFVVGNMVGSGIFMLPSTLAQTASPLGVTAAWLVTGAGVLMIALVFGHLSIRRPDLKAGPQSYARALFSDPKKGNAAGFTMVWGYWVASWISNVAIITSLAGYLTTFLPILTDGRELVEFGGHPVTLGQLLTFIVCTILLWGTHFILVSSINGAGKLNFLATFSKVLGFVLFIVAGLFVFQTALFESFYFPIESEGKSIGLGGQVHNAAISTLWAFVGIESAVILSGRASSQRDVKRATITGLLIALGIYMIITLITMGVIPHDQLQASDKPFVDVLHVIIGSFGSVIMAVLAIVSLFGSMLGWILIGAEVPYQAAKAGDFPAFFAKTNKKGSPVNSLIVTNVMSQIFIFSTISGTISEAFTFLTTSATLAYLVPYLIAALFSLKLILKGETYGELKGSRTGDGIIALAALAYSLWVIVSGTSDLTTFILGIGLFFVGLAIYPFVYKKFKNNQV

SEQ ID NO: 28887 - protein, 455 aa, Bacillus licheniformis ATCC 14580
MEKDMQKLERTMTSRHIMMMALGGAIGAGLFKGSSKAIDLAGPSVMIPYLIGGVILLFIMQGLAEMAVRNSEARTFRDLVQSILGPYAAYFLDWIYWKMWVLNIAAEAVVAAMFLQYWLPGLPIWVLALFVSLVITSVNLLSVKSFAETEYWLALIKITVIVVFIISGFILLFFSFGQHSAVGFTHLTDHGGFFPNGAGGLITAMLVVIYSYGGTEIIGVTLAETKNPEKVVPKAVRGTLTRIIAFYLLPFFVIVSLIPWNQVNGVSESPFVMVFKMIGVPGADHLMNAVILLAVISSMNSGLYGASRILYTQASDGRMPKIFSRLSARKVPVYSILLCTSFLYLGVLFSLFAGSQTFEYLMGSLGYTVLVIWMLIAAAHLKSRKRNQTAGNGYYVKWFPYTTWVAIISLTAILIGVILTTSIVITLVTAGIYLLISAAYFFKGRNQTAGQTAAS

SEQ ID NO: 28888 - protein, 316 aa, Bacillus licheniformis ATCC 14580
MKVVCTSPSFAKYSDDPVLFLEKKGMSLERLPADITEEQFIEAAEGADAAIVAFNQITPYVLDRLPSLKIVCKHGVGVDNIDLHAAKERNVWVTNAPNANKHAVADFVFGLMLSAARQIPAADRETKLGKWPRIFGSDVYGKTLGIVGLGMIGKEVAKRAQGFNMTVLAYDVFPDRAFAADHHIHFTELDQLLKECDFITLHMPLTAETENMIGEKELAAMKETAYLINASRGGIVSECALYDALASGGIAGAALDVYQTEPLKQHPLFELDRFIAVPHIAGYTRDAVQNLGMICVKNIASVLIDKQKPEFVVNGL

SEQ ID NO: 28889 - protein, 539 aa, Bacillus licheniformis ATCC 14580
MLRFSGRFEGYSLKRFQKDIVAGMVVGVVAIPLGMAFAIASGVKPEHGLYTVIVAGILISLLGGSKYQIGGPTGAFVPILFAIVLQYGFENLLIAGFMAGVILVILGLLKLGKIIKFIPRPVIIGFTAGIAVIIFTGEIAKFLGLRNVEKHESFYMNMREVVINLNTLSFYSILTAVVSLFFVLFTPKVLPKVPGALAGLLVSTVMATMLFPEQVVTIGSAYGEIPRSLPSFQFPELSLEKIIYLMPPALAIAMLGGIESLLSAMVADNMKGTRHDSNKELVGQGIANIAAPLFGGIPATGAIARTATNIKTGAASPISGIVHGVFVLLVLLLFAPYASLIPLASMSPILMVVAWNMSERKEFINILKIRNSDSAVLVVTFLLTVWQDLVFGVAAGILLAIITFIARMSKSFRIKKDVSESIVQSAAAAEEKHFQRSVSIYSVEGPLFFGSSNSLEDSILDKGHPPKLLILLMNKVDYMDSSAEGSLMTIVNRVHQQNGKVMIVGLQQQPRELLHKTGLFHKIGKKHFVDRPEQIFDVT

SEQ ID NO: 28890 - protein, 323 aa, Bacillus licheniformis ATCC 14580
MKPFVYVTKPVPKEIEEMLAEHCEYEIWTSRERIPRTTLLEKIKEADGLLTSGTKIDRELLSNALKLKIVSNNSVGYDNFDIEAMKEKSVIGTHTPYILDDTVADLAFGLILSSARRIAELDRYVREGKWTKSEDDESLFGSDVHHRTLGIIGMGRIGEQVAKRAALGFDMEVLYYSRSRKPDTEKKTGAVYTGFHELLERSDFIVLVTPLTDETYRLIGEAEFKKMKPSSIFINISRGKTVDEQALIQALKEGWIKGAGLDVFEKEPIEKDNPLLSLSNVTLVPHIGSSTHVTHVNMLKSAVQNLIDGLQGKRPKDIVKELR

SEQ ID NO: 28891 - protein, 572 aa, Bacillus licheniformis ATCC 14580
MNNVAAKNETLTVRGAELVVDSLIQQGVTHVFGIPGAKIDAVFDVLKDKGPELIVCRHEQNAAFMAAAVGRLTGKPGVCLVTSGPGASNLATGLVTANTEGDPVVALAGAVKRADRLKKTHQSMDNAALFQPITKYSAEVEDANNIPEAVTNAFRAAASGQAGAAFLSFPQDVTAGPATAKPVKTMPAPKLGAASDEQISAAIAKIHNANLPVVLVGMKGGRPEAIEAVRRLLRKVKLPFVETYQAAGTLSHDLEDQYFGRIGLFRNQPGDMLLEKADVVLTVGYDPIEYDPVFWNGKGERSVIHLDEIQADIDHDYQPEIELIGDIAETLNHIEHDSLPVSIDESFAPVLDYLKKALEEQSEPPKETKTDLVHPLQIVRDLRELLSDDITVTCDIGSHAIWMSRYFRTYRPHGLLISNGMQTLGVALPWAIAATLVNPGQKVVSVSGDGGFLFSAMELETAVRLKAPIVHIVWNDSTYDMVAFQQEMKYKRTSGVDFGGIDIVKYAESFGAKGLRVNSPDELAEVLKAGLDAEGPVVIDIPVDYSDNIHLADQRFPKKFEEHFNKEASKQS

SEQ ID NO: 28892 - protein, 221 aa, Bacillus licheniformis ATCC 14580
MNMLIDSAHIPEIERLLDSFPAGGVTTNPALIARENKPFKQQIQDIRRLLPEHLPLHAQVIADHWRDMVDQAKALYNWLDGNVSVKIPVTTQGLYAIRKLAAENIQTTGTTVYTAAQAVLAAKAGASYVAPYVNRIDQEYGNGAGVVKTIVGLFNTNCLNCKVLAASFKHNRQILAVMEAGSHEATISPELISRLADHPAVDRDIHAFREIWHSQYGTFSF

SEQ ID NO: 28893 - protein, 211 aa, Bacillus licheniformis ATCC 14580
MLFFIDTANLDEIKEAHALGVLAGVTTNPSLVAKENISFHDRLREITEVVSGSVSAEVISLKAEEMIEEGKELAKIAPNITVKIPMTPDGLKAVKALTDLGIKTNVTLIFSANQALLAARAGATYVSPFLGRLDDIGHNGLDLISEIKQIFDVHGLDTQIIAASIRHAQHVTEAALRGAHIGTMPLKVIHQLTKHPLTDKGIEQFLADWNK

SEQ ID NO: 28894 - protein, 392 aa, Bacillus licheniformis ATCC 14580
MARSVIAGGARTPFGKLGGALQSKTAAELGGIAVKEALKRSGVNPEDVDEVIMGSVLQGGQGQLPSRQAARFAGLPWDVKTETINKVCASGLRSVTMADQIIRAGDAEVIAAGGMESMSNAPYLLQKARWGLRMGDGAVKDLMIADGLTCSFTGVHMGSYGNAAAKELEIAREEQDRWALRSHMRAVHAADSGALGEEIVPVSIQEKRDGELTVDQDEAPRRDTSMERLSKLAPVFDHNGTITAGNAPGVNDGACSLIVMNEDKAKELNVKAPAVIKAHTSIAVEAKDFPKTPGLVIRELLNKTGAELSDIKLFEINEAFAAVALASGKIAGLDMEKVNVNGGAIAIGHPIGASGARIILTLMYELKRRGGGIGIAAICSGGGQGDAVMIEV

SEQ ID NO: 28895 - protein, 290 aa, Bacillus licheniformis ATCC 14580
MRFDEAYSGKVFIASRPDWEEADAILYGMPMDWTVSYRPGSRFGPARIREVSIGLEEYSPYLDRELEEVHFFDAGDIPLPFGNPQKSLDMIEEYVDSILDKGKFPLGMGGEHLVSWPVIKAMYKKYPDLAIIHMDAHTDLRVDYEGEPLSHSTPIRKAAELIGPGNVYSFGIRSGMKEEFEWAKENGMHISKFEVLEPLKAVLPKLAGRPVYVTIDIDVLDPAHAPGTGTVDAGGITSKELLASIHEIARSDVNVVGGDLVEVAPVYDHSEQTANTASKLIREMLLGWVK

SEQ ID NO: 28896 - protein, 323 aa, Bacillus licheniformis ATCC 14580
MADLFTTVQGKVAGKGVKIVFPEGLDERILTAVNKLAGNNVLKPILVGNEQEIKDKANGLNLTLDGVDIYDPHTYEGMEDLVQAFVERRKGKATEEQARQILLDENYFGTMLVYKGLADGLVSGAAHSTADTVRPALQIIKTKEGVKKTSGVFIMARGDEQYVFADCAINIAPDSQDLAEIAIESANTAKMFDIEPRVAMLSFSTKGSAKSDETEKVANAVAIAKEKAPELTLDGEFQFDAAFVPSVAEKKAPDSVIKGDANVFVFPSLEAGNIGYKIAQRLGNFEAVGPILQGLNMPVNDLSRGCNAEDVYNLALITAAQAL

SEQ ID NO: 28897 - protein, 512 aa, Bacillus licheniformis ATCC 14580
MSATAFILFLAIVALTLVITYFAAKQTKTANEFYTAGGGLTGIQNGLAIAGDYMSAASFLGIAGMIALNGFDGFFYSIGFLVAYLVVLYIVAEPLRNLGKFTMADMIASRFKQKKIRGVAALNTITISTFYMIAQLVGAGALIKLLLGIDYTLAVCIVGVLMTIYVVFGGMIATSWVQIIKAVLLMAGTLIISVIVFSKFGFSLTNMFEQMKTATPLGADFLNPGNKYKVPLETLSLNLALVLGTAGLPHILIRFYTVKDAKTARKSVVSATWIIGIFYIMTVFLGFGAAAFVGFENILAADKAGNMAAPLLAQALGGDFLFAFVSAIAFATILAVVTGLVLSAASAFAHDIYSQIIRKGAATEKEQMIAARWASIGVSVLSILLAVFAQSLNVAFLVSLAFAVAASANLPLIIFTVFWKRFNAAGALAGSLTGLLSALILVSISPSVWDPAGNAIFVGDPLIPLSNPGIISIPLGFLGAYLGTILSSKTPGQDAFAEIQVKAHTGIHMDQS

SEQ ID NO: 28898 - protein, 488 aa, Bacillus licheniformis ATCC 14580
MNYGILISIGIYMAGMLFIGYFAYRRTSNLTDYMLGGRNLGPAVTALSAGASDMSGWLLMGLPGAMFLNGLSSGWIVVGLTIGAYLNWVYVAPRLRTYTETAGNSITIPDYFENRFKDGSRLLRMTSAFVILVFFTFYTSSGMVAGGELFRTAFHLDYRIGIWLTAGVVILYTLFGGFLAVSWTDFVQGTIMFIALILMPVVVFVQLGGIAPAFSEVNAVNPDLLRPFQGTTVIGIISLLAWGLGYFGQPHIIVRFMAISSVKELKSARRIGMGWMIFSICGAMLTGLVGIAYFSANHLTLKNAETIFIKLADLLFPSMITGFLLAAILAAVMSTISSQLLVTSSALTEDFYKAFIRKGASDKELVLVGRLSVLAISLIALLMALHPNETILNLVGYAWAGFGAAFGPVVLLSLYWKRMTKWGALAGMLSGALTVIVWEQVKAFDPVYEIIPGFIVCTVVIIAVSLMTKKPRAEIEKEFETAVEQLKG

SEQ ID NO: 28899 - protein, 571 aa, Bacillus licheniformis ATCC 14580
MIRRFFSYYKPHKRLFFIDFSSAIVVAVLELAFPLVVQWFIDTLIPGGDWLEIVWVSIGLLLIYLLSTGLQYIVNYLGHKLGINIETDMRQELFQHVQRQSFRYFDNTKTGHIISRITNDLFDIGELAHHGPEDLFIAVMTFLGAFWIMLTINVKLALVAVLFVPLLIILIIYSNIRMNRAWRQMYSEIADVNARVEDSVSGVRVVQSFTNERFEISRFLKNNQKFRKAKLKGYKTMALTTAGTFLMTRLMILAVLVFGAWLSFSGNMSYGEFVGFVLYVNVLFKPIDKISAILELYPKGMAGFKRFTELIDTKPQIVDRKDAIDVPALEGNIVFKNVTFGYEKHKPVLRGIDLSIKAGETVAFVGPSGAGKTTISSLIPRFYDIDGGAITIDGIDIRDMTKRSLRSQIGIVQQDVFLFTGTLRENIAYGKLDATDEEIQRAAKMAHLEQLIESLPDGYETQVGERGLKLSGGQKQRIAIARMFLKNPPILILDEATSALDTETEQVIQNALTELAKDRTTLVIAHRLATIRNADRIVVVTENGIAEEGTHDELVERGGIFANLHRVQYQS

SEQ ID NO: 28900 - protein, 262 aa, Bacillus licheniformis ATCC 14580
MESKSLVLVEELALKKQSIFVQSPLRYLLRAMLASMFIGFGVIVAFKTGNLFYVEHSPFTYPIAAITFGGAIILIVYGGGDLFTGNTFYYTLAALRKKMRWPTVIKLWMFSYAGNLMGAVFFAGLIFATGLFKDPSSTGFILSVAEHKMNTPVTELFFKAILCNWLVCLAFFVPMAQKGDGAKMFSMMLFVFTFFISGYEHSIANMATFAVSLVTEHPETISIAGAIHNLIPVTLGNLVGGAFMMGFMYHYANKPGGEEIIK

SEQ ID NO: 28901 - protein, 376 aa, Bacillus licheniformis ATCC 14580
MIIGIPKEIKNNENRVAITPAGVVALKKSGHQVLIEQGAGLGSGFEDADYKAAGADILAEAKDVWGKADMVMKVKEPISSEYGYFRKGLVLFTYLHLAAEPKLAKALVDSGVTAIAYETVEVNRTLPLLTPMSEVAGRMASQIGAQFLEKSKGGKGILLSGVPGVKRGKVTIIGGGVVGTNAAKIAVGLGADVTLIDLSAERLRQLDDQFGKDIQTLMSNPLNIAEAVKDSDLVIGAVLIPGAKAPKLVTEEMIKSMSPGSVVVDVAIDQGGIIETVDKITTHDDPTYTKHGVVHYAVANMPGAVPRTSTIGLTNVTMPYALQIANKGVEQAVAENQALALGVNVANGSITYKAVARDLGYEYVSVEDAFQTVTAG

SEQ ID NO: 28902 - protein, 170 aa, Arabidopsis thaliana
MQSSNVTDCTMRKRGTKRKIEIEKRMTKQQRSVACSKRRPTLFSKAADLCLLSGANIAVFVTSPDENSDVVYSFSGYSHASEIVDCYLNNKSPPKTTINPESAKFWWEEPDLYRDCDDLSELRIIEDRLMRTKKHLMDYLEKKEKSHSVSKSDQNPNNDTSHHLINLVTW

SEQ ID NO: 28903 - protein, 290 aa, Bacillus cereus E33L
MRFDEAYSGKVFIKSHPSFEESEVVIYGMPMDWTVSYRPGSRFGPARIREVSIGLEEYSPYLDRELEEVKYFDAGDIPLPFGNAQRSLDMIEEYVSKLLDAGKFPLGLGGEHLVSWPIFKAMAKKYPDLAIIHMDAHTDLRESYEGEPLSHSTPIRKVCDLIGPENVYSFGIRSGMKEEFEWAKEVGMNLYKFDVLEPLKEVLPKLAGRPVYVTIDIDVLDPAHAPGTGTLEAGGITSKELLDSIVAIANSNINVVGADLVEVAPVYDHSDQTPVAASKFVREMLLGWVK

SEQ ID NO: 28904 - protein, 438 aa, Bacillus cereus E33L
MHHDEKNKIGLTVALSIVVGTIIGSGVFMKPGSVLDYSGSSNMAILAWVIGGLLTLASGLTVAEIGAQIPKNGGLYTYLEEIYGSFWGYLSGWMQTIVYGPAIIGTLGLYFSSLMINFFYLDKVWNLPIAIGTVVFLGVVNSMGTKYGGIVQTITTIGKMIPIVLIVVLGFWKGNSDIFNVVVPISENQSIGMAILATLFAYDGWILLASIGGEMKNPTKLLPKAMTVGILIVTAAYVLINLALLNVLPAVEIVDLGENATATAAGMLLGEYGGKIISIGIIVSIFGCLNGKILTFPRIPMSMAERGQLPFAKFIAKESPRFKTPANAITVEIILGIILMIISDPNKLSEISVFIIYIFYVMTFIGVFILRKRNKNKERAYSVPLFPIVPIVAIFGSLFVIGSAIINDPLSCFLSIGIVFTGLPVYWYLNKKNKTEVS

SEQ ID NO: 28905 - protein, 390 aa, Bacillus cereus E33L
MREAVIVAGARTPIGKAKRGSLKTVRPDDLGALVVKETLKRANYEGPIDDLIFGCAMPEAEQGLNMARNIGGLAGLSYDVPAITINRYCSSGLQSIAYGAERIMLGHSEAVLSGGAESMSLVPMMGHVVRPNSRLVEAAPEYYMGMGHTAEQVAVKYGISREEQDAFAVRSHQRAAKALAAGNFADETVSVDVTLRTVGANNKLQEETITFAQDEGVRAETTLDILGKLRPAFNVRGSVTAGNSSQMSDGAASVLLMDREKAVSDGMRPLAKFRSFAVAGVPPEVMGIGPIAAIPKALKLAGLELSDIGLFELNEAFASQSIQVIRELGLDEEKVNVNGGAIALGHPLGCTGAKLTLSLIHEMKRRNEQFGIVTMCIGGGMGAAGVFELL

SEQ ID NO: 28906 - protein, 396 aa, Bacillus cereus E33L
MKQFELSRAAESLQPSGIRKFFDLAANMKGVISLGVGEPDFVTPWNVRQACIRSIEQGYTSYTANAGLLELRQEIAKYLKKQFAVSYDPNDEIIVTVGASQALDVAMRAIINPDDEVLIIEPSFVSYAPLVTLAGGVPVPVATTLENEFKVQPEQIEAAITAKTKAILLCSPNNPTGAMLNKSELEEIAVIVEKYNLIVLSDEIYAELVYDEAYTSFASIKNMREHTILISGFSKGFAMTGWRLGMIAAPVYFSELMLKIHQYSMMCAPTMSQFAALEALRAGNDEVIRMRDSYKKRRNFMTTSFNEMGLTCHVPGGAFYVFPSISSTGLSSAEFAEQLLLEEKVAVVPGSVFGESGEGFIRCSYATSLEQLMEAMERMERFVENKKRTKHNTFCP

SEQ ID NO: 28907 - protein, 330 aa, Bacillus cereus E33L
MRDKAKGDGTVKPKVYIAEPVPTFVENYLSEHCDYEKWEQNEKVPRDVLLEKIQDKDGLLNFGSAINEELLEAAPNLKVVSNISVGYDNFDLQAMEKRNVIGTNTPYVLDDTVADLVFALMLSAGRRVCELDSYVKNGEWNAEIGKEHFGLDVHHSTIGIIGMGRIGEAVAKRAKFGFDMDVLYYNRRRKEEAEQKFDATYCDLQTLLKQSDFIVLLTPLTDETYHLIGEKEFSFMKETAIFINASRGKTVDEEALIDALTEKKIFAAGIDTFTQEPIQKDNPLLSLQNVVTLPHIGSATLKTRQQMAMTAAENLVAGLQGKTPPNIVRG

SEQ ID NO: 28908 - protein, 380 aa, Bacillus cereus E33L
MIYFDNSATTKPYPEALQSYVTVAGKYFGNPSSIHSLGGEAERLLTQSRTIAAQLLHVKPSEIIFTSGGTEGNNLAIKGIAMRNRSRGKHIITTNIEHASVFEAYKQLEDLGFDVTYLPVNEHGVVSVEDVKRALREDTILVSIIHVNNETGAIQPVGEIGTLLSNYPKIRFHVDHVQGIGKVPLNLYASHIDLCSISGHKFHSVKGTGLLYVRDGVRLDPILSGGQQELKYRSGTENLPGIVAMVKALRMTMEQVKEKVAHLQSLQAELVRFFKEMEDVTINTSLAYAAPHILNVSFVGLKPEVVVHALEEHGVYVSTKSACSSKANEVSRVLVSMGVPHAAAASAIRISLAPENTMEEVKQFEGIVKETMPKLYEVMR

SEQ ID NO: 28909 - protein, 401 aa, Bacillus cereus E33L
MEKKKVVLAYSGGLDTSVAIKWLQEKNYDIIALCLDLGEGKDLAFVKEKALSVGAIKSYMIDVQEEFANEYALMAMQAHTLYEGKYPLVSALSRPLIAKKLVEIAEQEGATAVAHGCTGKGNDQVRFEVSIQALNPYLEVIAPVREWKWSREEEIAYAKENNVPIPINLDSPFSIDQNLWGRSNECGILEDPWAAPPEDAYEMTLALEDTPNKPEFVEIGFEAGVPTTLNGTAYPLSELIKTLNALAGKHGVGRIDHVENRLVGIKSREVYECPAAMTLITAHKELEDLTLVKEVAHFKPMIEQKITELIYNGLWFSPLKQALNAFLQETQKNVTGTVRVKLFKGHAIVEGRKSEYSLYDEKLATYTAQDEFNHDAAVGFISLFGLPTKVYSQVNQKKVEA

SEQ ID NO: 28910 - protein, 380 aa, Bacillus cereus E33L
MMIYLDYAATTPMSVEALQTYTKAASQYFGNEQSLHDIGGTASSLLQVCRKTFADMIGGKEQGVFFTSGGSESNYLAIQSLLNAQHKKHIITTPMEHASIRSYFQSLKSQGYTITEIPVDKSGLIRLVDLETAITEDTALASIQHGNSEIGTVQNIGEIGALLKKYNVLFHSDCVQTFGKLPIHVFEMGIDSLSVSAHKIYGPKGVGACYINPQVRWKQVFPETSHEKGFRPGTVNVPGIASFLTAAENILKNQQEESLRFKALRSYFLEQIQTLPLEIEVEGHSTSCLPHIIGVTIKGIEGQYTMLECNRRGIAISTGSACQVGKQEPSKTMLAIGKTYEEAKQYVRFSLGQQTTKDQIDTTIHALHTIGNQFYRGVKS

SEQ ID NO: 28911 - protein, 381 aa, Bacillus cereus E33L
MERIYLDHAATSPTHPEVVEKMIPYMTEIFGNPSSIHFYGRQTRHAVDEARRACARSIHANPNEIIFTSGGTEADNLALIGVARANRHKGNHIITTQIEHHAILHTCELLEREGFEVTYLPVDETGRVQVSDIQKALTEETILVSVMFGNNEVGAMQPIAEIGKLLKEHQAYFHTDAVQAYGLVEINVKEFGIDLLSISAHKINGPKGVGFLYAGANVKFEPLLIGGEQERKRRAGTENVPSIVGLQHAILLAEKTREQKNAQYEEFKDIMVSVFQNEDITFEVNGNLEYRLPHVLNISFTGMNIEPFLVNLDLAGIAVSSGSACTAGSIDPSHVLVAMFGKDSDQIRSSVRFSFGLGNTKEQIEKAAYETVKIVKRLTQN

SEQ ID NO: 28912 - protein, 367 aa, Bacillus cereus E33L
MSVNRILVINPGSTSTKIGVFDNERPVLEETIRHDEEQIGKYKRIIDQYEFRKETILEVLHSHGINISKLNAVCGRGGLLRPIEGGTYTVNDAMLEDLKNGFSGHHASNLGGILAYEIASGLNIPAFIVDPVVVDEMEPIARISGIAGMERKSIFHALNQKAVARKVAEELNHKYEDLNLLVTHMGGGITVGAHKKGKVIDVNNGLNGEGPFSPERAGTVPVGQLVEMCFSGEYYRDEMIKKLVGQGGLVSLIGTNDAIKVEQMVEKGDPEATLIYKAMAYQVAKEIGGASAVLHGKIDAIVLTGGLAYSKILVDEIKERVDWIADVIVHPGEDELQALAEGALRVLREEEAPKEYIVREKETVARG

SEQ ID NO: 28913 - protein, 391 aa, Bacillus cereus E33L
MHNVVITAAVRSPIGTFGGALKNVTPVELAVPVLQEAVKRGGVEPHEVDEVILGHCIQRTDEANTARTAALAAGFPDTVTGYTIQRQCSSGMQAIMSAAMQIQLGVSEVVVAGGVEAMSSSPYALKQHRWGQRLQHGEIRDTVWEVLEDPIHHIMMGETAENLVEQYEITREEQDEVALRSHTLALKAIESGYFDDQIVPITIKERRKEVVFSKDEHPRADITAEKLAGLKPAFRKGGSVTAGNASGLNDGSAVLVLMSEEKAKEKGLQPLARIVGYSVAGVDPKIMGIGPAPAIRKGLEKVDWSLEDADLFEINEAFAAQYLAVEKELGLDREKVNVNGSGVGLGHPIGCTGARITVSLIHELKRRGLEKGIASLCVGGGIGVALFIEAL

SEQ ID NO: 28914 - protein, 387 aa, Bacillus cereus E33L
MEQFINPRVKDIQISGIRQFSNMIQNYDNLISLTIGQPDFPTPSLVKEAAKRAITENYTSYTHNAGLLELRKAACNFVKDNYDLHYSPETETIVTIGASEAIDVAFRTILEPGTEVILPAPIYPGYEPIIRLCGATPIFIDVRETGFRLTAEALENAITEKTRCVVLPYPSNPTGVTLSKKELQDIADVLKDKNIFVLSDEIYSELVYEQTHTSIAHFPEMREKTIVINGLSKSHSMTGWRIGLLFAPSYLAGHILKVHQYNVTCATSIAQYAAIEALTAAKDAPKMMRHQYKKRRDYVYNRLIQMGLTVEKPTGAFYLFPYVGHLTSSSFDFALDLVEEAGLAVVPGTAFSEYGEGYLRLSYAYSIETLKEGCDRLEAFLQQKAKS

SEQ ID NO: 28915 - protein, 493 aa, Bacillus cereus E33L
MYRLSQYETPLFTALVEHSKRNPIQFHIPGHKKGQGMDPEFREFIGHNALAIDLINIAPLDDLHHPKGMIKEAQDLAAAAFGADHTFFSIQGTSGAIMTMVMSVCGPGDKILVPRNVHKSVMSAIIFSGAKPIFMHPEIDPKLGISHGITIQSVKKALEEHSDAKGLLVINPTYFGFAADLEQIVQLAHSYDIPVLVDEAHGVHIHFHDELPMSAMQAGADMAATSVHKLGGSLTQSSILNVKEGLVNVKHVQSIISMLTTTSTSYILLASLDVARKRLATEGKALIEQTIQLAEQVRNAINDIEHLYCPGKETLGTDATFNYDPTKIIVSVKDLGITGHQAEVWLREQYNIEVELSDLYNILCLVTFGDTESETNTLIAALQDLSATFKNKADKGVQVQVEIPEIPVLALSPRDAFYSETEVISFENAAGRIIADFVMVYPPGIPIFTPGEIITQDNLEYIRKNLEAGLPVQGPEDMTLQTLRVIKEYKPIS

SEQ ID NO: 28916 - protein, 410 aa, Bacillus cereus E33L
MKIIVQKFGGTSVRDENGRKHALHHIKKSLDAGYKVVTVVSAMGRKGEPYATDTLLSLVNQEESHISNREQDLLLSCGELISAIVFSNMLNENGIKAAALNGAQAGFVTNDDFTNAKIIEMNCDRIHEELENIDVIVVTGFQGQTKKGDTTTLGRGGSDTSASALGVALHAEYIDIFTDVEGVMTADPRIVKDARHLQTVTYNEICNMAYQGAKVVHPRAVEIAMHAKVPLRVRSTYSDSEGTLIAAYDGATKGQDVEERPVTGIAHVSNVTQIKVLEKETAYDIQQHVFKEMANEGISVDLINISPTGVAYTVNDNVSARAVEVLKQLGYEPIVTEHCAKVSIVGAGMAGIPGVTAKIVTALAEKGIQILQSADSHTTIWVLVKETDLVEAVNALHSAFELSKEKQLEQ

SEQ ID NO: 28917 - protein, 271 aa, Bacillus cereus E33L
MSVFTPEEITELAANSGRKKAHLSLLPMLILGFFGGAFIALGYLLDIHVIGTMPKAWGSFTSFLGAAVFPIGLILVILAGGELVTGNMMTVSMAWLHKKIDLFHFIRNLVIVTFSNFIGAVFVAYFFGHIVGLTEGAFLAKTVSVAQAKLQDTPLQAFISAIGCNWLVCLAVWLSMGSKEFIGKIIGIWFPVMTFVAIGFQHVVANMFVIPAAIFAGHLTWIEYFPNFIFVFFGNLVGGMLFVALPYFISYKKKLPSKEEQTALKKKSVSA

SEQ ID NO: 28918 - protein, 323 aa, Bacillus cereus E33L
MEHGHYLKKNAKFIDREVTKWSEMIKDWEEGVEIFGAALIGAPLSKPSISHSGASFAPKTIRAMLDAYSTYAITEEHDMKESVLYDCGDITMHVTDIKESHKRIAKTVGHVTKVNPNMIPIVLGGDHSISFPSITGFANSKGKVGIIQFDAHHDLRNLDDGGPSNGTPFRSLLENGVITGKQLVQIGIRNFSNARAYHEYAKEHGVTVYTMKDVREREIKDIMTESIEVLRRQGVTSIYISLDMDVLDQAFAPGCPAIGPGGMDSTTLLDAIEFLGKEPLVQGMDIVEIDPTLDFRDMTSRVAAQVIMSFLLARETVSKQVSI

SEQ ID NO: 28919 - protein, 522 aa, Bacillus cereus E33L
MSETLLVIISILLLLLLLLIVFFIITFFIKKRTHHSILKLHPYLGRMRYLLEKIGPEFRQYWFDHDTDGKPFSRYDFQSVMFLAKYRSEILGFGSKRDFEASGYYIANTLFPVLTEELSVNVTQEREGKKYVIHKEGLFSRREKLTADTTNLWLYEEDDAIIVGENRKYPWKLYGMFGASATSYGSIGENYILASGFGAKMAGGSWINTGEGGVIPEHLHTGANIVAQIGPGLFGYRDEDGNFSMEKFMGKAKESNIKAFELKFGQGAKIRGGHLEGQKVNEKIAFVRNVREGETINSPNRFSFLNNAAETLYFIQQLQENGGKPVGMKIVIGQQEPLENLFKTMKELNIYPDFITIDGSEGGSGATYKSMADSMGMPLIPALLTFIDTANHYDIRDKFKVFAAGKLITPDKVAIALAIGADAVNSARGFMMASGCIMALQCNSGQCPSGVATTNPHYQKALDPYEKKWRVMNYIISMRYSLFSLAAAAGVKSPRHLKRDHIVFKDEMGRVVPLSELFPTSK

SEQ ID NO: 28920 - protein, 479 aa, Bacillus cereus E33L
MNWYVIIPMIISFIVVFLIGVYASRRVQATAHNKFLQEYFLGGRELGGLLLAMTMIATYGSASSFIGGPGIAYNMGLGWVLLSAIQVVTGYIVLTVIGKKFAIIARKMEAITLIDYLKGRYNNKAVVILSAVCIIIFLFSATVAQWVGGGRLIESLTGLSYTTALFLFTFSVLVYVLIGGFRAVALSDTLLGIIMLVGTTIILIATVIAGGGIEKIMQELVQINPNLITPFGADGSLTKSYVTSFWILIGIGVVGLPQISVRAMSYKNSKAMHQALIIGTIVVGTIMIGMHLTGVFARVVLPGIAVPDKVMPLLAMEVLPPWLAGVFLAAPMAAIMSTVNSLLLLVSSSIIKDIYVNYINKDAADSTIRKGSLWITAIVGLLVYAAAIKPPDFLIWLNLFSFGGLEAAFIWPIVLGLYWRKGNATGALASILVGVSSYMCIHLFYPNPFGIHTVVFPIFFAFIAYILGSMVAVKKNSIG

SEQ ID NO: 28921 - protein, 528 aa, Bacillus cereus E33L
MKNMKRKLGTFALTMTGIGSILGSGWLFGAWKAAKISGGAAIFSWLLGMIVILFIALPYSELGAMIPEAGGMVKYTQYSHGDFVGFIAAWANWIAIVSVIPVEAIASIQYMSSWPWEWASWAKDLVDNGMLTSKGLAAASLLIIIYFFLNYWTVSLFAKVNSLITIFKIIIPSLTIGALLFVGFHGENFTSHQDFHVSNWSNVLTAMATSGVIFAFNGFQSPINMAGEAKNPGKSIPRAVVGSILISTIIYVLLQIAFIGAVNPDMIINGWSNLNFNSPFADLAIALNINWLVIVLYLDAFVSPSGTGTTYMATTSRMLYGMEKNGYFPKVFGKLHPIYGVPRFAMMFNLMICFVFLFLFKGWGVLAEVISVATLISYVTGPITVMTLRKTAPNFHRSFYIRGLNIIAPLGFIFASLTLYWARWPLTGEVMFIILMGLPIYFYYQLKTKWVGFKKNFLAGLWIVGYLLFMICISYIGSEKFGGLNIITYGWDMVLISIVSFLFYRWAINSGFKTKDLQVAQKINGRIS

SEQ ID NO: 28922 - protein, 471 aa, Bacillus cereus E33L
MSNLLKKKSVTQLLEHNQSKTLTKTLGAFDLIMLGVGSIVGTGVLVLTGLVAARDAGPAVIFSFVLAAIICGFIALCYAEIASTLPASGSVYTYSYATMGEFVAHLVGWSLLLIYIVATAAVAAGWTGYFHNLIKGFGLEIPKALVTIPSHGGIVNLPAVIITLILAWMLSRGTKESKRINNIMVLIKIGMILLFITVGIFYVKPMNWIPIAPYGLSGVFTGGAAILFAFTGFDILATSAEEVKDPKRNLPIGIIASLIICTIIYIMVCLVMTGMVSYKELNVPEAMAYVMEVVGQGKVAGAIAAGAVIGLMAVIFSNMYAATRVFFAMSRDGLLPKSFAKVNKKTGAPTFITGLAGIGSSIIAGFIDLKELVNLVNIGSLVTFALVCLSVIMLRKSHPNLKRGFMVPFVPVLPCVAIVCCVFLMLNLPLSTWVYFSIWITIGGVIYFLYSIKHSNLNEETISKLHDKIAR

SEQ ID NO: 28923 - protein, 561 aa, Bacillus cereus E33L
MIHLKTQYTVSTYLLDRLSELGIEHIFGVPGDYNLAFLDDVLAHKNLEWIGNCNELNAAYAADGYARIKGIGALITTFGVGELSAINGIAGSYAENVPVIKITGTPTTTVMENGELVHHTLGDGKFNHFSNMYREITVAQTNLTPEHAVEEIDRVLRACWNEKRPVHINLPIDVYNKPINKPAEPILHKPILSNKETMDKMLLHAISKINSAKKPIILADFEVDRFHAKEYLYQFVEKTGFPIATLSMGKGIFPEKHPQFIGIYTGDVSFPYLRKRIDESDCIISIGVKLTDTITGGFTQGFTKEQVIEIHPYTVKITDKKYGPVVMKDVLQQLSDIIKHRNEETLDIKPFISESLSMTEEFNPKAHMVTQKRFWQQIYHFLQENDVLLAEQGTPFFGSAAIPLPNNTTYVAQPLWGSIGYTLPALLGTQLANLSRRNILIIGDGSFQLTVQELSTMLRQNLKPIIFLINNNGYTVERAIHGQNEPYNDIQMWEYTKLANVFGTEEKSQTFKVENETELQEVLTKISIDKDQLTFVEVVMSQGDQPELLAKLGKRFGQQNS

SEQ ID NO: 28924 - protein, 598 aa, Bacillus cereus E33L
MRNFQGQFANKGGRNAPKIDKAKNTKGTVMRVWNYMGYQKAALTFVIFLVLVTTLLGLLGPYLMGVIIDQYIVPKDVSGTARMCLLLIAIYGVTVLLTWLQTFVMVNVALKTIQKIRQDIFEKIQTLSLRFFDVRSQGDLMSRVTNDIDNLNQALTQSVVQIISSALTFIGVTIAMFALDWILAIVTLITVPIMFFVTKKLVAYSGKNFAKRQKDLGELNGFIEEAITGADVTTLYGKEKETVQNFNKINEQLRVSATKADTFSAFIFPSMNFINNLGMGLVIGTGSVMVLNGMTTVGVIAAFINYSRQFSRPLSQFATLMNTIQAAVAGGERVFEIMDEVPEIKNKKDAFVLQNLHGHVALENVSFGYEENKTILKEVSFKARPGETIALVGPTGSGKTTIINLLTRFYDVQQGQIYIDEKNIKEYDLNSLRSKIGVVLQDTYLFAGSIMDNIRYGRLDASDEEVINAAKAASAHSFIKHLPNQYETKIATEGSNLSQGQKQLLAIARAILADTDILILDEATSNIDTRTELQIQEGLNNLMRGRTSFVIAHRLKTIEKADQILVIKDGSILEKGNHESLMEDRGFYFDLYTSQFKI

SEQ ID NO: 28925 - protein, 566 aa, Bacillus cereus E33L
MFGKTAGEALVDLLIDWGVEHIYGMPGDSINSIIEALRKKQDKIKFIQVRHEEAGALAAAAYAKLTGKLGVCMAIAGPGAIHLLNGLYDAKLDKAPVLAISGQVETDLLGTDFFQEVNLERLFDDVAVYNQRIMSAEQLPAVVNQAIRMAYTKKGVSVLTIPDDVPKFEVKNGARVTNTSFTLPELFPQEEDLHAAILAINEAKKPVILAGKGAKHARESLLTFAEHIGAPIVLTLPAKGIIPDEHPLCIGGLGLIGTKPSYDAMKHADTLIMVGTSYPFTGFLPEKAKTIHIDTDPAQIGKRYVTDIGLAGDADKTLKWLIENVEKHEDHSFLEHHQEMMKKWEEKLHNQEDDSSTPIKPQRVMHALQHVAHDDAILSVDVGNVTVWTARHFRMTNQQFIISSWLATLGCGLPGALAGKIAFPDKQVFAVCGDGGFGMTMNDFVTAVKYKLPIIVVVLNNNKIAMIKFEQEVMGNIEFGTDLTNPDFAKYAEACGGIGYRVENVDELLPAFESAVKQNSPCIIDVVVDVNEAPMPAKITFGQAAGYTKHMIKELFEEGKIDLPPL

SEQ ID NO: 28926 - protein, 175 aa, Bacillus cereus E33L
MANIQAIFIDRDGTIGGDTTIHYPGSFTLFPFTKASLQKLKANHIKIFSFTNQPGIADGIATIADFSQELKSFGFDDIYVCPHKHGGGCECRKPSTGMLLQAAEKHGLDLTQCAVIGDRWTDIVAGAKVNATTILVRTGAGYDALHTYRDKWAHIEPNYIAENFEDATNWVLNQL

SEQ ID NO: 28927 - protein, 377 aa, Bacillus cereus E33L
MNNVIIIGGGIAGLCAAISLQKIGLDVKVYDKNTEPTVAGAGIIIAPNAMQALELYGISKKIKKFGNESNGFNLVSEKGTTFNKLIIPTCYPKMYSIHRKDLHQLLLSELKEDTVKWGKECVKIEQNEANALKIVFQDGSEALGNILIAADGIHSVIRKQVTQGDNYRYAGYTCWRGVTPANNLSLTNDFIETWGTNGRFGIVPLPNNEVYWYALINAKARDPKYKAYTTTDLYNHFKTYHNPIPSILKNASDIDMIHRDIIDITPMKQFFDKRIVFIGDAAHALTPNLGQGACQAIEDAIILAECIKNNAHYRQAFLEYEQKRRDRIEKISNTAWKVGKMAQIENKPLTLVRNEVMKRMPKWVSEKRTHELYSFHL

SEQ ID NO: 28928 - protein, 482 aa, Bacillus cereus E33L
MYNTEMDETLKIINKGLKKTTSPKQIIVVGAGMAGLVSASLLKAAGHEVKIFEANNRVGGRIETVRMEDTGLYLDVGAMRIPYSHTLTMAYIRKFGLQVSPFINRNETDIIYVNGRKTTLKQYEKDPSILKYPVEMNEVGKTSEELLLLAVQPIINFIKKNPEKNWDVVVKDFGRYSTGQFLKYHPYQYNTYFSPVTIEMIGVLLDLEGFLERSFVETLRFLYIMQEESGFCEIVGGNDRLPKSFLPQLEENIIYNQKLMKLHQCDNGVTAFYRNEETFEYSSITGDLVIVTIPFSTMRFVEVEPFDSISHEKWKAIRELHYMPATKIGIQFKSRFWEEQGQLGGRIITDLPIRYAYYPSYGIGEKGPAMMLGSYTWSYDALLWDGLSKGDRIYYTLQNLATILGGQVYDEFLSGISKNWTLDPYALGGFALFQAGQESELQPAIVKPEGRIFFAGDHTTLYHGWIQGAIESGVRVAEEVNE

SEQ ID NO: 28929 - protein, 586 aa, Bacillus cereus E33L
MEVRDEIKKKGNWRQFLRLIQDTKPPKGILIFALLMSLLSTGASLFIPMLTKGLVDNFSLSSISTGQIVGLVAFFIMQTIAAGLSIYLLNYIGQKIVAGLRERLWKKVLILPVSYYDQNRTGDTISRMTNDTGVVKTLISEHLSNLLTGGISIVGSLIVLFVLDWKMTLLLLTVIPLSVLILVPLGRKMYKISKALQDETASFTSVLTQVLSEIRLVKSSNTEKREYETGNKGIEKLLQFGLKEGKVQALISPVMSFVLMALLVIIVGYGGMRVSSGALTTGELVAFILYLVQIIMPMSQLSMFFTQFQKAIGATERINTILEYEVEDHETGVKVTNAKQPIVLENVHFEYNEEEQVLKNIDFTIESGKVTAIVGPSGSGKTTLFSLLERFYEPTSGAIKLGKDAITNYSLQSWRRQIGYVSQDSPLIDGTIRDNICYGVEGEVTDEEIEKVAAMAYVDAFIHDLPNAYATEVGERGVKLSGGQRQRIAIARALLRNPQILMLDEATSSLDSKSESVVQKALNNLMKGRTTLVIAHRLSTVVDADKIIFIEKGNLTGSGTHDELLRTHDMYREFATQQLKIKEAAL

SEQ ID NO: 28930 - protein, 333 aa, Bacillus cereus E33L
MVNSTSNRIKVYFGVCMLICLSVFPFVNDSRSLLILFTQIFIFAIFAMSFDVLLGYTGIVSFGHCMFFGIGAYGVALLFDRQGVSITNFFIGIVAAIIISAIVSYIIGLLSLRLKSHFYAMLTLAISQLFFVLAEKWRGLTHGGDGFTFGVPDVFRDRFTFYYVTLICLLIIFVLLRLFTKSSIGKVLKAISQNEQRVEALGYKVLHYKIIASVVAGVVAAISGGLFVITLRFVNTTVFSIEMTLNALLMTMIGGVGTLIGAIAGAGIIESLKYYLSELATEYPIFERWTIILGLLYIIVLLVFPKGLVGTVKSLKNMKRNKKEKRAEVEQNV

SEQ ID NO: 28931 - protein, 570 aa, Bacillus cereus E33L
MKQYTTYEKLQCKEVTGTGHVIQCLKKLGVTTVFGYPGGAILPVYDALYESGLKHILTRHEQAAIHAAEGYARASGKVGVVFATSGPGATNLVTGLADAYMDSIPLVVITGQVATPLIGKDGFQEADVVGITVPVTKHNYQVRDVNQLSRIVQEAFYIAESGRPGPVLIDIPKDVQIEKVTSFYNEVIEIPGYKIEAMPDSMKLKEVVKEISKAKRPLLYIGGGVIHSGGSDELIKFARENRIPVVSTLMGLGAYPPGDPLFLGMLGMHGTYAANMAVTECDLLLALGVRFDDRVTGKLELFSPHSKKVHIDIDPSEFQKNVVVKYPVVGDVKKALHMLLHMPICTQTDEWLTKTEEWKAEYPLSYIQKESKLKPQHVISLVSELTNGEAIVTTEVGQHQMWAAHFYKAKNPRTFLTSGGLGTMGFGFPAAIGAQLAKEEELVICIAGDASFQMNIQELQTIAENNIPVKVFIINNKFLGMVRQWQEMFYENRLSESKIGSPDFVKVAEAYGVKGLRATNSTEAKLVMIEAFAHEGPVIVDFCVEEGENVFPMVPPNKGNNEMIMKRWEE

SEQ ID NO: 28932 - protein, 409 aa, Bacillus cereus E33L
METIVQKFGGTSVGSVERIQHVTNLIIEEYERGHSIVSVVSAMGKSTDELVALANAITENPSKREMDMLLSTGEQVTISLLTMALQAKGYNAISLTGWQAGITTESVHSSARITEINTDRIQSYLTKGTIVIVAGFQGVSEDLEITTLGRGGSDTTAVALAAALNAKKCDIYTDVTGVYTTDPRVVKDAYKLDEISYDEMLELANLGAGVLHPRAVEFAKNHNVILEVRSSMEQENGTIVKGECNMEQQSIVKGIAFEDNITRITVKGLEQGSLSTVFSTLAAAHINVDIIIQSITNEGTVHLSFSIHSNDLRETLEVLEQNQEALHYGSVEYENHLAKVSIVGSGMVSNPGVAANMFTTLKEEDIHIKMVSTSEIKVSVVIDRLHLVTGVEALHQSFMAKIEPLVQMS

SEQ ID NO: 28933 - protein, 607 aa, Bacillus cereus E33L
MCGITGWVNWNKDLSNEHVILKKMANRIQHRGPDAEGFWFSPRAAFAHRRLIVIDPEGGAQPKTFRAGDYTYALTYNGEIYNFRELREHLQKCGHTFETHSDTEVLLHAYLEWKEDCVQHLNGIFAFALWDDQKQRLFLARDHLGVKPLFYTERNDSIIFGSEIKALLAHPSVPAEIDANGINEIFGLGLFRTPGCGVFKHIEEVRAGHSITFTRDKKVVTKYWNLESKVHTDSIEDTSSHILSILQDTVKRQLIADVPLVCMLSGGLDSSGITALAGKEFAAENKTLHTYSVDFVNSAKDFELTFARTGLDAPWVKRVSEHVGTSHHDIIVNAEELANRLFVPLRAKDLPSAGEMETSLYLLFCEMKKDATVALSGESADEVFGGYPWFHQEELLYVDKFPWLTNWKNTSPLLLHEVSNQCNLENYIDTRFQKAILEVPTLEGESKKSAKQRQMFYLFLTRFLPFLLDRKDRMSMAVGFEVRVPFCDYRLVEYLWNVPFNIKSIDNIEKGILRRALKPALPDDVRNRRKSAYPTSQDPHYLQTIRNLTLDMCSNKNNPIFSLINHSTLLAIANQSNKEINNFEARSAIEYMLQVNEWLKTYHIHIA

SEQ ID NO: 28934 - protein, 402 aa, Bacillus cereus E33L
MLSEKTIEIVKSTVPLLQEKGVEITTRFYEILFSEHPELLNIFNHTNQKKGRQQQALANAVYAAATYIDNLEAIIPVVKQIGHKHRSLGIKAEHYPIVGTCLLRAIKEVAGAPDEVLNAWGEAYGVIADAFISIEAEMYEEAAHKEGGWKDFRNFVVVKKVKESDVITSFYLKPEDGGKVSSFIPGQYVTVQINIEGETYTHNRQYSLSDAPGKEYYRISVKKEKGVDTPDGKVSNYLHDHVKEGDMLPVSAPAGDFVLNMDSTLPVVLISGGVGITPMMSMLNTLIEQDSKRNVCFVHAAINSNTHAMKEHVEAVDNEYEQVKAYTCYSAPTQKDLEMKNFDKEGFVEREWLQTIIPTTEAEFYFCGPVPFMKHINAVLTDLGVKQEHIHYEFFGPAASLQ

SEQ ID NO: 28935 - protein, 540 aa, Bacillus cereus E33L
MSYEKVWANNEKLNQTEKNKLKKDGLEIFNDIPYYAENGFESIPKEEWDAFKWAGLYLQRPKEAGYFMMRVNIPSGIITNAQAEVLASIAEDYGRDVIDITTRQAIQFHWLEIHQIPDIFKRLARVGLSSAGACGDITRNITGNPLAGIDANELFDTTHIVKEVYDYFQHNEEFSNLPRKFKMSISSNIYNAANAEINCVAFTPATKEIDGEKKVGFHIKVGGGLSARPYLADELDVFVLPEEVKAVAIAIATIFRDFGYREKRHLARLKFLVADWGAEKFKEKIIEYTGPLQSKGESAVKGWNAGYFYGVQDQKQEGLKYVGFNVPVGRLHAEEMFEIARIAKQYGNGQIRTCNSQNFIIPNVPPENVTGLLNEPLFEAISANPKSFIGHAVSCTGIEYCNLALVETKERLRKIAEYLDTQIALDVPVRIHMVGCPNSCGQRQIADIGLQGVKMKTKEKGIVEAFEIYVGGTLLDGGAYNQKLKGKIDGEDLPDVLASFISYFKENKLPAETFYDFVGRVGVETLQIALNNVLEEVIAS

SEQ ID NO: 28936 - protein, 323 aa, Bacillus cereus E33L
MAKILVAGKIPEIGLELLKDHDVEMYDKEELISLDELTERVKDKDALLSLLSTKVTKEVIDAASNLKIVANYGAGYDNIDYTYAGEKGIAVTNTPKVSTEATAELTFALLLAAARRIPEGDTLCRTTGFNGWAPLFFLGREVHGKTIGIIGLGEIGKAVAKRAKAFGMNILYTGPNRKPEAESELEATYVTLEELLQTADFITINCAYNPKLHHMIDEEQFKMMKKTAYIVNASRGPIMHEAALAHALKTNEIEGAALDVFEFEPKITEELKGLKNVVLAPHVGNATFETRDAMAEMAVRNILAVLNGEEPVTPVNQKVFVTK

SEQ ID NO: 28937 - protein, 566 aa, Bacillus cereus E33L
MSSKTEEKLATGAQLLLEALEKEGVEVIFGYPGGAVLPLYDALYDCEIPHILTRHEQGAIHAAEGYARITGNPGVVIATSGPGATNVITGLADAMIDSLPLVVFTGQVATTLIGSDAFQEADIMGLTMPVTKHNYQVRKASDLPRIIKEAFHIARTGRPGPVVIDLPKDMVVEQGERCSDVQMDLPGYNPNYEPNLLQINKLLQAIQVANKPLILAGAGVLHAKASKELTSFARKYEIPVVHTLLGLGGFPPDDELFLGMGGMHGSYTANMALYECDLLINIGARFDDRLTGNLAYFAKEATVAHIDIDPAEIGKNVPTEIPIVASAKQALQVLLQPEGSKENHHEWISLLKNRKEKYPFSYKRNSESIKPQYAIDMLYEITKGEAIVTTDVGQHQMWAAQYYPLKTPDKWVTSGGLGTMGFGFPAAIGAQIAKPDELVIAIVGDAGFQMTLQELSVLKEHSLPVKVFILNNEALGMVRQWQDEFYNQRYSHSLLSCQPDFVALANAYGIKGVRIDDPLLAKKQLQHAIQLQEPVVIDCRVLQSEKVMPMVAPGKGVHQMEGVEKR

SEQ ID NO: 28938 - protein, 492 aa, Bacillus cereus E33L
MSTQMLTLTSISIYMLGMLVIGYFAYKRTSNLTDYMLGGRTLGPAVTALSAGASDMSGWLLMGLPGAMFSVGLSSSWIAIGLTLGAYANWLYVAPRLRTYSEIANNSITIPEFLEHRFQDKSHMLRLVSGLVIMIFFTFYVASGLVSGAVLFENSFGMNYHVGLFIVAGVVVAYTLFGGFLAVSWTDFVQGIIMVIALILVPTVTIMNVNGLGPAFSTIKSIDPTLLDIFKGTSVLGIISLFAWGLGYVGQPHIIVRFMAISSVKEIKSARRIGMSWMIFSVVGAMFTGLIGIAYYSDKGLKLSNPETIFLELGKILFHPLITGFLLAAILAAIMSTISSQLLVTSSAITEDLYRTFFKRSASDKELVFVGRMAVLVIALVGCTLAFKQNDTILALVGYAWAGFGSSFGPAILLSLYWKRMTKWGALAGMISGAATVIIWTQFKFLKESLYEMIPGFTISLLVIVIVSLLTQPSKEIEDQFEDFEKQHSDNL

SEQ ID NO: 28939 - protein, 247 aa, Bacillus cereus E33L
MSELLRVENVTGGYTKRPVLKDVSFSVNKGELVGLIGLNGAGKSTTIKHIIGLMEPKKGTVTINGKTIRDDMTAYRSSFSFIPETPVLYDELTLEEHLKLTAMAYGVEEKQYEERVGQLLQEFRMKNRLKWFPSHFSKGMKQKVMIMSAFLVEPSLYIVDEPFVGLDPLAIQSLLQMMDQMKKSGAGILMSTHILATAERYCDSFIILHQGEVRAKGTLSELQLQFNMPGATLDDIYIALTKEEDYE

SEQ ID NO: 28940 - protein, 376 aa, Bacillus cereus E33L
MISMLYLDNSATTQLLPEVKEVMLPYLLEEFGNPSSKYYGLAQNAKDAVETARKHVAQLLGCETDEVIFTSGATESNNFILKGIAHYHKDKGNHIITSKVEHPSIIETCKFLEANGYTVTYLDVDQYGRINLEELTKAIQQEKTLLVSIMWGNNELGSLNQINEIAKICKENEIFFHTDATQVVGKIQFSLSDIDGINFLSCSSHKFHGPKGIGVTMIGKDNLGLPIQITPLLHGGGQERDLRSGTLPVHNIVGMGKAAEIAYLNLEQNIYKLEQLENKLADILKTKFQNHIEFNNDIQDKIPGILSVIFKGVNNETLVRTLAPVAAVSTGSACSSSKPSHVLQAIGLSMDDLRSTIRFSLSSTTSLEELDVFNNL

SEQ ID NO: 28941 - protein, 369 aa, Bacillus cereus E33L
MKHILIAGGGIGGLSASISLSKVGFSVTLCEAALENRKTGAGILMPQNALAVLKELDVFEECCEHGFQTKWLKTFDARGNLQFQVSESFLDDTLPGRNNIPRKTLSDILIKHADAAGVDIKWGKKVVAYEERAESVSAIFDDGEKIKADILVGFDGIHSTVRNMMLQKEIEKEHLGMGAWRFYFELPDYKFEDSSLMYISGETQIGVVPLAERAGYVFVLQPCASDYWDEKDTRFNRVKEILLGFPGLDFITKHMSKDYPVIFNKLEQVAVQEPWYKGRVVIGGDAAHVGAPTLAQGGAMAIEDAIVLAEELKNNNDIEAAFQAYFERRAPRALKVQNLSSEIVRRRLKGQTGIEELIWECHEVLRKGY

SEQ ID NO: 28942 - protein, 467 aa, Bacillus cereus E33L
MKSLLRKKALSTESPRQLQRTLTALDLTFLGIGAVIGTGIFVLTGIVAAKHSGPGIMLSFLIAAFTCACVAFCYAEFASSIPVSGSVYTYAYMTVGEVVAFIVGWCLMLEYLLAVAAVAVGWSGYLQSLLQGFNIHLPAIIASAPGVGKGGLIDLPAVCILLIITGLLSFGIRESARINNIMVLIKLAVIIAFIVAGAKYVKPENWTPFIPFGYDGIITGAATVFFAFLGFDAIATAAEETKKPQRDLPIGIIGSLLICTVLYMIVSFVLTGMVPYTQLDVSDPVAFALHFVGEDTIAGLLAVGAMTGMTTVLLVVMYGQVRVSYAMSRDGLLPKALARVNKRVKIPLLNTWITGVVAALLAGLLDLHVLANLVNIGTLTAFTFVCCAVLILRKTHPDLKRGFRTPFVPVLPVVAILCCLYLMINLSKTTWISFAVWLIVGLCFYFFYSRKHSHLATEKTNDEQKKA

SEQ ID NO: 28943 - protein, 490 aa, Bacillus cereus E33L
MTALLIVILFLFLALFLGIRAQHGKDMNLEQWSVGGRGFGTIFVFLLMAGEIYTTFTFLGGSGWAYSKGAPTFYILGYGALAYILSYFLLPPVWKYAKEHNLVSQPDFFVKKYKSQTLGLIVSIIGVISIIPYLVLQLKGLGIIVSEASYGRVSPVIAVWIGAIVITIYVMVSGIHGSAWTAALKDIMILFIVMFLGIYLPYHYYGGFQPMFEAVEAAKPGFLSLPDEGMSISWFVSTIVLTALGFYMWPHTFASAFSAKNEKVFRKNAAIMPLYSLVLLFVFFAGFAAILQVPGLKGGDVDLSLFRLALQTFDPWFIGIIGSAGVLTALVPGSMLVMAASTLLAKNIYRTMVPSASDRQVAKVAKLFVPVVTLVAVLFTFKGGETIGALLLMGYSIVTQLFPALVCSLFPRQIITKQGAIAGMGIGLLVVAYITLSGSTIATMFPGFPQYIKDLNVGIVALLMNMIVMFIVSGFTKNVSIKTDNIIVEK

SEQ ID NO: 28944 - protein, 437 aa, Bacillus cereus E33L
MLSIKGQKWRNWTGNVEGTPHYTMYPESVQDVVEVIELARKKGKKIRVVGSGHSFTPLVQTEEILVSLDELKGIVNIDTEKMIAEVWAGTKLHELGKLLEEKGYAQENLGDIDSQSIAGAISTGTHGTGITFGSLSTQVIEITAVLSTGETIVCSETENVEYWRAFQLSLGMLGIIVRIKLNIIRAYSLVYESEKQSLATVMNKLEEYKKNRHFEFFVFPYSDEVQVKVTNETTGKKSDLKWHKLKVELLENKMFSLLSKGCKWFPSISKGVSRLSAKAVPNTKIIGPSYEVFATSRAVPFYEMEYSVPSKYMQAVVEEISNLIEKKKYKVHFPIECRYVKRDDIWLSPAYGRDSAYIAVHMYKGMKYAAYFGEVEKIFLKYEGRPHWGKMHTLTYEKLQNIYPELHSFLKVRKLLDEAEMFSNPYTEKLFTIMKKS

SEQ ID NO: 28945 - protein, 473 aa, Bacillus cereus E33L
MQQPTNEKLHRTMKSRHLFMIALGGVIGTGFFLGSGYTINQAGPGGAILSYLVGGFIMYLTMLCLGELTVAMPVSGSFQKYATKFIGPGTGFMIGWLYWLGWAVTVGLELTSIGLMMKRWFPNVDVWVWCLVFGVILYASNAISAKSYAELEFWFSSIKVVTILAFVVLGGSALLGFISYDGKEAAPLFSNFVSDGGLFPNGLAAVLLTMITVNFSFQGTELIGIAAGESENPEKTIPRAIRNTVWRIMLFFILTMTILVGLISWKEAGVIESPFVVVFDKIGIPYAADIMNFVIITALLSVANSGLYAATRILWSLANEGMAPKSFQKVNKRGIPITALVVTIAVAALSLLTSFLAEDTVYMYLLSIAGLSAVSSWIIIALSQLRFRSQYIKGGGKLEDLKYRTPLYPIVPILALITNSIVVISLAFIPEQRMALYCGIPFIIFCYIYYYINKKRQKPMKVETTNETNNQTR

SEQ ID NO: 28946 - protein, 471 aa, Bacillus cereus E33L
MANLFKKKSVTQLLGESKSKTLTKTLGAFDLTMLGIGAIIGTGVLVLTGLVAARDAGPAVIFSFMIAAIVCGFAALCYAEVASTLPVSGSVYTYSYATIGEFIAHLMGWTLLSVYVVTTAAVAGGWTGYFNNLVSGFGLEIPTELLKIPSQGGIVNLPAVVITLVLTWLLSRGTKESKRVNNIMVLIKIGIVILFIAVGAFYVQPENWTPFAPYGISGIFAGGAAVFFAFLGFDALATSAEEVKNPQRDLPIGIIASLIICTIIYVVVCLVMTGMVSYKELDVPEAMAYVLEVVGQDKVAGVIAVGAVIGIMAVIFAYIYATTRVFFAMSRDGLLPKSFAKINKKTEAPVFSTWLTGIGSALIAGFIDLKELSNLANIGALLTFAMVGVSVIILRKTHPNLKRGFVVPLVPTLPIISIACCLFLMFNLPLTTWIYFGIWLAIGVVVYFVYSKKHSHLKDDGSSQDNLEQAN

SEQ ID NO: 28947 - protein, 377 aa, Bacillus cereus E33L
MRIGVPAEIKNNENRVAMTPAGVVHLIRNNHEVFIQKGAGLGSGFTDAQYVEAGAKIVDTAEEAWNMEMVMKVKEPIESEYKHFSEGLILFTYLHLAPEPELTKALIEKKVVSIAYETVQLENRSLPLLAPMSEVAGRMAAQIGAQFLEKNKGGKGILLAGVPGVKRGKVTIIGGGQAGTNAAKIAVGLGADVTIIDLSAERLRQLDDIFGNQVKTLMSNPYNIAEAVKESDLVIGAVLIPGAKAPKLVTEEMIQSMEPGSVVVDIAIDQGGIFETTDRITTHDNPTYEKHGVVHYAVANMPGAVPRTSTLALTNVTVPYAVQIANKGYKEACLGNSALLKGINTLDGYVTFEAVAEAHGVEYKGAKELLEAETVSC

SEQ ID NO: 28948 - protein, 516 aa, Bacillus cereus E33L
MIKKENSVFYISILLTTLFIIWGITPASWIQGYDLQSVTSSLNSFILNKFGWFYSLLMTAMIILATYLAFSKYGSIRLGKDGEKPKYSYPSWLSMLFGAGMGIGLLFYGIAEPISHFTDPLTGKAGTEESAKLAMQYSFFHWGLFPWALYAMVALTIAYFTFRKQKGSTIGATVTPLFNRSKNSPIGKTVDILAVLATVFGIVPSVGIGAQQIAGGLSYLFPSIHNTLLTQLVLIAIFAVLYLTSAQTGLDRGIKYLSNLNFSLAGILLVSFLLLGPTVFIMKYFTSTLGSYIGALPSMGLNLGAFNEKSSSWIENWTIFYWGWWISWSPFVGTFIARISKGRTIKEFIFGVVLVPTLICTFWFAVFGGTAIHMEMFQSLGVADEIAKNGTEIGLFAVISHLPFSTFLTIIGLILVATFFVTSADSATFVVSMQTSNGSLSPKNSLKLIWGLTIAIIAAILLQAGGLNALQIAAIIAALPFSIVVVLMVTSLFKELRKEDINSQTKEVPKKIKKVM

SEQ ID NO: 28949 - protein, 286 aa, Bacillus cereus E33L
MKKLLTFIIIGLLSILVVACGSNEKKTEKTSAKPSGKIEQIKERGELVVAVFTDKPPFGYVDKDGKNVGFEIDMAKRFAKDLLGDESKVKFVPVEAASRIPYLQSDKVDFVLANMTATDERKKVVDFTNPHLKVAVQVLVKDGSPIQSVKDLEGKKVIVTKGTTADIYLTKNMKNVELIKFDKNTEALQALKDGRADAYAQDNLVLLSWANKNPGFHLLKDKLGGDDLIAIAVKKGNKEIHDWVNKELEKLGKENFLHTLYDKHLKEEFGPQISPESVITEGGKVN

SEQ ID NO: 28950 - protein, 1478 aa, Bacillus cereus E33L
MLNKTNTWTPSLFRDYKNAEHDACGIVSVMEKRKIPTKENIDLCIQSLVKMNHRAGFINGEGDGIGIHIDVPKALWNEKLKSSGYNPTIVDHPHFIVGHFFLNKNENIVDLKNHIRTQLNNENFAILFESDNVINSDALGPLGKQEEPLFWQVALIAENEVVNIEQTLFSVTIKIEENEAIHVASLSRDHVVYKVLGAGDTLVAYYNDLQHPLIASTMTLGHNRYSTNTLSNFFRVQPFSVLGHNGEINTIAKLRDQAEMIHVPLTAGGSDSQDLNRTLETLLVQYGYSLFEAMDILFPPIINEIKLYETHLQDLYTYIREAWGHFAQGPAGIISRYKDEAVFSVDSLGLRPVWKVETESSYIFSSEPGVVSPTEYVAEPKPLAPGEKVGLKWNEQDELVLYEHDDYQTQVYNRFKKKVDVTNYHLHLSIPETKEVPDACDSMQVETKQYVAFGWDREHIQLLEQMATKGVEPIRSLGHDSPLAALDTDRRNIADFIKESVAVVTNPAIDRDREVEHFSTRTILGERPSLLSGAKQPFVVEMLSPIILEGSVAQSITEELHTITYEQLIELFNTHSSIATISATFSQAETLQCALSRISSEAITAVNDGASLLLIDDADAHLNERLWIDPHLVTAKVHQVLSENKLRRNCSLVIRSGALRSLHDIVTLYGLGADSINPYLLFATVNDGTKTPITNLYNALNKGLEKVISTIGIHELRGYGRLYSSIGLHEEIANILQITNFLGSNDLAFSLESLAEDAKMRADDYNDPKVRIRKSFHIFPRIWKAIGDVAKGNSYDDYRDKLSELEENNPIAIRHLIQTKETKHVIPTEEVSISIQNHDLPFIISSMSFGSQNEIAFRAYAEAADQLNMISLNGEGGEIKDMIGKYPHTRGQQVASGRFGVNAELLNSSNLIEIKIGQGAKPGEGGHLPGSKVTAKIAEARNATIGSDLISPSNNHDIYSIEDLAQMITEIKTANQLAKVAVKVPVVPNIGTIAVGIAKAGADFINISGFDGGTGAARIHALQHVGLPVEIGVKAAHNALLEANMRHNVEIWADGGIRSVNDALKIMLLGANRIGFGTLSMIAIGCTTCRGCHLDTCHVGIATQIESEAQAKEHGLRRFVPRELESAVAGLLHLFTTFGEELKRLTGNLGYTNLQEIVGRSDLLEQVRGKNLLNLCNLLQTIEHPSVTKTEHVLEKQFETIHSPHSKELVGVGVEQRVMGGLESCYRVRSKLYEDTKLEPLTLKYTNGSIPGNGLGAYNSENLFIHVNGGAQDGIGKTSFGGGIYITKAKGKDGLYYNGSVGKGFGYGAQKGALYVQGNADARAGIRLSGADMIIGGRMTKPLREKEQGNIGAYSNIKGFAFEYMTNGRALVLGDPGPWICAGMTGGVVYLRHDSSLGLTEQALKRRIAKGANVTLQPISKNGARDVTELLLDYIRVLNEHEQYEEVALLTPLLDDIQQQFFEIIPKKEQADPSISTE

SEQ ID NO: 28951 - protein, 586 aa, Bacillus cereus E33L
MQGIKRYLQFVKPYRWLIAITIMIGLVKFGIPLIMPWLLKYIIDDVIQGGESLQDKTSQLITAIGIAFFIFAVLRPPIEYYRQYFAQRIANTILYDLRKHIFGHLQKLSLRYYSNTKTGEIISRVIHDVEQTKDFVITGLMNVWLDTATIAIAIIVMFSMNIKLTFVALLILPIYVVAVKYFFGRLRKLTKERSQALATMQGYLHERIQGMQVTRSFALEEYEGKQFEKRNNEFLTKALTHTSWTARTFSAVNTLTDLGPLLVIGFAAYEVIQGQLTLGTMVAFVGYMDSLYSPLRRLVNSSTTLTQSFASMDRVFELLDENYDIVNVPSAVQTKKLNGEVIFDNVSFRYNADEKEILHNLSLTMLPGEKVALVGASGGGKSSLASLIPRFYDVSSGAVYVDGIDVRKYDMRNLRSHIGIVLQDNLLFSDTIGANILYGNPKATEEEVIAAAKAAQIHDFIIELPDGYETVVGERGVKLSGGQRQRVAIARVFLKNPSLLILDEATSALDLENERYIQEALQTLAADRTTIIIAHRLATITHVDTIIYIEDGEIKETGSHEELMKKRGYYYNLYQLQHITETAPLA

SEQ ID NO: 28952 - protein, 478 aa, Bacillus cereus E33L
MKKGKIAVVIVAYTVLFATSVHTYKKQIDHPIMSDVGKLLPTKIKRVESATDEHSLIKLVQDANVSGEKISIAGMQHSQGGQTYYPNGTMLDMKGYNEILEFNPEKKRIRVQSGVTWNDIQKKINPYGLAVQVMQSQNIFTVGGSLSVNVHGRDIRHEALIDTVESFRLLMADGTVRNVSREENADLFPYVIGGYGLFGVILDVTLMLTNDELYETHTKMLDYKEYTSYFKEKVKKDENVRMHLARISVAPNSFLREMYVTDYTLAQNQNMREEYSELKEETIIAAPKFLLGLSRYSDWGKNTFWDIQRSYFERTNGKYETRNNVMRSDSAFMEYENPNRTEVLQEYFVPIDSFTEYIDDLRNVLNEEEFNLLNITIRYVEKNGNAVLSYAKDDMFALVLLINQGRSENEIKKTEDVIQKMIDVTLKHNGSYYLPYYSYPTKEQLKRAYPRIEEFLGKKKEADPKERFVNLFYREYTK

SEQ ID NO: 28953 - protein, 473 aa, Bacillus cereus E33L
MNQNCIPLYEALIEFKKRRPLSFHVPGHKNGLNFPQEVVEEFKDILSIDVTELSGLDDLHSPFECIDEAQQLLADVYGVNKSYFLINGSTVGNLAMILSCCGEHDIVLVQRNCHKSIINGLKLAGANPIFLDPWIDEAYNVPVGIHDEIIKEAIEKYPNAKALILTHPNYYGMGMDLEASIAYAHAHKIPVLVDEAHGAHFCLGGAFPKSALAYGADIVVHSAHKTLPAMTMGSYLHINSRLVKEEKVSTYLSMLQSSSPSYPIMASLDIARFTIARIKEKGHDEIVEFLQEFKEELSTIPQIAILQYPLQDELKVTVQTRCQLSGYELQSVFEKVGIYTEMADPYNVLFILPLQVNKTYMKAIEMIRVALQYYEVKDKTESIRYTYKGEISPLPYTYKQLEEYETKVVPVEEAVGMVAAEMVIPYPPGIPLIMYGERITSEHKEQVMYLEKAGARFQGSTKYMKVYDIESRF

SEQ ID NO: 28954 - protein, 522 aa, Bacillus cereus E33L
MRMKSRKTDWSVFLISGGSLLLFVIAVFLNKSYVEGVINSSFAASIKYFGAFWQILLIGTFVVAMCMAFSKYGRVKLGGLEKPEISTTKWLAIIMSTLLAGGGVFWAAAEPMYHLMTVPPIHEGITAGTKEAVMPALAQSYMHWGFLAWTILGTISAVVMMYGHYHKGMPLKPRTLLYPIFGEKLRKSWLGTLIDTFAIIAVAAGTIGPIGFLGLQASYGLQALFNIPDVFTTQLAIIVCVVAVSTISAVTGIDKGIQIISNLNVRLAILLMVFVLLFGPGGFIIDSFVSSFGFYINEFIPMSTYRGDTGWLGSWTIFFWGWFIGYGPMMAILVSRISRGRTIREIIVAIGIIAPIITTFWFTILGGSGVFYELMNPGSISTALSASGMPAAMIAITEQLPLSHIIGPAFLLLTILFVVTTGDSMAYSISMAVTGDGDPRISLRVFWSLIMGTVAAILLYMGEGSINALQSFIVVTAVPVSILLFPMLWLAPKVAGELALKQGIVKEEEKTSFLFQKASKLK

SEQ ID NO: 28955 - protein, 410 aa, Burkholderia pseudomallei K96243
MPAVQSLKHAVTAAVLTAILTVPILGLQLKLDGYQVVLEAHWRPVWIAVAAVFLFQLFKPALMRAKAAVRLPAAPPLGVREQRAIVWALVALGFVWPFFGSRGAVDVATLALIYVILGLGLNIVVGFAGLLDLGYVGFYAVGGYTYALLNQYFGLSFWECLPLSALASATFGFVLGFPVLRLRGDYLAIVTLGFGEIIRLLANNLTSITGGPDGISGIPKPTVFGFEMARSASVEGAKTFHELVGLEYSGEHVVIFLYLIALVLVCFTLFVTSRLIRMPMGRAWEALRDDEIACRSLGLNPTRIKLSAFTLGASFAGIGGAFFAARQGLVNPESFTFIESALILAIVVLGGMGSQLGVILAAILLTLLPEVARGFAEYRMLIFGLVMVLMMMWRPQGLLPASRPHVELPK

SEQ ID NO: 28956 - protein, 66 aa, Lactobacillus plantarum
MQSGTVKWFNADKGFGFITGSDNKDVFVHFSSIQTDGFKSLDEGQKVSYEVEQGDRGPQATNVVPQ

SEQ ID NO: 28957 - protein, 493 aa, Microbotryum violaceum
MVNVAYDTTGTLVANVDGTQTVYNGGDMAWVLVAGVLVMIMSPGVGFLYSGLLRRKNALSMMMLGVLVYAVITIQWFFWGYSLAFSSTGSAFIGDLKHFGLMNVTLEPSAGSSKIPALLYYFYQSMFATVTVVILVGGIAERARILPLLIFCFCWATIVYDPIANWVWNPNGWLYKLGELDFAGGGPVHITSGTAGFAWSLYLGRRRGYGTAKLAYRPHSVFQIILGTVFLWFGWFGFNGGSELAMNLRAVQASTVTNIAAAMGGITWFAMDWFYTKKWSAVSMCSGILAGLVGITPAAGYIGSPAALAIGFLTAIACNFGTGLKVLLGIDDAVDSFALHAIGGYCGSALTALFADSRVAGFDGYTEIPGGWINHNYIQLGWQLAGATTIMAYTFVVTYLLLFVIDHIPGLKLRATEDMEILGIDETELGENAYDFVFRNRDLENPEEFSELHNRATGEDLSRQVSHHSSSSHNKDIKSPHSAVPVTEEKLSV

SEQ ID NO: 28958 - protein, 502 aa, uncultured archaeon GZfos23H7
MEKVKSEKKRETPIGRRQLAAVLVFALVVILALIPGVMAGDPTGAKTLEDDPGAPVDYVWVLICGFLVMFMQPGFAMLEAGVSRAKNTTNVLMKNLVDYSVGSLAFFAVGFALMMGTSAYLLVGTDGFFLAGEAYDVGTSLTWFFMLVFCATAATIVSGAIAERPKFSVYVIYSVVICAFIYPIYGHWLWGGGWLSSADFMTSLGGGYGALDFAGSGVVHAVGGYIALAGCLLLGPRIGRYTKEGKPIPIPGHSITFAVLGAFILWFGWFGFNPGSTLSAHELRISVIAVNTNLCAAAAAMTAMFITWKKFGKADVVMTVNGAVAGLVAITAACAWVAPWASVVIGIVAGFVVCYGYWFLERRGVDDVVGAIPVHGLNGTWGLLALGLFADGTYGNYATEAPFITGLLYGNAGFFGCQLISVVVNFAWAFGTGFLLFYILKHTLGIRVSPEEELAGLDISEHGVVTYPDFVYSEPARPTRLIRMSEAVIERENEPKTEEGEG

SEQ ID NO: 28959 - protein, 646 aa, uncultured archaeon GZfos23H7
MDEKLKTRIDGLSGDDARIIRGDFERELYSTDIGEVPFAKRLFHTTPELVIQPRSIETLKKIVQFANEEKVALFPRGSVSSGLGGVVPTVKGVVLDLSFMNKIVALNREKETIKVQTGVRWSEIENFLNPENLSLRAYPSSFFSTVGGWIATGGYGIGSYRFGHLKYQIESLDVMFPSGEVKFIQSEEEEFARFFGTEGQFGIVLAATLKLRKKQKKSLPHLIYFESAEDAFDFIRGMIKEELKPNHIKYLDAAHLEEANTVLGEDLFRVKDAVLVEFEEDDEETKFLDFAEGRGSLAEDYLSNYIWHERLFPMKRRGGKPTPLACELLIPLEKAVPYLKVVNRITERCWMKIHVESHIVGKDKALLMLTHLCDVREPKAYLTHMSLIPMLTRLGIKFSGVPYGIGIWNVPFIKDKCEKERLKIYKAYKKEVDPRNILNPHKFFAVKTKMANILGITFKPPLFRLLIHLATLTTPIFGKLVSPKEGFKEESVLEKTVYSCIKCGSCAANCPAYLVTNEESVVPKNKLYLAKKLLEGEEISKNDSDKVFLCTHCGMCREVCQNDLDLVGAWTELEKMLEDRFGKPEEAITDFVSTMESSEDYWRFVYKPFFQKESFTKETFQKESFTRETVNTDILSFYGGYHAKKI

SEQ ID NO: 28960 - protein, 490 aa, uncultured archaeon GZfos23H7
MKTPAIKVASSRFPNEISEIEVKRDVSKCINCGTCAKVCPFGVHERKTGYNRVSKPLSYLCIGTSCEDKPFYCVNHCPRKALSLDISSEYSTIGDYRWTRDLIIGTWKQAETGMPLKGRRYEIGNSGGGFDRIFFNFPKDEDGIEEEDISTEIDLNRRKGKKISIEVPFYGGGMSFGSVSLSVMLARAKAARAWGTFTCTGEGGYPEKLKEYDDNVITQVATGLFGVMEDTIQRVKIVEFKYAQGAKPGLGGHLLGDKVTPEVARMREAVLGSSLFSPFPFHSVYSVEDHKKHVDWIKEINPDVIVSVKVSTPTDVDMVAVGSYYAGANIIHLDGSYGGTGAAPDIAKKNIAMPIEYAIPKVHEFLKGEGIRDKMTLIASGGIRTAHDAAKAIALGADGVVIGTAELVALGCVRCGNCESGRGCPRGIATTDPELSKSVNVEWGAQRLVNLYAAWRSEIVDILGRFGMQSIKELVGRYDYLIENHEIPRD

SEQ ID NO: 28961 - protein, 388 aa, uncultured archaeon GZfos26D8
MKKVVLAYSGGLDTSVCIPLLKEHYGYDEVIAVTVDVGQPGDDIKEAKERGAKLSDSYREIDAKEEFVRDYIFPLIKANGNYEGYVLGTAIARPLIAKHVVEVAREEKADAVAHGCTGKGNDQLRFDAVFRTTDLDVVAPMRELSLTREEERKYAAEHGILLKPEHRWSVDENIWSRSIEGAELEEPSFVPPEEIFTWTVSADKAPEDAQTIKIDFEKGVPVSLNGTKMGGVSLLKKLNETGGKHGVGRTDMIEDRVLGFKSRENYEHPAATIILEAHRDLEQLVLTRNELRFKDFVDSAWSELVYQGLIMDPLYESLNAFIDKTQERLNGSVYVKLEKGVARVVGRESPNALYSATVSFDVKQEQKGAEGFSMYHGFQSRMVKNAFQ

SEQ ID NO: 28962 - protein, 942 aa, Oryza sativa Japonica Group
MAAWSWLILLCLVAAATAGVLQARAQPDSKGFISVDCGLPGKTSYVDDKTKISYAADDGFTDGGSFHNISAEYITPALSARYHNVRSFPDGARNCYTLRSLVAGLKYLIRATFMYGNYDGLSKLPIFDVYIGVNFWMMVNISDPSGATLLEAIVVVPDDFVQVCLVNTGTGTPFISGLDLRPLEKKLYPQANDKRGLSLFGRWNFGPISTTEFIRYPDDPHDRIWMPWVSPSYWVEVSTTRPVQHTDEDVFDAPTKVMQTAIAPLNASSNIEFAWVPYTQPKDPAPGYITVMHFSELQLRSSNATRQFYINLNGNMVFSQGYTPAYLYADAIFNSNPFLRYPQYNISINATANSTLPPIINAIEVFSVFSTATVGTDGQDASAMMVIKEKYQVKKNWMGDPCVPKTLAWDKLTCSYDSSKPARITDINLSSGGLSGEISSAFANLKALQNLDLSNNNLTGSIPDALSQLPSLAVLDLTGNQLNGSIPSGLLKRIQDGTLNIKYGNNPNLCTNDNSCQPAKHKSKLAIYVAVPVVLVLVIVSVTILLFCLLGRKKKQGSMNTSVKPQNETASYVPTNGSHGHGSSMQLENRRFTYNDLEKITNNFQRVLGEGGFGKVYDGFLEDGTQVAVKLRSESSNQGDKEFLAEAQILTRIHHKSLVSMIGYCKDGKYMALVYEYMSEGTLREHISGKRNNGRYLTWRERLRIALESAQGLEYLHKWCNPPLIHRDVKATNILLNAKLEAKIADFGLSKTFNLENGTHVSTNTLVGTPGYVDPEYQATMQPTTKSDVYSFGVVLLELVTGKPAVLRDPEPISIIHWAQQRLAQGNIEGVVDARMHGDHDVNGVWKATDIALKCTTQVSAQRPTMTDVVAQLQECLELEEGRCAISNANNNFYTDNNSNSNSSYDMYATDHSIDVSQNSAAFETERNFGRMPSTATGPAAR

SEQ ID NO: 28963 - protein, 927 aa, Oryza sativa Japonica Group
MHVRTTHVAEWIDQQWRLGGGCCCCSASPSPASFAARAARLTRPVSFKLRSPTRRHFGLVYMLFMHREYRAGFISIDCGLPEKTSYVDDATKLKFTSDDAFTDAGTIHNVSSEFATPTTTTDRSLYNVRSFPAGARNCYTVPSVVPGSKYLVRAKFLYGNYDGLNKPPVFDLHLGVNFWQTVTVPSADWLGNAEVIAVVPDDFLQVCLVNTGAGTPFISGLDLRPLPSSLYAPANATQGLVLLDRRNFGASGSTVIRYPDDTYDRVWWPWSNPPAEWSDISTADKVQNTIAPVFDVPSVVMQTAITTRNSSIPIQFSWDTKPNHVYPDPGSIFTLYVTELELLAGNAVRQFNVTINGVIWTKAPYKPVYLSTDAMYNGDRPYRGITRYNFSLNAAGSSTLPPILNAAEAFSVISTADLATDAQDVSAITAIKAKYQVNKNWTGDPCAPKTLAWDGLTCSYAISTPPRITGVNMSYAGLSGDISSYFANLKEIKNLDLSHNNLTGSIPNVISQLQFLAVLYGNNPNLCSNSSSCQLPQKKSNSMLAVYVAVPVVVIGAVAVFLIFFIRKKKNKSKGAVKPQILGNGVQSHSQNGSGGSLLELHNRQFTYKDLAVITNNFQRVLGKGGFGPVYDGFLKDGTHVAVKLRDESSSQGYSEFLTEAQTLTKIHHKNLVALIGYCKDEIHLALVYEHMSEGTLEDKLRGKDRKGRSLTWRERLRIVLESAQGLEYLHKACSPRFVHRDVKSSNILLNANLEAKVADFGLTTAFKCDGDTHVSTVRVVGTYGYLAPEYATALQVSEKIDVYSFGVVLLEVITGQPPIIKLPEPTTIIQWTRQRLARGNIEGVVDVNMPDDRYDINCIWKVADVALKCTAHAPGQRPTMTDVVTQLKECLELEETSFKGDTSSSYMSGSSIDPNSSYNTYTTEMS

SEQ ID NO: 28964 - protein, 186 aa, Bartonella vinsonii subsp. arupensis
MKFLDQAKVYIRSGDGGAGAVSFRREKFIEFGGPDGGNGGRGGDVWAVVVDGLNTLIDYRYQQHFRAKTGEHGKGRNMSGAKGDDIILKVPVGTQIFEEDNETLICDLTEVGQRYLLAKGGNGGFGNLHFTTSTNRAPRRANPGLSGEERSLWLRLKLIADGGLVGLPNAGKSTFLASVTAAKPKV

SEQ ID NO: 28965 - protein, 360 aa, Escherichia coli
MDKIIISPAKYIQGNGSLDNIATYAASLGTEPLIIADEFVTGLVGDRVSQSFARENIIADFDVFCGECSQNEISRIRKKFNQRKYNVVIGIGGGKTLDTAKAVAYYQKIPVVVVPTIASTDAPTSSLAVIYTPEGQFSEYLFFPKNPDMVIMDTGVISAAPVRLLVAGMGDALSTWFEARANQASGKATMAGGASTLAALAIARLCYTTLLEDGYKAKVAVEQGVSTKAVENIIEANTYLSGIGFESSGLAAAHAIHNGMTQLEECHHCYHGEKVAFGVLVQLVLENAPQEEIETVLNFCHSVGLPTNLHMLGVKEINKDKLRAVAKAATAEGETIHNMPFVVTAQDVLCAILTAHHLGL

SEQ ID NO: 28966 - protein, 513 aa, Escherichia coli
MQYLKKRFSLIELNVFIPAILFIAVIILCLTIYPQDTSRYINKIHHFLTWEMGGIFLVMTFLVVLCCLWLAFSRYGDILLGQSGEKPDFSLLTWLGLIFTSGTGGSLLYLASVEWIWIIQQPPFGATAGSAQAARWASAYGMFHWGPSAWAWYLICAVPIGWFMHVKKTNSLKVSDLCRGCLGARADGFCGHCVNFFYMFGLLGGAVTSLALGTPMISAVFCHVFHLDPAGQFINVMVIFIWTLVPLFILFFGLKKGVAWASNWNIRADILMLLAILICGPTAFILNQSIDGLGLMLQNFVAMSLSTDAIGRSGFPQMWTVFYFSWWVVYAIPFGLFIARISKGRTIRQLIVCGTLAGSLGCMVFYMVLANFGLSLQTTHVIDFVPILNEQGRGVVVSRLLEQLPASQVFLVAFGAIALISYITGHCTVGYALGFATQKRADSESEPAFWNVAFWLIMTGIVAITLYLLDAQSLQPLQTVSILAGLPLCGVVFILLKSFLTQLAAEEKNARDE

SEQ ID NO: 28967 - protein, 295 aa, Escherichia coli
MNIGFIGTGIMGKPMAYNLQQAGHTLYFSAHFEPAPQELIGERGIVCSTPREVAQECEVIITMLPDTPHVEDVLFHPNYGVIHGLSHGKIVIDMSSISPVATKAFAQRIIAGGAEYIDAPVSGGEVGAKAGTLSIMVGGCEEVYLQIKPILELMGKNITLVGNVGDGQTCKVANQIIVALNIEAVAEALLFASKSGADPARVREALMGGFASSRVLEVHGERMIKGTFEPGFRISLHQKDLNLALENARLLNTPLPNTAMTQQLFSACAALGGKEWDHSALIRALETQANFTIRK

SEQ ID NO: 28968 - protein, 304 aa, Dracunculus vulgaris
MGGHDSGRSDISFGGRFASSAFAACFAELCTIPLDTAKVRLQLQKKSVAGDGVSLPKYRGMLGTVATIAREEGLSALWKGIVPGLHRQCLFGGLRIGLYEPVKSLYVGEGFVGDVPLSKKILAGLTTGALAITVADPTDLVKVRLQAEGKLPPGIPRRYSGALNAYSTIVKQEGLGALWTGLGPNIARNAIINAAELASYDQVKQTILKIPGFSDNIFTHILAGLGAGFVAVCIGSPVDVVKSRMMGDSTYKSTLDCFIKTFKNDGPLAFYKGFIPNFGRLGSWNVIMFLTLEQVKKVFIKEAP

SEQ ID NO: 28969 - protein, 400 aa, Butyrivibrio fibrisolvens
MGKESSFSCACRTAIGTMGGSLSTIPAVDLGAIVIKEALNRAGVKPEDVDHVYMGCVIQAGQGQNVARQASIKAGLPVEVPAVTTNVVCGSGLNCVNQAAQMIMAGDADIVVAGGMENMSLAPFALPNGRYGYRMMWPSQSQGGLVDTMVKDALWDAFNDYHMIQTADNICTEWGLTREELDEFAAKSQNKACAAIEAGAFKDEIVPVEIKKKKETVIFDTDEGPRQGVTPESLSKLRPINKDGFVTAGNASGINDGAAALVVMSEEKAKELGVKPMATFVAGALAGVRPEVMGIGPVAATQKAMKKAGIENVSEFDIIEANEAFAAQSVAVGKDLGIDVHKQLNPNGGAIALGHPVGASGARILVTLLHEMQKKDAKKGLATLCIGGGMGCATIVEKYE

SEQ ID NO: 28970 - protein, 400 aa, Butyrivibrio fibrisolvens
MGKKVVIASACRTAIGTMGGSLSNTPAVDLGAIVIKEAVKRAGIKPEDVEHVYMGCVIQAGLGQNVARQAAIKAGLPNETTAVTTNVVCGSGLNCVNQAAQMILAGDADVVVAGGMENMSLAPFALPNGRFGYRMTWPSNSQGALVDTMVKDALWDAYNDYHMIKTADNVAEQWKLTREELDEFAVNSQNKACAAIESGAFKDEIVPVEIKKKKETVLFDTDEGPRPGTTMEGLAKLKALYPNGVVTAGNASGINDGAAALVVMSEEKAKELGVKPLVTFVAGALGGCAPEIMGVGPVPATKKALAKAGLTIDDLDVYEANEAFAAQSVAVGKELGFDLKKLNPNGGAIALGHPVGASGARILVTLIYDMIHNPEYKKGLATLCIGGGMGCATIVEKYEG

SEQ ID NO: 28971 - protein, 318 aa, Mannheimia succiniciproducens MBEL55E
MSDTKPFPIPVNYFSMVLGLAGLGLAWRYAAIILPLPAIIGESVLTVATAIWLALIVIYIYKWKAYPEQAKAELYHPILGCFVSLIPITTILVAMGALPYSRETAVVLTASGIIGQLGFAMFRSAGLWRSGHPQEAATPVLYLPTVATNFVSANALGSLGYSEIGALFLGGGMLAWFFLEPAVQQRLRNLTALPENIRPIIGIQLAPAFVCCSAYLAINDGEIDLLAKGLVGYGLLQLFFLLRLMPWIATKGFTMPFWAFSFGLASMAGVGLHTAHSSSSPYLELLGLAMFGFASCCITLLTLGTLSLIRKEKFLIKN

SEQ ID NO: 28972 - protein, 402 aa, Mannheimia succiniciproducens MBEL55E
MTFDTYETLALACLVLLLGYFLVKRVKLLSNFNIPEPVVGGFIVAIVLTVVHEIWGLSFSFDSNLQRTMMLVFFSSIGLSANFARLIKGGKPLVMFLVVAAMLIAIQDTVGIFGSMALGLDPAYGLIAGSVTLTGGHGTGAAWAETLTNDFGISGAMELAMACATFGLVFGGIIGGPVARFLLTRLHKEEVPEDENVDDVQEVFEKPVYRRKVNSRAIIETISMMAVCLLVGQFLDELAKGTAFQLPTFVWCLFTGVILRNTLTLVFKFTAPDQTIDVLGTVGLSIFLAIALMSLKLWELAGLALPVFVILTLQVVVMATFAILVTYRVMGSDYDAVVLSAGHCGFGLGATPTAVANMQAVTAHFGHSHKAFLIVPMVGAFFIDLLNASLLKFFVEVAAYFH

SEQ ID NO: 28973 - protein, 330 aa, Mannheimia succiniciproducens MBEL55E
MKKSFILQQQEISFTKNTFTEKLAEHLGLVEVQGPILSQVGNGIQDNLSGTEKAVQVNVKMITDAAFEVVHSLAKWKRHTLARFGFAEGEGLFVHMKALRPDEDSLDQTHSVYVDQWDWEKVIPEGRRNLDYLKETVREIYAAILETEAAVDKKYGLKSFLPKEITFIHSEDLVKDYPGMTDKERENELCKKYGAVFLIGIGGVLPDGKPHDGRAPDYDDWTTTSEGEYKGLNGDILVWNPILNRAFEVSSMGIRVDETALRKQLSITGDEDRLKFDWHQDLINGRMPLSIGGGIGQSRLAMLLLQKRHIGEVQSSVWPKAVMEQYENIL

SEQ ID NO: 28974 - protein, 686 aa, Mannheimia succiniciproducens MBEL55E
MFIEDNRPNNMEHLMSLYQQLRATSTLKAPIFMPTVIFVLLVTVFCSVFPEQAQITLNTVKQSIFTHFSWFYILAGSIFFLFLIFLCGSRLGDIRLGADNDEPEFSFTSWIAMLFAAGMGIGLMYFGVAEPVLHYVKPVQENLTEAERMKEAMMTTFYHWGIHAWAIYAVIALALAYFGFRYKLPLTVRSGFYPLLKNNLSGFWGHLIDIVALCSTIFGLTTTLGYGAMQVNAGFNNLGLIDSNSFVVLAVIMIVSMMLAVISAISGVGKGVKILSETNLVLGGLLLIFVIIAGPTLWLFSGLTENLGYYFSSLLELSFRTFAYEPEHQSWLSGWTILYWSWWASWAPFVGMFIAKISKGRTIREFILGVLFVPSLFNILWMTSFGGSAIWIDQQTHGALAAISDNTEALLFGFFDQLPFGQIASVIALLVISIFFITSADSGIFVLNNMASQGSGKAPKWQSVFWGALLAVLGLSLLYSGGLASLQSMTLIIALPFMAIMLVLCFGLWKGLMVDTQYSSKKFTQGSVLWTGENWKERLEKIVNPTDRKDIRRFLNQIARPAFNDLVKEFLEHGLNAQMNFIDGKNPKIEFEVVNENLRNFLYGIRLQSRQLSDLVVDDDNLPNLEESKIYEPITYFFDGREGYDVQYMTQEELIVDVLKQYERFMNLAMDKSHNLMTADVENMAE

SEQ ID NO: 28975 - protein, 356 aa, Mannheimia succiniciproducens MBEL55E
MSYRAYVIRPNRKGIKQMAKTNKNPLCINELQVYSIVQEAPKVKTINFIAQDFYPYEAGQYALVSIRNTPHITRAYSLSSTPGESRFVSITVREIDGGVGSGWLNNEVKVGDQVWFSNPMGDFSCQKVIADNYLLVGAGSGVTPIMSMTRWLLKNRPQANVSVIHSVHSPQDVIFKSEWAQLKADNPRLNLVFNASVNATAGFESGRISKEILTKAVPNLTDYTVMTCGPQAYMDALKTMVLELGGSEQRFFTEAFFNTALAGDISSDKKTTLTVSGAKPMKTEVPVGMTLLAALEAQEQPVVSGCRTGLCGLCKTKVTGGEYEIVSNGDLTQEEIAQGYVLACSCRVKADMTVEI

SEQ ID NO: 28976 - protein, 409 aa, Mannheimia succiniciproducens MBEL55E
MDSNFIFGIGAFTAIVLVLAVVILIAKSKLVDSGDITISINNDPEKAITLPAGGKLLGALASKGIFVSSACGGGGSCGQCKVKVKSGGGEILPTELSHISKKEAKEGWRLSCQVNVKSSMDVELPEEVFGVKKWECTVISNDNKATFIKELKLAIPEGEEVPFRAGGYIQIEAEPHTVNYKDFDIPEEYHEDWDKFNLWRYVSKVDEHIIRAYSMASYPEEKGIIMLNVRIATPPPRNPDVPPGQMSSYIWSLKPGDKVTISGPFGEFFAKDTDAEMVFIGGGAGMAPMRSHIFDQLKRLHSKRKISFWYGARSKREMFYVEDFDQLQAENDNFTWHVALSDPLPEDNWDGYTGFIHNVLYENYLKNHEAPEDCEYYMCGPPVMNAAVINMLESLGVEHENILLDDFGG

SEQ ID NO: 28977 - protein, 317 aa, Mannheimia succiniciproducens MBEL55E
MTETKPENIVQHNETTAAEQETYCGFVAIVGRPNVGKSTLLNKILGQKISITSRKAQTTRHRIVGIHTEGPYQAIYVDTPGLHIEEKRAINRLMNRAASSAISDVDLIIFVVDGIHWNADDEMVLNKLRASKAPVVLAINKIDNIKNKDELLPFITELSGKFNFKEIIPISAQRGNNVHNLQKVVRQSLRKGVHHFPEDYVTDRSQRFMASEIIREKLMRFMGEELPYSVTVEIEQFKMNERGTYEINGLILVEREGQKKMVIGQGGQKIKTVGIEARADMERLFDNKVHLELWVKVKSGWADDERALRSLGYMEEY

SEQ ID NO: 28978 - protein, 757 aa, Mannheimia succiniciproducens MBEL55E
MDEQLRQAALDFHEFPVPGKIEVTPTKSLATQRDLALAYSPGVAMPCLEIQEDPAKAYNYTAKGNLVAVISNGTAVLGLGNIGALAGKPVMEGKGVLFKKFAGVDVFDIEINEKDPEKLVEIIAALEPTFGGINLEDIKAPECFYIEQKLRERMNIPVFHDDQHGTAIISSAAVLNGLRIINKKIEDVRLVASGAGAASIACLNLLVSLGMKRENITVCDSKGVIYKGRDENMDATKKLYAIDDNGTRSLADAIPNADIFLGCSAAGALTQEMVKTMGPNPLILALANPNPEITPPEAKAVRPDAIVCTGRSDFPNQVNNVLCFPFIFRGALDVGATTINEEMKMAAVRAIADLALAEQSDVVSSAYTDESEVTFGPEYVIPKPFDPRLIIRIAPAVAKAAMDSGVATRPIQNFDAYIEKLTQFVYKTNLFMKPVFNQAKADKKRVLLTDGEETRILHAVQEISTLGIAYPVLVGRLDVIEAQIKRLGLKIQAGVDFEVLNTDNEEIYQQCWSLYHNKLKRHGVTEAMAKRRMLTNSTAIGSALLELGYADAMLCGLVGTYSSSLSLLKEVIGIKENVDIPATVNGLVLPSGNLFIADTFVNLAPTAEELAEITLMAAEEVRRFGIEPQVALISHSNFGTSEDQSAVKMREVLQLVKTQAPDLIIDGEMHANVALNENLRREVMPDSPLKGAANLLIMPDMESARISLNLLQGTATPITIGPILMGMKKPAHILTSVSSVRRIINMVAIAAVKAQQN

SEQ ID NO: 28979 - protein, 283 aa, Mannheimia succiniciproducens MBEL55E
MKSEDFKLAWMASPTEMAQTGLDVGVYKATKKQAYSFLSAISAGMFIALAFVFYTTTQTASAGAPWGLTKLVGGLVFSLGVIMVVVCGCELFTSSTLSTIARFESKITTIQMLRNWIVVYFGNFVGGLFIVALIWFSGQIMAANGQWGLTILNTAQHKIEHTWVEAFCLGILCNIMVCIAVWMAYAGKTLTDKAFIMILPIGLFVASGFEHCVANMFMIPMGMVIANFASPEFWQATGLNAEQFANLDMYHLVIKNLIPVTLGNIVGGGVCIGLMQWFTSRPH

SEQ ID NO: 28980 - protein, 190 aa, Mannheimia succiniciproducens MBEL55E
MNKERMVKKAIFLDRDGTINIDHGYVHKIDDFHFIEGSIEALEELKNMGYLLVLVTNQSGIARGYFSEDEFLQLTEWMDWSLADRNVDLDGIYYCPHHPEGLGEYRQDCDCRKPKPGMLLQAIEELNIDPAQSFMVGDKVEDLKAAVSANVKYKVLVKTGKTVTQAGEQLADYVLDSIADLPRIIKRLKK

SEQ ID NO: 28981 - protein, 540 aa, Mannheimia succiniciproducens MBEL55E
MDSRRSLLVLALLFISFLVYEQWQMDYNTPKPVATEQAQAVSSNAEMPASTSSTEGTVDNVAQGKIISIQNDVFTLKVDTLGGDVVESSLTNYAAELNSDARFILLQNKPNEVYVAQSGLIGKNGIDTKAGRAAYQVEAEQFTLADGQNELRVPLTLEKDGVIYRKVFVIKAGSYDIEVNYEIQNQTNEAIEVQPYGQLKHTLVQSSGSMAMPTYTGGAYSSADTNYKKYSFDEMKDKNLSIDTKAGWVAVLQHYFVSAWIPNQDADNQLYTSTANGLGFIGYRGPVVNVPAGGSETIKSALWTGPKLQNEMGAVANHLDLTVDYGWAWFIAKPLFWLLNVIQSIVSNWGLAIIGVTIVVKGILYPLTKAQYTSMAKMRMLQPKLQEMRERFGDDRQRMSQEMMKLYKEEKVNPLGGCLPLLIQMPIFIALYWTFMEAVELRHAPFFGWIQDLSAQDPYYILPILMGASMFLLQKMSPTPVADPMQQKIMNFMPLIFMVFFLWFPAGLVLYWLVSNIITIVQQQLIYRGLEKKGLHSRKK

SEQ ID NO: 28982 - protein, 613 aa, Mannheimia succiniciproducens MBEL55E
MTETKITFGDLGLPEFILSAVSDMGFETPSPIQQACIPHLLNGRDVLGMAQTGSGKTAAFSLPLLAQIDIEEKHPQMLVMAPTRELAIQVAEACELFTKNAKGVHIATLYGGQRYDIQLRALRQGAQVVVGTPGRILDHIRRGTLNLSELKFIVLDEADEMLRMGFIDDVETVMAELPAQHQTALFSATMPEPIRRITKRFMTDPQEVKIQSTQRTNPDIAQSCWYVRGYRKNEALLRFLEVEDFDGAIIFTRTKTGTLDVTELLEKHGFRAAALNGDMTQQLREQTLDRLRNGSLDILVATDVAARGLDVERISLVVNYDIPLDAESYVHRIGRTGRAGRSGSAILFVEPRERRLLSNIERLMKKPIEEVDVPNHEALQARRREKFKAKITKQLEHHDLEQYRLLLEGLFTPDQDQEDIAAAMLMLLQGKQKLILPPEPPMEKRGRRERDDRRGERGDRRERRPEERRGYGNPQPMDLYRIEVGRADGVDVRHIVGAIANEGDINSRNIGHIKLYDEYSTVELPQGMPKELLQVFGKARVLNKQMRMTFVSEAGETVGRERHEGRRNDRRDNGFRREERRFNDRGNRSFNERAPRREFRERNDRRDRRDRRS

SEQ ID NO: 28983 - protein, 504 aa, Mannheimia succiniciproducens MBEL55E
MFGLDPTLITFTIYILGMLAIGVLAYYYTNNISDYILGGRRLGSFVTAMSAGASDMSGWLLMGLPGAVYVSGLIEGWIAIGLTIGAYLNWLFVAGRLRVHTEFNNNALTLPEYFHSRFGTSHNLLKIISASIILVFFTIYCSSGVVAGAKLFQNLFGIPYATALWYGALATIAYTFIGGFLAVSWTDTIQATLMLFALILTPVVIVVSLGGIDGFSASMQSAEIDMQKDFTDLFTGTSTLGLFSLAAWGLGYFGQPHILARFMAAYSAKSLHKARRISITWMIICLIGAISIGFFGIAFFHANPQIAEVVTKEPEQVFIELAKLLFNPWVAGILLSAILAAVMSTLSCQLLLASSAITEDFYKGFIRPKAGEKELVWLGRIMVLIIAALAIWIAQDENNKVLKLVEFAWAGFGSSFGPVVLLSLFWKRMTSSGAIAGMLTGAIVVFSWKSVIPATSEWSGVYEMIPAFSLASLMIILVSLLSPAPNKEIVETFEKANLAYKNAE

SEQ ID NO: 28984 - protein, 644 aa, Mannheimia succiniciproducens MBEL55E
MNLTRRIKMGKIIGIDLGTTNSCVAVMDGDKPRVIENAEGERTTPSIIAYTQDNEVLVGQPAKRQAVTNPKNTLFAIKRLIGRRFEDQEVQRDVNIMPFQIIKADNGDAWVDVKGDKLAPPQISAEVLKKMKKTAEDFLGETVTEAVITVPAYFNDAQRQATKDAGRIAGLEVKRIINEPTAAALAYGLDKGKGNQTIAVYDLGGGTFDLSIIEIDEVGGEKTFEVLATNGDTHLGGEDFDNRVINYLVDEFKKEQGVDLRNDPLAMQRLKEAGEKAKIELSSAQQTDVNLPYITADATGPKHLNIKLTRAKLEALVEDLVARSMEPVKVALSDAGLSVSQIDDVILVGGQTRMPLVQQKVAEFFGKEPRKDVNPDEAVAVGAAVQGGVLAGNVTDVLLLDVTPLSLGIETMGGVMTTLIEKNTTIPTKKSQVFSTAEDNQSAVTIHVLQGERKQASANKSLGQFNLEGINPAPRGMPQIEVTFDIDADGIIHVSAKDKGTGKEQQITIKASSGLSDEEIQQMVRDAEANAEADRKFEELVQARNQADALVHSTRKQLTEAGDKLSADDKAPIEKAVNELEAAAKGEDKAEIEAKIQALIQVSEKLMQAAQQQAQADAGAQQAQGNNGGDDVVDAEFEEVKDNK

SEQ ID NO: 28985 - protein, 619 aa, Mannheimia succiniciproducens MBEL55E
MVSADCRRRAGLIFGSYYNIGYNAPIIFLRRYTFMQKLQENDLSTSQTFKRLWPTIAPFKIGLIAAAAALVLNALTDSGLIYLLKPLLDDGFGKADTSFLKLMAVLVIVFIFIRGITSFISSYCLAWVSGKVVMTMRRRLFKHLMYMPVSFFDQNSTGRLLSRITYDSEQVANSSSNALVTIVREGAYIISLLAVMIATSWQLSVVLFIIGPVIAVLIRLVSKIFRRLSKNMQNSMGELTATAEQMLKGHKVVLSFGGQQIEEQRFNEVSNDMRRKGMKMVVADAISDPIVQIIASLALSAVLYLATIPSIMSQNLSAGSFTVVFSSMLAMLRPLKSLTNVNSQFQRGMAACQTLFDILDLDTEKDKGKYEAERVKGDVSFKDVSFTYQGKDQPALKHLSFDIPHGKTFALVGRSGSGKSTIANLVTRFYDINQGEILLDGVNVQDYTLSNLRTHCSVVSQQVHLFNDTIANNIAYAAKDKYSREQIIAAAKAAHAMEFIEPLENGLDTVIGENGASLSGGQRQRLAIARALLRDSPVLILDEATSALDTESERAIQAALEELQKDRTVLVIAHRLSTIEKADEILVIDHGEICERGSHEELLALNGAYKQLHKMQFNG

SEQ ID NO: 28986 - protein, 634 aa, Mannheimia succiniciproducens MBEL55E
MNDMVKNIILWVVVAVVMMTAYQGFSSSANGSAVDYTTFVTDVGNNQIAQARFEDTEILVTKTDGSKYSTVMPIYDDKILNDLLNKKVKVEGTMPEKRGLLSQILISWFPMLFLIGVWLFFMRQMQGGGGKAMSFGKSRAKMLTKEQIKTTFADVAGCDEAKEEVGEIVDFLRDPGKFQKLGGKIPKGILMVGPPGTGKTLIAKAIAGEAKVPFFTISGSDFVEMFVGVGASRVRDMFEQAKKNAPCLIFIDEIDAVGRQRGAGLGGGHDEREQTLNQMLVEMDGFEGNEGVIVIAATNRPDVLDPALTRPGRFDRQVVVGLPDVRGREQILKVHMRKVPIGADVDAMTLARGTPGYSGADLANLVNEAALFAARTNKRVVTMLEFEKAKDKINMGPERRTMIMTDKQKESTAYHEAGHAIVGYLVPEHDPVHKVTIIPRGRALGVTFFLPEGDQISVSQKQLESKLSTLYAGRLAEDLIYGEENISTGASNDIKVATNIARNMVTQWGFSDKLGPILYTEDDGEVFLGRSMAKAKHMSDETAHIIDEEVREIVARNYDRARQLLIDNMDILHAMKDALVKYETIEEIQIKQLMNREAVTPPAGWEDHSSADNSSSNTAETEPSENETEENSVN

SEQ ID NO: 28987 - protein, 311 aa, Mannheimia succiniciproducens MBEL55E
MDYLQNARETLATEKDALTLLSRNLDQSFNNVIDLILNCGGRLVIGGIGKSGLIGRKMVATFASTGTPSFFLHPTEAFHGDLGMLKPIDIVMLISYSGESDDVNKLIPSLKNFGNTIIALTGNKHSTLAKHADYVLDISVEREACPNNLAPTTSALVTLALGDALAVALINARHFQPMDFAKFHPGGSLGRRLLCRVKDQMQTNLPVTALNTSFTDCLTIMNEGRMGVALVMENDDLKGIITDGDIRRALAANGADTLNKVARELMTSNPKVINQDTYIGQAEDYMKEHRIHSLIVVDNDNKVVGLVEFSS

SEQ ID NO: 28988 - protein, 712 aa, Mannheimia succiniciproducens MBEL55E
MSRTIILIPISAGVGLTSVSLGLIRALEQKGTKIGFMKPISQPRSGEDMLDRTTSIVRTSTTIETTEPVMLSEAENLIGQNQTDVLLEKIVAQHQQISKDNDIVIVEGLIPSRKNSYANSVNYDIAQALDAEIILVSAPATETPAQLKERVEAAAASFGGKSNPNLLGVVINKFNAPVDESGRTRPDLTEIFDSFQHSHNNIKEIYKLFENSPIKVLACIPWSADLIATRAIDLVKHLGASILNEGDMNRRIRSITFCARTLPNMIEHFKAGSLLVVSADRPEILTAAALAATTGIELGGILLTGGYKIDCEIKKLCNPTFENTKLPVFRIEGNTWQTALSLQSFNLEVPVDDKERIENIKQYTSGQFDADFIHSLASASVRARRLSPPAFRYQLTELARAAKKRIVLPEGDEPRTIKAAVLCAERGIAECVLLAKPEDVKRVADSQGVKLGNGITVIDPASVRENYVARLVELRKAKGMTEMAAREQLEDTVVLGTMMLEAGEVDGLVSGAVHTTANTIRPPMQIIKTAPGSSIISSIFFMLLPDQVLVYGDCAVNPDPTAEQLAEIAIQSAESAKSFGIDPRVAMISYSTGTSGSGADVEKVKEATRIAQEKRPDLLIDGPLQYDAAVMEDVARSKAPNSKVAGKATVFVFPDLNTGNTTYKAVQRSADLVSIGPMLQGMRKPVNDLSRGALVDDIVYTIALTAIQATQC

SEQ ID NO: 28989 - protein, 423 aa, Mannheimia succiniciproducens MBEL55E
MCERMSFNVNPKDRLFMSQKLVLILNCGSSSLKFSILDPKTGEEKLSGLAEAFYLDDARIKWKLHGEKGNAELGKGAAHSEALNFIVNNIFPLDPTLKDGIVAIGHRIVHGGEKFTSSVIVTDEVVKGIEDAIQFAPLHNPAHLIGIKEAFKIFPHLKDKNVVVFDTAFHQTMPEEAYLYALPYSLYKEHGVRRYGAHGTSHYFVSREAAKRLGVAEDKVNVITCHLGNGGSVSAVRHGQCIDTSMGLTPLEGLVMGTRCGDIDPAIMFYMHDTLGMSVEEINTTLTKKSGLLGLTEVTSDCRFAEDNYDNEDESLRVPAKRAMDVYCYRLAKYIGSYMAVIGERLDAIVFTGGIGENSAHVREITLNHLKLFGYQLDQEKNLAARFGNEGIITADNTPIAMVIPTNEELVIAQDTARLCIKD

SEQ ID NO: 28990 - protein, 69 aa, Mannheimia succiniciproducens MBEL55E
MEVGVVKWFNNAKGFGFINAEGSDADIFAHYSVIEMDGYRSLKAGQKVNFEVVHGEKGSHATKIIPILE

SEQ ID NO: 28991 - protein, 554 aa, Mannheimia succiniciproducens MBEL55E
MNNNEILIEETRPTNFIRQIIDEDLASGKHNNVYTRFPPEPNGYLHIGHAKSICLNFGIAQDYQGKCNLRFDDTNPVKEDVEYVDSIKQDVEWLGFKWEGEPHYASDYFDQLYGYAIELIEKGMAYVDELSPEQMREYRGTLTEPGKNSPYRDRSIEENLNLFEKMKNGEFAEGAACLRAKIDMASPFMVMRDPVLYRVKFASHHQTGDKWCIYPMYDFTHCISDAIERITHSLCTLEFQDNRRLYDWVLEHISIERPLPHQYEFSRLNLEGTLTSKRKLLKLVAEGAVDGWNDPRMPTISGLRRRGYTPAALREFCRRIGVTKQDNVVEFSALESCIRDDLNRNAPRAMAVLNPLRIVIENFTEKEVLTAPNHPNYPELGTHEMSFTKEIYIDQADFREEANKQYKRLVLGKEVRLRHAYVIKAERVEKDEQGGITTVYCSYDPETLGKNPADGRKVKGVIHWVSATENLPAEFRVYGRLFNVPNPGAEEDILAAMNPESLVVKHGVVEMSLANAEPEKAYQFEREGYYCADNKDSKAGNLVFNLTVSLKEGF

SEQ ID NO: 28992 - protein, 70 aa, Mannheimia succiniciproducens MBEL55E
MSKLNGLVKWFNSDKGFGFITPADGSKDLFVHFSSILGNNYRSLNEGDRVEYNVENTQRGPAAVEVAVIK

SEQ ID NO: 28993 - protein, 110 aa, Mannheimia succiniciproducens MBEL55E
METLDKIKKQIAENPILIYMKGSPKLPACGFSARAVEALINCQVPFGYVDILQHADVRAELPKYANWPTFPQLWVEGELIGGCDILLEMYQAGELQTLLKEVAERHKEQV

SEQ ID NO: 28994 - protein, 510 aa, Mannheimia succiniciproducens MBEL55E
MLIGVPRELLDNESRVAATPKTVQQILKLGFDVIIEHDAGFKASFEDNAFEQAGAKIGDQQAVWNADVIFKVNPPTDDEIALMKEGSTLVSFIWPAQRPDLMEKLSTKNVNVLAMDAVPRISRAQALDALSSMANISGYRAVIEAANAFGSFFTGQITAAGKVPPAKVLVIGAGVAGLAAIGAANSLGAIVRAFDSRPEVKEQVQSMGASFLEIDFKEEGGSGDGYAKVMSEEFNRRAMELYAEQAKDVDIIITTAAIPGKPAPRLITKEMVDSMKPGSVIVDLAALTGGNCEYTKAGEIFVTDNQVKVIGYTDFPSRLPTQSSQLYGTNLVNLLKLLAPNKDGQIDLNFEDVVIRGVTVIRNGEVTWPAPPIKVSAQPQQKAAAQKVEKKEEKPKDPRIKYGVMALAAILFLWLASVAPSAFLSHFTVFVLACVVGYYVVWNVSHALHTPLMAVTNAISGIIIVGAVLQIAQGSFFISVLAFIAILVASINIFGGFKVTQRMLAMFRKG

SEQ ID NO: 28995 - protein, 574 aa, Mannheimia succiniciproducens MBEL55E
MKMKKLSGAEMVVQSLRDQGVKYLFGYPGGSVLDIYDAIHTLGGIEHVLVRHEQAAVHMADGYARSTGEVGCVLVTSGPGSTNAVTGILTAYTDSVPLVIITGQVRSNLIGTDAFQECDTIGLTRPVVKHSFMVKHAEDIPETIKKAFYIASSGRPGPVVIDIPKDVVNPANKYTYEYPKEVSLRSYNPNVQGHKGQIKKALKALLVAKKPVLFIGGGVIIGNSSEKLTQFAQLLNLPVTSSLMGLGGYPGTDKQFLGMLGMHGTYQANMAMHNADLILGIGVRFDDRTTNNVEKYCPHAKVIHVDIDPTSISKNIAADIPIVGSVDNVLTEFLSLLEDDNLSKSQSDLTEWWKQIDEWKAKKCLEFDRTSQAIKPQAVVEAIYRLTKGEAYIASDVGQHQMFAALHYPFDKPRHWINSGGAGTMGFGLPAAIGTKFAHPDSRVVCITGDGSIQMNIQELSTAKQYGTPIVIVSLNNRFLGMVKQWQDLIYSGRHSQVYMNSLPDFAKLAEAYGHVGIQINTADELEEKLTQAFAVKDKLVFVDVLVDATENVYPMQITGGGMNEMLLGKPAEK

SEQ ID NO: 28996 - protein, 444 aa, Mannheimia succiniciproducens MBEL55E
MSNTILQNLPLGQKVGIAFSGGLDTSAALLWMRQKGAVPYAYTANLGQPDEDDYNAIPKKAMAYGAENARLIDCRKQLAQEGIAAIQCGAFHISTGGVTYFNTTPLGRAVTGTMLVAAMKEDDVNIWGDGSTFKGNDIERFYRYGLLTNPNLKIYKPWLDDQFIDELGGRFEMSQFLIANGFDYKMSVEKAYSTDSNMLGATHEAKDLEDLSTGIKIVKPIMGVAFWDESVEIKPEVVTVRFEEGVPVELNGKRFDDVVELFMEANRIGGRHGLGMSDQIENRIIEAKSRGIYEAPGMALFHIAYERLVTGIHNEDTIEQYRINGLRLGRLLYQGRWFDPQALMLRESSQRWVAKAITGEVKLELRRGNDYSILDTVSPNLTYEAERLSMEKVEDAPFDPIDRIGQLTMRNLDVTDTRNKLGIYSEAGLLTAGKDAVVPQLGSK

SEQ ID NO: 28997 - protein, 316 aa, Mannheimia succiniciproducens MBEL55E
MPDIKLFAGNATPELAKRISERLYISLGDATVGRFSDGEIQVQINENVRGSDVFIIQSTCAPTNDNLMELIVMVDALRRASAGRITAVIPYFGYARQDRRVRSARVPITAKVVADFLSSVGVDRVLTCDLHAEQIQGFFDVPVDNVFGSPVLINDILKKTDLENPIVVSPDIGGVVRARAVAKLLNDTDMAIIDKRRPKANVSQVMHIIGDVSDRDCILVDDMIDTGGTLVKAAEALKERGAKRVFAYATHAVFSGSAAQNIANPALDEVVVTDTIPLSAEIKALGKVRSLTLSAMLAEAIRRISNEESISAMFDA

SEQ ID NO: 28998 - protein, 390 aa, Mannheimia succiniciproducens MBEL55E
MKFIDEALIRIEAGDGGNGCVSFRREKYIPKGGPDGGDGGDGGDVYLIADENLNTLIDYRFEKRFAAERGENGRSSNCTGHRGKDITLRVPVGTRAIDNDTKEIIGDLTKNGAKLLVAKGGYHGLGNTRFKSSVNRAPRQKTMGTPGEKRDLQLELMLLADVGMLGLPNAGKSTFIRAVSAAKPKVADYPFTTLVPSLGVARVDANRSFVVADIPGLIEGASEGAGLGIRFLKHLERCRVLIHLVDIAPIDESDPADNIGIIESELFQYSEKLADKPRWLVFNKIDTISDEEAAKRAKDITERLGWEEDYYLISAATGKNIPQLIRDIMDFIEANPREVEEEEKAAEEVKFKWDDYHNEQLSERGFDDEEDWDDDWSEEDDEGVEFIYKP

SEQ ID NO: 28999 - protein, 450 aa, Mannheimia succiniciproducens MBEL55E
MANLSVAKFGGTSVANYAAMTACAKIVIADPNTRVVVLSASAGVTNLLVALANGCEATQRAKLLAEVRQIQENILNELKDAGTVRLEIEELLTNIEYLAEAASLATSSALTDELISHGEMMSTKIFVQVLRELNAQATWVDVRTVVATNSNFGKAAPDDEQTQKNSDNVLKPLIDRGELVITQGFIGRDPNGKTTTLGRGGSDYSAALIAEVLNAKDVLIWTDVAGIYSTDPRIVPNAQRIDTMSFAEAAEMATFGAKVLHPATLLPAVRSNIPVYVGSSKAPEQGGTWVTRDPQPRPTFRAIALRRDQTLLTLSSLNMLHAQGFLANVFNILAKHKISVDTITTSEVSVALTLDKTGSASSGAELLSSDLLNELSEVCTVKVDTGLALVALIGNDLHLSAGIAKRIFGTIEEYNIRMISYGASTNNICTLVHSAHADDVVRALHKELFE

SEQ ID NO: 29000 - protein, 286 aa, Mannheimia succiniciproducens MBEL55E
MKIFKKTTALLAAALLATGLTACDNKDSGAASADNNAVSAIERIKKADKVRIGVFSDKPPFGYVDKDGKVQGFDVEIAKAVTKDLLGDENKAEFVLVEAANRAEYLLSNKVDITMANFTVTPERKEVVNFAKPYMKVALGVVSKQDAPITDVAQLADKTLLLNKGTTADAYFTKNFPKNKSLKFEQNTETFQALLDGRGDALSHDNTLLFAWAKENPGYVVAIKNLGDLDYIAPAVKKEDTDLLQWLDGEIEKLAKDGTLNKAYQKTLQPIYGDEIKEADVLVEYQ

SEQ ID NO: 29001 - protein, 816 aa, Mannheimia succiniciproducens MBEL55E
MRVLKFGGTSLANPERFLQAARLIEKAHLEEQAAAVLSAPAKITNHLVALSEKASLNQPTETNFNEALDIFYNIINGLHEKNNNFDLKGTSQLIESEFNQLAELLEQIRQAGKVEDAVKATIDCRGEKLSIAMMKAWFEACGYEVTVINPVEKLLAYGNYLESSVDIEESAKRVDVASIPKNNVVLMAGFTAGNEKGELVLLGRNGSDYSAACLAACLNASACEIWTDVDGVFTCDPRLVPDARLLPSLSYREAMELSYFGAKVIHPRTIGPLVRSNIPCLIKNTGNPTAPGSIIDGNEPQSGELQVKGITNLDNVAMFNVSGPGMQGMVGMAARVFSTMSKAGVSVILITQSSSEYSISFCVPSKLAAKAKDALNTEFAKELLDKDLEPVEVIEDLSIISVVGDGMKQAKGIAARFFSALSQANISIVAIAQGSSERSISAVVAQNKAIEAVKSTHQALFNNKKSVDMFLVGVGGVGGELIEQIKQQKEYLAKKDIEIRVCALANSNKMLLNENGLSLDNWKEDLSNATQPSDFDVLLSFIKLHHVVNPVFVDCTTAESVSGLYARALSEGFHVVTPNKKANTREMAYYNLVRENARKNQRKFLYDTNVGAGLPVIENLQNLLAAGDEVERFNGILSGSLSFIFGKLEEGLTLSQATALAREKGFTEPDPRDDLSGQDVARKLLILARESGLELELSDVEVESVLPKGFSEGKSAVEFMEILPQLDAEFAARVEKAGAQNKVLRYVGQINDGKCKVSIVEVDADDPLYKVKNGENALAFYTRYYQPIPLLLRGYGAGNAVTAAGIFADILRTLRN

SEQ ID NO: 29002 - protein, 404 aa, Mannheimia succiniciproducens MBEL55E
MKFPIYLDYAATCPADDRVAEKMMQYLTRDGIFGNPASRSHKFGWQAEEAVDIARNHIADLIGADSREIVFTSGATESDNLAIKGAAHFYQTKGKHIITCKTEHKAVLDTCRQLEREGFEVTYLAPKSDGLVDLDEFRAAIRPDTILASIMHVNNEIGVIQDIEAIGKICREHKVIFHVDATQSVGKLPINLAELPVDLMSMSGHKLYGPKGIGALYVRRKPRVRLEAIIHGGGHERGMRSGTLAVHQIVGMGEAYRICKEEMAEEMAHVTKLRDRLYNGLKDIEETYVNGSMEHRVGSNLNISFNFVEGESLMMALRDIAVSSGSACTSASLEPSYVLRALGLNDELAHSSIRFSLGRYTTEEEIDYTIDLVKSAVKKLRDLSPLWDMFKEGIDMSKIEWSAH

SEQ ID NO: 29003 - protein, 410 aa, Mannheimia succiniciproducens MBEL55E
MTNKVSLDKSKIKFLLLEGVHQNALDVLHAAGYTNIEYHKKALEPDELKEAIKEAHFIGLRSRTNLTADILEHANKLIAIGCFCIGTNQVALEAAEEKGIPVFNAPFSNTRSVAELVLGEILLLMRNIPAANAQVHRGEWNKSAAGSHEVRGKKLGIVGYGHIGSQLSIIAESLGMNVFFYDVETKLPLGNAQQVSTLEELLSSCDIISLHVPELPSTKNLMSAERIAQLKPGSILINAARGTVVDIDALAEALEQGKIHGAAIDVFPKEPASAAEAFESPLRKFDNVILTPHIGGSTAEAQENIGTEVASKFVKYSDNGSTLSAVNFPEVSLPEHRTAKRILHIHHNRPGILNKINQVFVDENINIAAQYLQTDAKIGYVVIDVETDDSTDLLQKLKSIEGTIRARVLF

SEQ ID NO: 29004 - protein, 477 aa, Mannheimia succiniciproducens MBEL55E
MNLGVIFPLVIYLAFIFGAAIYAYVKRQRGDFLTEYYVGNRSMTGFVLAMTTASTYASASSFVGGPGAAYKYGLGWVLLAMIQVPAVWLALGALGKKFAMLSRETNALTINDLLLYRYKNKYLVWIASIALLIAFFAAMTTQFIGGGRLLETTIGINYTQSLLIFALTVGLYTFIGGFRAVVLTDTIQGTVMILGTMILLGAVIYAAGGTEAAITKLTEVDPQLVSPYGPNNMLDFQFMTSFWVLVCFGVVGLPHTAVRCMAFKDSKALHSGMLIGTIILSIIMFGMHLSGALGRAIVPDLTIPDQVIPTLMIKVLPPIVAGIFLAAPMSAIMSTIDAQLIQSSAIFVKDIYLAAKPEKANNQKLISRFSSLITLTITVILVFLSLNPPDMIIWLNLFAFGGLEAAFLWVIVLGIYWNKANAYGAIASMVVGLGSYIYLTVAKLKLLDFHAIVPALVFGLIAFLIANKIGERKQIKA

SEQ ID NO: 29005 - protein, 404 aa, Mannheimia succiniciproducens MBEL55E
MELFPKSNKLEHVCYDIRGPVHKAALRLEEEGHKILKLNIGNPAPFGFEAPDEILIDVIRNLPTAQGYCDSKGLYSARKAIVQYYQSKGIHGATVNDVYIGNGASELITMAMQALLNDGDEVLVPMPDYPLWTAAVTLAGGKAVHYLCDEEQDWFPAIDDIKSKITSRTKAIVIINPNNPTGAVYSKELLLEIAEIARQNGLLIFSDEIYDKILYDGAVHHHIAGLAPDLLTITMNGLSKAYRICGFRQGWMILNGPKDKARGYIEGLDMIASMRLCANVPMQHAIQTALGGYQSINELIVPGGRLYEQRNRAYELLNQIPGVSCVKPMGALYMFPKIDIKKFNIYDDEKLVLDLLAQEKVLLVHGRGFNWHAPDHFRIVTLPYVHQIEEALNKFARFMENYHQ

SEQ ID NO: 29006 - protein, 365 aa, Mannheimia succiniciproducens MBEL55E
MTQQPTLFIDRDGTLIDEPKTDFQIDSLEKLKFERNVIPALLKLKNRYRFVMVSNQDGLGTDSFPQEDFDKPHNAMLAVFRSQGIEFDDILICPHKPEDNCDCRKPKIKLLKKYIDKKLFDPADSFVIGDRPTDVQLAENLGIRALQYHPENLDWDMIAEKLLREPVADPKGLGQPRHAVVARKTKETDIKVEVWLDEAGVNQINTGIGFFDHMLDQIATHGGFRMNVSCKGDLHIDDHHTIEDVALALGAALKEAIGNKRGIQRFGFVLPMDECKAECALDLSGRPYFKFKAKFNRDKVGDFSTEMTEHFFQSIAYTLLATLHLSVKGDNAHHQIEALFKAFGRTLRQAIKIEGNEMPSSKGVL

SEQ ID NO: 29007 - protein, 281 aa, Mannheimia succiniciproducens MBEL55E
MSHSGKTKHGLKHRSFLKWAGGKYRLTDNINNLFPKRRKCLVEPFVGAGSVFLNSQFERYILADINADLINLFNTVKTDVDAYIEALKPVFFHAEANSAGYYYARRDDFNNSTDPFFRSVLFLYLNRFGFNGLCRYNSLNEFNVPFGAYKSHYFPEKELRYFAEKAKSAVFICADFNETFKLADDESVIYCDPPYAPLLQDSNFTKYAGNDFSVTHQQALAELAKQTVNERNIPVLISNHDTAFTREIYHGAKFKRIKVQRTISQAAERRVKVNELIAVFK

SEQ ID NO: 29008 - protein, 522 aa, Burkholderia mallei ATCC 23344
MRDAVIDLLRRFGIRKVFGNPGSTELPMFRNFPDDFEYVLGLHEAVAVGMADGYAQASGNAAVVNLHSAAGVGNAMGVLFTAYRNKTPLVVTAGQQARSILPFEPFLASVQAAELPKPYVKWSIEPARAEDVPAAIARAYHVAMQEPRGPVFVSIPADDWDRPAEPMPARTVSSEVRPAPEALARLGDALDASERPAFVVGAAVARAGAWDDAVRLAERHRARVYAAPMSGRCSFPEDHPLFAGFLPPIRERIVEQLAGHDFILAFGAPVFTYHIEGFGPHVPAGAALHQLVDDPSVAAWTPVGDAVVGNLRLAARDLLARAAPRERPMPAPRAPRGRVGPGAPGERMPVAFALQTLADVRGSRDVVVEEAPSARPAMHEHLPFSSADTFYTMDSGGLGYGMPAALGIALGSPGRRVIALIGDGSSLYSIQALWSAVHLKLPVTFVILNNARYAALQDFAPVFGFRDGEPVQGTALPGLDFVSLARGFGCDGVRVSDAARLRDALEQALASPVPVVVDVDVA

SEQ ID NO: 29009 - protein, 342 aa, Burkholderia mallei ATCC 23344
MRARRPRGATETAMQKILVARPIFPDVIERLKQYFDVDWNDGDALAPDALKARLADKDGALTAGDMIDASVLAAAPRLRVVSNMAVGYNNFDIGAFDAAHVLGTNTPDVLTETTADFGWALMMAAARRITESEHWLRAGQWRKWSYDSFLGADIHGATLGVLGMGRIGQALARRARGFGMRVIYHNRSRVAPEIEAALNAEYVPKAALLAQADHVVLVLPYSAQSHHTIGAAELALMKPSATLTNIARGGIVDDAALADALREKRIAAAGLDVFEGEPSVHPALLDVPNVVLTPHIASASEGTRRAMANLAADNLIAALGAGPRAGRPPNPINPGVLGKARI

SEQ ID NO: 29010 - protein, 234 aa, Nicotiana tabacum
MSSNSSPLEIDTSFSHSNFFFLQDQSPILQWDDDLFFNDPWFDDDQSPIIPCNSEKDENHQVFEESSDNTIMSKGSSHGQELEEVTSQEEKEKEEEEKHYIGVRKRPWGKYAAEIRDSTRNGIRVWLGTFDTAEEAALAYDQAALSMRGPWSLLNFPLEKVKKSLEKIEYSCKDGLSPAAVLKATHKTRRVKHKRSSRKKKNKETHNVIVFEDLGAELLEELLMTSSQHSCRRD

SEQ ID NO: 29011 - protein, 249 aa, Arabidopsis lyrata subsp. petraea
MGRGRVELKRIENKINRQVTFAKRRNGLLKKAYELSVLCDAEVALIIFSNRGKLYEFCSSSNMLKTLDRYQKCSYGSIEVNNKPAKELENSYREYLKLKGRYENLQRQQRNLLGEDLGPLNSKELEQLERQLDGSLKQVRSIKTQYMLDQLSDLQNKEQMLLETNRALAMKLDDMIGVRSHHMGGGWEGGEQNVTYAHHQAQSQGLYQPLECNPTLQMGYDNPVCSEQITATTQAQAQQGNGYIPGWML

SEQ ID NO: 29012 - protein, 250 aa, Arabidopsis thaliana
MGRGRVELKRIENKINRQVTFAKRRNGLLKKAYELSVLCDAEVSLIVFSNRGKLYEFCSTSNMLKTLERYQKCSYGSIEVNNKPAKELENSYREYLKLKGRYENLQRQQRNLLGEDLGPLNSKELEQLERQLDGSLKQVRCIKTQYMLDQLSDLQGKEHILLDANRALSMKLEDMIGVRHHHIGGAWEGGDQQNIAYGHPQAHSQGLYQSLECDPTLQIGYSHPVCSEQMAVTVQGQSQQGNGYIPGWML

SEQ ID NO: 29013 - protein, 247 aa, Arabidopsis lyrata subsp. petraea
MGRGRVELKRIENKINRQVTFAKRRNGLLKKAYELSVLCDAEVSLIVFSNRGKLYEFCSTSNMLKTLERYQKCSYGSIEVNNKPAKELENSYREYLKLKGRYENLQRQQRNLLGEDLGPLNSKELEQLERQLDGSLKQVRCIKTQYMLDQLSDLQGKEHILLEANRALSMKLEDMIGVRHHHIGGAWEGGDQHNVAYGHPQAHSQGLYQSLECDPTLQIGYSHPVCSEQMAVTAQGQSQPGNGYIPG

SEQ ID NO: 29014 - protein, 379 aa, uncultured archaeon GZfos10C7
MLSKRLTRIEESATMKMGSIAKKLQAEGKSVLNFSLGEPDFKTPGHICEAAKRALDLGYTHYVSSAGVDELREAIAGKIREENEVDVSAENVIVTPGAKQAIYELMMSVLDDGDEVILLDPAWVTFESAVKLAGGNPKWVKRLEEEVNYESLESAVSENTKLIVINSPNNPAGYVLSEKEQKEIAEFAVDHDLLVLSDEIYEKIIYGRKHVSIASFDGMQARTVIINGFSKTYAMTGWRIGYAVAPAEILKGMLKIQQHSVSCAPSIAQSAALTALSSPQDCVNEMVEQFKRRRDVIVKRLNEIGLRCLNPEGAFYAFVNTSNHGNDVGFTERLLKEAYIVVTPGSAFGVAGKNYVRFSFAASIEDILEGMGRIEKLYG

SEQ ID NO: 29015 - protein, 644 aa, uncultured archaeon GZfos10C7
MEEDKPFFFPFPSIREGQREFMEDVKQAVEGGNILAAHAPTGIGKTVAVLVPALQYAIQNDKTVFFLTSKRSQHKIAIDTLRLIKERAKLNFVVVDIISKQSMCPRAKAGSIYREFYSLFSEFCRSEQKNRRCRYFVNRDEEAQQRIRDKIMHVEELYEWCSFRGVCPYKAALEVGESADVLVCDYNYLFSSDIAETVLEKIGKGLEDVIVIVDEAHNLPDRIRNNLSSELRMSTITEAAHGLRRTNREIYDNLMELETIFAKLAMAARKNKKEEMNVDRDFLVDGMEKVLRRKIVAMSYDDFVNSLRNIAERSGTSETDENTKYKDEALQRNVLNIADFLDEWRTNEKCLRIFSVSQHNENPSLHFKLLDPSIVSEPAFAGAHSTIMMSGTLCPAEMYAEILGASSDRIKGKEIVLREYKSPFPEENRLIVVTRGLTTKYTKRGEEMYSKIAGKIAEVAEYVQGGMAVFFPSYALQRDIAVYLPEEVRRKAIVERREMRKEEKNRLYELLREDSGGILLAVQGGSFSEGMDFESNMLKAIIVVGLPLSPPTLEVKTIEGYYAGKYGAEKGKLYGYYYPAITKVLQAAGRGIRSEHDRCIIVLMDYRFAKYPYKNCLPSDYNVKLTDRAEEFAKSFFKYRNAKL

SEQ ID NO: 29016 - protein, 727 aa, uncultured archaeon GZfos12E2
MRRLLIISNRLPVSVERRKNELRFSSSVGGLATGLNALHQRYESVWVGWPGIAINREETDYVESKLSEFNCYPVFLSQGEVEKYYYGFSNKTLWPLFHYFPQYAKYEHSEWSAYEHVNRKFCERVAEIAKPEDIIWIHDYHLMLLPGLIRERFPDATIGFFLHIPFPSADLFRLIPWRRRILEGVLGADLIGFHTYDYAHNFLCSVLRLLGYEHEFGKLAIGDRIVQVDVHPMGVEVQKFVRATSGRGIKREVARLRSRFKNCKIIFSMDRLDYTKGIPERLYAFEHFLETHPEWHEKVVFILKIAPSRTKVGQYRVLKQEIDELVGRINGKYGTPEWVPISYFYRSLPFQTIVAFYLAADVALLTSMRDGMNLIAKEFVASRVDGKGVLILSEMAGAARELGEALVVNPNNKEEVAEALNEALRMPEEEQKSRNEEMQKRLSHYDVFHWGSGFIRSVLETKRLQEELNMKKLSEKIREELKNAYKAADKCLLLLDYDGTLVPFADKPERAKPDKELLYLFRALSEPPENTVVIISGRDKETLERWFGDTGVCLVAEHGVRLKEEEGEWKEIELLKEDWKEKIIPILDLFVDRAPGSFIEEKSFSLVWHYRKVDPELGELRAKELTDQLIDLTACTELQVMKGNKVVEVKDGRVNKGIAASHWLTKGFGFILAVGDDLTDEDMFKVLPEGAYSVKIGFTPSKARFYLGSPKEVRALLDEMELVEVYK

SEQ ID NO: 29017 - protein, 218 aa, uncultured archaeon GZfos14B8
EAVLGSSLFSPFPFHSVYSVEDHKKHVDWIKEINPDAIVSVKVSTPTDVDMVAVGSYYAGANIIHLDGSYGGTGAAPDIAKKNIAMPIEYAIPKVHEFLKEQGMRDKMTLIASGGIRTAHDVAKAIALGADGVVIGTAELVALGCVRCGNCESGRGCPRGIATTDPELSRAVDTEWGAQRLINLYAAWRSEIVDILKRFGMRCIKELVGRYDCLYASV

SEQ ID NO: 29018 - protein, 614 aa, uncultured archaeon GZfos18F2
MAHARLSIIDLAGGDQPIHNEDRSIWIVFNGEIFNYPELRKELKSRGHRFYTRSDTEVLVHLYEDHGPEFIHELNGQFAIALWDVRKKQLLLARDRMGIRPLFYFEKAGRLVFASEIKGLLADDRVPRTLDLKALSDIFTCWSPFGALTPFESVRQLLPGHYAMFSSNGMQIRSYWQPVFSAPPSKERSLDDWTEELNGLLYDAARIRLRADVPVGAYLSGGLDSTYISSLVKRSFNNRLCTFSVGFTDERFDETSFQEKAVQSLETDHRIVRCSERDIGKVFPQVIWHTETPILRTAPAPLFMLSGLVRENNFKVVLTGEGADEVFAGYNIFKEDRVRRFWARQPDSKLRPLLLERLYPYIFSRKNSRTRVFLENFFRKSLIQVDSPCYSHLIRWNNTALLKAFFSDELQAMAGKPPDFEERFISTLPSDFMSWDPLSRSQYTEMTIFLANYLLSSQGDRMAMGHSVEGRFPFLDHRVVEFACSMPPEYRLNGLKEKYILKHASRDLIPPELRRRPKQPYRAPISRCFFGKGSPDYVGELLSENAIRRAGYFHPKKVGRLVDKCQKQEGHLASERENMAVAGILSTQLLDHLFLRNFPPHPIQEPENVRVFGL

SEQ ID NO: 29019 - protein, 467 aa, uncultured archaeon GZfos18H11
MRIVMKFGGTAIANGEKIKTAANLVMQSKEAVENMEIVVVTSAIYAVTDTIYEHANRIAEEGKVEKVKEFVGELRNKHNMVASVAIGDTQVLKKVKGEIKERIAEMEKALIGICLLGELTLRSLDYIGSFGERLAAPILAGAIQSVGIDAVHFTGGDIGIITNAEYGSAQLSGGVEQEVRARIMPLLRDKIPVVCGFTGETKDGKITTLGRGGSDYTATIIGAAIDADEIWLWKDTEGIMSADPKRIKNARKIPYMSYIEAMELSYFGAAVLHPRAIEPAMKKKIPIRVKNLLNPDDEGTLIGEEQEKTKKAAKAITLIENTSIVNIAGTGIGSISDVASRIFSVLAAKNVDIIMISHGSSERTVSLVIDSAQLERAIDAIHSIPAVDTVIRDISYNSNVCTVGVVGVGMAGTVGVAGKVFSALGNEGISVKMISQGSSEFNISFVVQKEEAYKAAQAIHDVFEMGS

SEQ ID NO: 29020 - protein, 388 aa, uncultured archaeon GZfos19A5
MKKVVLAYSGGLDTSVCIPLLKEHYGYDEVIAVTVNVGQPEEDIKEAKERGAKLSNSYREIDAKDEFVRDYIFPLIKANGNYEGYVLGTAIARPLIAKHVVEVAREEKADAVAHGCTGKGNDQLRFDAVFRTTDLDVVAPMRELSLTREEERKYAAEHGILLKPEHRWSVDENIWSRSIEGAELEQPSFVPPEEIFTWTVSADKAPEDAQTIKIDFEKGVPVSLNGTKMDGVSLLKKLNETGGKHGVGRTDMIEDRVLGFKSRENYEHPAATIILEAHRDLEQLVLTRNELRFKDFVDSAWSELVYQGLVMDPLYDSLNAFIDKTQERLNGTVYVRLEKGIARVVGRESPNALYSATVSFDVKQEQKGAEGFSMYHGFQSRMVKNAFQ

SEQ ID NO: 29021 - protein, 431 aa, uncultured archaeon GZfos1C11
  misc_feature (409)..(409): Xaa can be any naturally occurring amino acid
  misc_feature (428)..(428): Xaa can be any naturally occurring amino acid
  unsure (1)..(431): unsure at all Xaa locations
MSLLPLRFYAVTDTIYEHANRIAEEGKVEKVKEFVGELRNKHDMAASVAIGDTQVLKKVKGEIKERIAEMEKALIGICLLGELTLRSLDYIGSFGERLAAPILAGAIQSAGIDAVHFTGGDIGIITNAEYGSAQLMGGVEQEVRARIMPLLGDKIPVVCGFTGETKDGKITTLGRGGSDYTATIIGAAIDADEIWLWKDTEGIMSADPKRIKNARKIPYMSYIEAMELSYFGAAVLHPRAIEPAMKKKIPIRVKNLLNPDDEGTLIGEEQEKTKKAAKAITLIENTSIVNIAGTGIGSISDVASRIFSVLAAKNVDIIMISHGSSERTVSLVIDSAQLERAIDAIHSIPAVDTVIRDISYNSNVCTVGVVGVGMAGTVGVAGKVFSALGNEGISVKMISQGSSEFNISXVVQKEEAYKAAQAIHDVFXMGS

SEQ ID NO: 29022 - protein, 269 aa, uncultured archaeon GZfos26D6
MRSKFAGRIKNIEISGIRKAFEALSGDFFNLGLGEPDFDTPEHVKIAAMQALKSGFTSYTSNKGIDELREAISAKLYRDNNLAFSPDEMIVTSGASEALHIAIHSVVERGDEVLIPNPGFVSFAALTELAEGKPIGVPLSDDFSISAEAVKEKITDKTKALIINSPANPTGAVESEENIKALVDIAHDHHVTIISDEVYEQLIYDDLKHISPARFSDDVITVNAVSKTYAMTGFRLGYVAARSEYTEQMLKVHQYVQACASSISQKAAL

SEQ ID NO: 29023 - protein, 280 aa, uncultured archaeon GZfos26F9
MDDKLLPENAKPFLRWAGGKRRLVPFLVKHIPPDFSNNNRYYEPFLGAGSLFFRLKPFKAALSDNNQDLIECYRAIQKRPDLIAKYLRQHLLNNCENYYYNMRKRYNKSPLSIAKAALFIYLNRTCFNGIWRVNESGEFNVPYGRIEIPPLPSKEDLLNVSQTLTKATIIHSDYKQVVKHVSEGDFIYFDPPYPPLNGTSFFTHYTKERFNKKDHAELASLVNMLNKKGCYIMVSNADTPYIRGLYGDTFNIYELEVVRWIRTDGKRYKVQEIVITNYEV

SEQ ID NO: 29024 - protein, 388 aa, uncultured archaeon GZfos26F9
MKKVVLAYSGGLDTSVCIPLLKEHYGYDEVIAVTVDVGQPEDDIKEAKERGAKLCDSYREIDAKEEFVRDYIFPLIKANGSYEGYVLGTAIARPLIAKHVVEVAREEKADAVAHGCTGKGNDQLRFDAVFRTTDLDVVAPMRELSLTRVEERKYAAEHGILLKPEHRWSVDENIWSRSIEGAELEEPSFVPPEEIFQWTVSADKAPEDAETIKIEFKEGVPVSLNGTKMDGVSLLKKLNGTGGKHGVGRTDMIEDRVLGFKSRENYEHPAATIILVAHRDLEQLVLTRNELRFKDFVDSAWSELVYQGLIMDPLYDSLNAFIDKTQERLNGSVYVRLEKGVARVVGRESPNSLYSATVSFDVKQEQKGAEGFSMYHGFQSRMVKNAFQ

SEQ ID NO: 29025 - protein, 572 aa, uncultured archaeon GZfos26G2
MAKEKLSGAEIVVEELKAEGAEVAFGIPGGVLLDLYDTLYKDDALRHILMRHEQCAAHAADGYARVSGKTGVCIATSGPGATNLVTGLANANMDSAPVVALTGQVVTSAIGTNAFQEASTFTITMPVTKHNFLVKRTKDLPTVIHNAFYVANTGRKGVVLIDLPKDVLAGKATVNLHPKETFAGYKPNIKPNQVQTKKAAEVLANAERPLILAGGGIISADATEELRQLVELLGTGVVTTLMGKGAISEYHPFCLGMAGMHGHLCANMAINECDALLALGTRFSDRLTGWLLDQFAPDATVIHVDIDAAEINKNMPVDIPIVGDVKLALSDMIKWLEKKKKLGDKSVWLQRIKEMHSACEECIHDVHRAGTSISDSVIKEISLILDGDAIVTTEVGQCQMFAAHYYMTREPRTFISSGGLGTMGFGFPAAIGAKVAAPDKKVVDIAGDGSFLMTCQDLATCVENDIPVVVCILDNRYLGMVRQWQELFYDKKYAHTGLGLTPDFVKLAEAFGCYGERVEKPEDLKDAFNNAFESGKPSVIDVIVGKDDKILPMIPPGGGVIGMIGTERCKHV

SEQ ID NO: 29026 - protein, 642 aa, uncultured archaeon GZfos27A8
MANEEYKWFLRDEVVDAGLCTFCGACAAVCPNDRIEFREDGPALKEECPRNGQGACKDVCQRVVTFASKIGPNIFGFKAKPPALLGQYETLVAARATDPAVLEAGQDGGAVTALLSYCMDNGLIDGVIATGDAGKPSSRVVRSKEELLDSAGSKYSAIPVLSAIKDAGDITNAAVVGLPCHVYGVRKTQFFPGMMSHGFEVGENGEKIKVPNIAYVIGLFCTENFNYDKLAKFMQEKGVDLSEVRRAAIHLDELVVTTDSGEHGFDLNDLWHAGCVQDGCVICRDAVSKLSDISAGFMGSGKGWTTLMGRTQKGVELIKAAEEAGYIETNPDIDLHRIEEFAGLKMQRFKWELARRLSEGMKVKFYWASDYPGVMGETKGTFFVKIKTNAGLIGADQLAKSAELAKKYGDGTLEMTSRQCVEMQGVPGTNVDTLMSEIYASGLATIGMGYVSSCVGMDYCTEGLVETKKLSGELTMAFAQRLTPHKVKIGIAGCANDCVRAKRNDVGLIGQVRPEIDNEKCNGCGRCAELCRVDAISIVLGKAVIDKDKCVTCGWCIRGCPSEAAIEKERGYAMWIGANDARRPADGILLKSFCTTEEIPKLIDAVAKTLVKHKTKPGRERLGNVMKNVGEGRFIKEVLDQV

SEQ ID NO: 29027 - protein, 389 aa, uncultured archaeon GZfos27E6
MINVEKVKSIKILIALAVVLATLCVLSAMPLQTCEAREIKELHIGYQPSTHQIAHMTAMEKGWWESDLNRFGIEKVTDSVFPSGPPEMISMMAGELDVAYVGTAPPIPAIDKGLDAKIVAAVQTNGSAIVLSPELAANYTSPEDLKGLKIATFPKGSIQDTILRKWLMDNGLDPVKDVDIKGMGPGEAITEIEAGVVDAVFLPAPSPTIIEMDGAGKTVVYSGQMWPNHACCCLLVSGELIREHPELVEQIVRTHINATEYNKEHVEEAGEIYTRKVVGSDVEMVKESLKRWDGAWICNPHLEINSTVEYAKVDYEMEYTDKLLTKDDLFDTSFYDKIVEIAPTPTPEVTPTPTPTPTPSPTPPTPGFTAVFAIAALLAVTYLVLRRRF

SEQ ID NO: 29028 - protein, 411 aa, uncultured archaeon GZfos27E7
MINVEKTKSAEILIALTVVISLMCVLSAMPVQARDITELHIGYQPSTHQIAHMTAMENGWWAEDLKRFGIEKVTDSVFSSGPPEMIAMMAGELDVAYVGTAPPITAIDKGLDAKIVAAVQTNGSAIVLSPELAASYTSPEDLKGLKIATFPKGSIQDTILRKWLMDNGLDPVEDIEIIGMGPGEAITEIGAEVLDGVFLPAPSPTIIELDGTGEIVVYSGEMWPNHACCCLLVSDELIEEHPELVEQIVRTHINATEYNMVHVEEAAEIYVKKVVGADIEMVKESLKSWDGAWIFNPHLEINSTLEYAKVDYEMGYTDKLLTADDLFDTSFYDKIMAGPTPTPEATPTLTPPAPPVSSPAITPSPTPVQPPPTTPAPTPAPTPTPPTSGFTAVFAIAVVFAVAYIILRRRA

SEQ ID NO: 29029 - protein, 367 aa, uncultured archaeon GZfos32E7
MEETVAKIRKFALQNAVRYEKPPKVDAVLKKILGENPELRKDAKHVYALVKEEIKRIESMSKDARIAELAKLAPELVAEPKEKEKEKQEVRLPDLQLTEGEEVVMRFAPNPNGPATLGSVRGIIVNSEYAKRYKGKFILRFDDTDPVVKRPLLDAYDWYLEDCAWLDAEPDEVVVASDRIDIYYKYAEELLKKNAAYVCFCTSDAFKIYKEREEPCPHRAVSVMANMANWEKMLTGAYEEKEAVLRIKTDMASADPALKDWVAFRILKKDHPRVGSRYVVWPTLDFESAIEDHLLGITHIIRGKDLMKSGQRQQFLYDYLGWRYPRTILWGRIKMQEFGKFSTSELRKQIESGEYDGWDDPQLPTLK

SEQ ID NO: 29030 - protein, 727 aa, uncultured archaeon GZfos33E1
MRRLLIISNRLPVSVERRKNEFRFSSSVGGLATGLNALHQRYESVWVGWPGIAINREENDYVESKLSEFNCYPVFLSQGEVEKYYYGFSNKTLWPLFHYFPQYAKYEYAEWSAYEHVNRKFCERVAEIAKPEDVIWIHDYHLMLLPGLIRGRFPDATIGFFLHIPFPSADLFRLIPWRRRILEGVLGADFIGFHTYDYAHNFLSSVLCLLGYEHELGKFAIGDRIVQVDVHPMGIEVQKFVSATSGRGIKREVARLRSRFKNCKIIFSMDRLDYTKGIPERLYAFEHFLETHPEWHEKVVFILKIAPSRTKVGQYRVLKQEIDELVGRINGKYGTPEWVPISYFYRSLPFQTIVAFYLAADVALLTSMRDGMNLIAKEFVASRVDGKGVLILSEMAGAARELGEALVVNPNNKEEVAEALNEALRMPEEEQKSRNEEMQKRLSHYDVFHWGSGFIRSVLETKRLQEELNMKKLNEKIREELKNSYKAADKRLLLLDYDGTLVPFADKPERAKPDKELLYIFRALSEPPENTVVIISGRDKETLERWFGDTGVCLVAEHGVRLREEEGEWEEIELLKEDWKEKIISILDLFVDRAPGSFIEEKSFSLVWHYRNVDPELGELRAKELTDQLIGLTACTELQVMKGNKVVEVKDGRVNKGIAASHWLTKGFGFILAVGDDLTDEDMFKVLPEGAYSVKIGFTPSKARFYLGSPKEVRALLDEMEMVEVYK

SEQ ID NO: 29031 - protein, 727 aa, uncultured archaeon GZfos34A6
MRRLLIISNRLPVSVERRKNEFRFSSSVGGLATGLNALHQRYESVWVGWPGIAINREETDYVESKLSEFNCYPVFLSQGEVEKYYYGFSNKTLWPLFHYFPQYAKYEHSEWSAYEHVNRKFCERVAEIAKPEDVIWIHDYHLMLLPGLIRERFPDATIGFFLHIPFPSADLFRLIPWRRRILEGVLGADLIGFHTYDYAHNFLCSVLRLLGYEHELGKFAIGDRIVQVDVHPMGIEVQKFVSATSGRGIKREVARLRSRFKNCKIIFSMDRLDYTKGIPERLFAFELFLETHPEWHEKVVFILKIAPSRTKGGQYRVLKQEIDELVGRINGKYGTPEWAPISYFYRSLPFQTIVAFYLAADVALLTSMRDGMNLIAKEFVASRVDGKGVLILSEMAGAARELGEALVVNPNNKEEVVEALNEALRMPEEEQKSRNEEMQKRLCHYDVFHWGSGFIRSVLETKRLQEELNMKKLSEKIREELKNAYKAADKCLLLLDYDGTLVPFADKPERAKPDKELLYLFRALSEPPENTVVIISGRDKETLERWFGGTEVCLVAEHGVWLREEEGEWEAIELLKEDWKEKIIPILDLFVDRAPGSFIEEKSFSLVWHYRKVDPELGELRAKELTDQLIDLAACTELQVMKGNKVVEVKDGRVNKGIAASHWLTKGFGFILAVGDDLTDEDMFKVLPGDAYSVKIGFTPSKARFYLGSPKEVRALLDEMEMVEVYK

SEQ ID NO: 29032 - protein, 727 aa, uncultured archaeon GZfos34H9
MRRLLIISNRLPVSVERRKNEFRFSSSVGGLATGLNALHQKYKSVWVGWPGIAINREETDYVESKLSEFNCYPVFLSQGEVEKYYYGFSNKTLWPLFHYFPQYAKYEHSEWSAYEHVNRKFCERVAEIAKPEDIIWIHDYHLMLLPGLIRERFPDATIGFFLHIPFPSADLFRLIPWRRRILEGVLGADLIGFHIYDYAHNFLCSVLRLLGYEHEFGKFAIGDRIVQVDVHPMGIEVQKFVRATSGRGIKREVARLRSRFKNCKIIFSMDRLDYTKGIPERLYAFEHFLETHPEWHEKVVFILKIAPSRTKVGQYRVLKQEIDELVGRINGKYGTPEWVPISYFYRSLPFQTIIAFYLAADVALLTSMRDGMNLIAKEFVASRVDGKGVLILSEMAGAARELGEALVVNSNNKEEVAEALNEALRMPDEEQKSRNEEMQKRLSHYDVFHWGSGFIRSVLETKRLQEELNMKKLSEKIREELKNSYKAADKRLLLLDYDGTLVPFADKPERAKPDRELLDLFRALSEPPENTVVIISGRDKETLERWFGDTGVCLVAEHGVWLREEEGEWKEIELLKEDWKEKIIPILDLFVDRAPGSFIEEKRFSLVWHYRKVDPELGELRAKELTDQLIDLTACTELQVMKGNKVVEVKDGRVNKGIAASHWLTKGFGFILAVGDDLTDEDMFKVLPEDAYSVKIGFTPSEARFYLGSPKEVRALLDEMEMVEVYK

SEQ ID NO: 29033 - protein, 383 aa, uncultured archaeon GZfos35B7
MTVIADRVSQIEGSGIRKFFDIAQRMEGVISLGVGEPDFVTPWTIREACIFSLEKGYTSYTSNWGLLELREAISDKIYEESGVFYDPEGGILITTGVSEAFDLALRAIINPGDEVILHEPCYVSYKPCTVFAGGTPVCVATGVEDKFELRAEEVAEKITDKTKAIILSYPNNPTGAALSKKDLEEIADVATEHDLIVISDEIYDKLTYEGEHTCFSSLNGMEERTILLNGFSKAYAMTGWRIGYAAGNKAIIEAMMKIHQYIMLCAPITAQMAAIEALRCDDETDRMVSEYNRRRRLMVAGLRELGLSCFEPKGAFYTFPSIEDTGLTSEEFAERLLKEEKVVVIPGSVFGDCGEGYIRCSYAVSQYELKEALERMGRFLDTL

SEQ ID NO: 29034 - protein, 317 aa, uncultured archaeon GZfos35B7
MKLNRLNIKTGIDTVTLILAFLLPLILGIKQYLLTVLILMLVFTMYSSAWNLLATSGQGSLGHAAFFGIGGYVSAIISNSFGLPVILTIVIGGFFAAVIGVLIGLTCVRLKAWFLAMVTFGFAIIAQTITVELSGLTGGWDGIPAKKLVPVTIINHVMYEYYIILLIAVVVIVIIYLIMKSKMGLALEAIRENELEAKVMGINVTVYKLKAFAASAFFTGIAGALEIHHFGYVTPEVYGIDISFWPIIYSVSGGLYTIGGPILGTVVITAIWEVLRSFGMTYGRFILIGLILILIVIFLPKGLISIPEKIKSKFLKN

SEQ ID NO: 29035 - protein, 727 aa, uncultured archaeon GZfos37D1
MRRLLIISNRLPVSVERRKNEFRFSSSVGGLATGLNALHQRYESVWVGWPGIAINREETDYVESKLSEFNCYPVFLSQGEVEKYYYGFSNKTLWPLFHYFPQYAKYEHSEWSTYEHVNRKFCERVAEIAKPEDVIWIHDYHLMLLPGLIRERFPDATIGFFLHIPFPSADLFRLIPWRRRILEGVLGADLIGFHTYDYAHNFLSSVLRLLGYEHELGKFAIGDRIVQVDVHPMGIEVQKFVRATSRRGIKREVARLRSRFKNCKIIFSMDRLDYTKGIPERLYAFEHFLETHPEWHEKVVFILKIAPSRTKVGQYRVLKQEIDELVGRINGKYGTPEWVPISYFYRSLPFQTIVAFYLAADVALLTSMRDGMNLIAKEFVASRVDGKGVLILSEMAGAARELGEALVVNPNNKEEVAEALNEALRMPEEEQKSRNEEMQKRLRHYDVFHWGSGFIRRVLETKRLQEELNMKKLSEKIREELKNAYKAADKCLLLLDYDGTLVPFADKPERAKPDKELLDIFRALSKSPENTVVIISGRDKETLERWFGDTGVCLVAEHGVRLKEEEGEWKEIELLKEDWKEKIIHILDLFVDRAPGSFIEEKSFSLVWHYRKVDPELGELRAKELTDQLIDLTACTELQVMKGNKVVEVKDGRLNKGIAASHWLTKGFGFILAVGDDLTDEDMFKVLPEGAYSVKIGFTPSKARFYLGSPKEVRALLDEMELVEVYK

SEQ ID NO: 29036 - protein, 576 aa, uncultured archaeon GZfos3D4
MEETGTRTKIRKYALQNAVKYEKPPKEDAVVKKVLAEHPELRKNAKQVLMSVKEEIKRIESMSKEERVEELNKIAPELVAELKLKEKEKREPGLPELPLAEGEKVVMRFAPNPNGAATLGSTRGIIVNSEYVKMHGGKFILRFDDTDPVLKRPLLEAYDWYLEDCAWLDAEPDEVVVASERMDLYYKYAEELLKKGVAYVCFCPAETFKQYKDHKRPCPHRAADIEENMGCWKKMLNGVYEEKEAVLRIKTDMASADPALRDWVALRILKRAHPRVGDKYVVWPTLDFESAIEDHLLGITHIIRGKDLMKSEKRQRFLYDHLGWRYPRTMVWGRIKMQEFGKLSTSELRKRIENGEYEGWDDPQLPTLKALRRRGFQPEAIRRFFISIGVTQTDIAVSMKNMYAENRKAVDALASRYFFVRNPKEMRINRSLKKKALPKEGNYFVAKALKHPSKEDYREIRTSNTVYISGDDFVKMKKGHEIRLKYLCTVKIESIKPLVANVIEEPTEDIPIVQWAPSEGIKVIVKKPDGTDEGIGEPLIASELDNVVQFERYGFVRIDSVVEKEEGKEVVAYFTH

SEQ ID NO: 29037 - protein, 388 aa, uncultured archaeon GZfos9D1
MKKVVLAYSGGLDTSVCIPLLKEHYGYDNVIAVTVDVGQPEDDIKEAKERGAKLCDSYREIDAKEEFVRDYIFPLIKANGNYEGYVLGTAIARPLIAKHVVEVAREENADAVAHGCTGKGNDQLRFDAVFRTTDLDVVAPMRELSLTRAEERKYAAEHGILLKPEHRWSVDENIWSRSIEGAELEDPSFSPPEEIFQWTVSADKAPENAETIKIDFEKGVPVSLNGTKMEGVSLLKKLNETGGKHGVGRTDMIEDRVLGFKSRENYEHPAATIILVAHRDLEQLVLTRNELRFKDFVDSAWSELVYQGLIMDPLYDSLNAFIDKTQERLNGSVYVKLEKGIARVVGRESPNALYSATVSFDVKQEQKGAEGFSMYHGFQSRMVKNAFQ

SEQ ID NO: 29038 - protein, 532 aa, Oryza sativa Japonica Group
MATCAADLAPLLGPVAANATDYLCNRFADTTSAVDATYLLFSAYLVFAMQLGFAMLCAGSVRAKNTMNIMLTNVLDAAAGALFYYLFGFAFAFGTPSNGFIGKQFFGLKHMPQTGFDYDFFLFQWAFAIAAAGITSGSIAERTQFVAYLIYSAFLTGFVYPVVSHWIWSADGWASASRTSGPLLFGSGVIDFAGSGVVHMVGGVAGLWGALIEGPRIGRFDHAGRSVALKGHSASLVVLGTFLLWFGWYGFNPGSSTTILKTYGPAGGINGQWSGVGRTAVTTTLAGSVAALTTLFGKRLQTGHWNVVDVCNGLLGGFAAITAGCSVVDPWAAIICGFVSAWVLIGLNALAARLKFDDPLEAAQLHGGCGAWGILFTALFARQKYVEEIYGAGRPYGLFMGGGGKLLAAHVIQILVIFGWVSCTMGPLFYGLKKLGLLRISAEDETSGMDLTRHGGFAYVYHDEDEHDKSGVGGFMLRSAQTRVEPAAAGCLQQQQPSVTNPERTTSQRRKKSRVSLPLRSRSSRHKFDPHI

SEQ ID NO: 29039 - protein, 394 aa, Ammophila arenaria
EPASTEDPAVSIAGAVQSQKLAVRAISRLQALPGGDVNLLCDTVVEHVRELTGYDRVMVYKFHDDEHGEVLAESRRADLEPYLGLHYPATDIPQASRFLFRQNRVRMIADCHAAPVRVIQDPAMPQPLCLVGSTLRSPHGCHAQYMANMGSIASLVMAVIISSGGEDEHSMGRGAVPSAMKLWGLVVCHHTSPRCIPFPLRYACEFLMQAFGLQLNMELQLAHQLSEKHILRTQTLLCDMLLRDSPTGIVTQSPSIMDLVKCDGAALYYHGKYYPLGITPTEAQIKDIIEWLTVCHGETTGLSTDSLADAGYPGATALGDAVCGVAVAYITPSDYLFWFRSHTAKEIKWGGAKHHPEDKDDGQRMHPRSSFKAFLEVVKSRSLPWENAEMDAIH

SEQ ID NO: 29040 - protein, 394 aa, Anisopogon avenaceus
EPARTEDPALSIAGAVQSQKLAVRAISRLQALPGGDVKLLCDTVVEHVRELTGYDRVMVYKFHDDEHGEVLAESRRADLEPYLGLHYPATDIPRASRFLFRQNRVRMIADCHAAPVRVIQDPAMPQPLCLVGSTLRSPHGCHAQYMTNMGSIASLVMAVIISSGGDQDHNIARGAIPSAMKLWGLVVCHHTAPRCIPFPLRYACEFLMQAFGLQLNMELQLAQHLSQNLILTTQTLLCDMLLRDSPTGIVPQSRSIMDLVKCDGAALYYHGKYYPLGVTPTEAQILDIIEWLTVCHGDSTGLSTDSLADAGYPGAASLGDAVCGMAVAYITPSDHLFWFQSHTAKEIKWGGAKHHPEDKDDGQRMHPRSSFKAFLEVVKSRSLPWENAEMDAIH

SEQ ID NO: 29041 - protein, 394 aa, Anomochloa marantoidea
EPARTEDPALSIAGAVQSQKLAVRAISRLQALPGGDVKLLCDTVVEHVRELTGYDRVMVYKFHDDEHGEVVAESRRADLEPYLGLHYPATDIPQASRFLFRQNRVRMIADCHAAPVRVIQNPSLTQPLCLVGSTLRAPHECHAQYMANMGSIASLAMAVIISSSGDDENNVGRCGISSTMKLWGLVVCHHTSPRCIPFPLRYACEFLMQAFGLQLNMELQLAHQLSEKHILRTQTLLCDMLLRDSPTGIATQSPSIMDLVKCDGAALYYHGKYYPLGVTPTESQIKDIIEWLGMCHGDSTGLSTDSLADAGYPGAASLGDAVSGMAVAYITPNDYLFWFRSHTAKEIKWGGAKHHPDDKDDGQRMHPRSSFKAFLEVVKSRSLPWENAEMDAIH

SEQ ID NO: 29042 - protein, 393 aa, Arundinella hirta
EPARTEDPALSIAGAVQSQKLAVRAISRLQALPGGDVKLLCDTVVEHVRELTGYDRVMVYRFHEDEHGEVVAENRRDNLEPYLGLHYPATDIPQASRFLFRQNRVRMIADCHATPVRVIQDPGLSQQLCLVGSTLRAPHGCHAQYMANMGSIASLVMAVIISSGGDDEQTGRGGISSAMKLWGLVVCHHTSPRCIPFPLRYACEFLMQAFGLQLNMELQLAHQLSEKHILRTQTLLCDMLLRDSPTGIVTQSPSIMDLVKCDGAALYYHGKYYPLGVTPTESQIKDIIEWLTVCHGDSTGLSTDSLADAGYLGAVALGDAVCGMTVAYITPSDYLFWFRSHTAKEIKWGGAKHHPEDKDDGQRMHPRSSFKAFLEVVKSRSLPWENAEMDAIH

SEQ ID NO: 29043 - protein, 394 aa, Brachypodium pinnatum
EPARTEDPALSIAGAVQSQKLAVRAISRLQALPGGDVKLLCDTVVEHVRELTGYDRVMVYKFHDDEHGEVLAESRRTDLEPYLGLHYPATDIPQASRFLFRQNRVRMIADCHAAPVRVIQDPAMPQPLCLVGSTLRSPHGCHAQYMANMGSIASLVMAVIISSGGEDEHNMGRGAIPSAMKLWGLVVCHHTSPRCIPFPLRYACEFLMQAFGLQLNMELQLAYQLSEKHILRTQTLLCDMLLRDSPTGIVTQSPSIMDLVKCDGAALYYHGKYYPLGVTPTEVQIKDIIEWLTVSHGDSTGLSTDSLADAGYSGATALGDAVCGMAVAYITPSDYLFWFRSHTAKEIKWGGAKHHPEDKDDGQRMHPRSSFKAFLEVVKSRSLPWENAEMDAIH

SEQ ID NO: 29044 - protein, 394 aa, Buergersiochloa bambusoides
EPARTEDPALSIAGAVQSQKLAVRAISRLQALPGGDVKLLCDTVVEHVRELTGYDRVMVYRFHDDEHGEVVAESRRADLEPYLGLHYPATDIPQASRFLFRQNRVRMIADCHAAPVRVIQDSALPQPLCLVGSTLRGPHGCHAQYMANMGSIASLVMAVIISSGGDDEHNSAQGGIPSAMKLWGLVVCHHTSPRCIPFPLRYACEFLMQAFGLQLNMELQLAHQLSEKHILRTQTLLCDMLLRDSPTGIVTQSPSIMDLVKCDGAALYYHGKYYLLDVTPTEAQIKDIIEWLTLCHGDSTGLSTDSLADAGYPGAAALGDAVCGMAVAYITPSDYLFWFRSHTAKEIKWGGAKHHPEDKDDGQRMHPRSSFKAFLEVVKSRSLPWENAEMDAIH

SEQ ID NO: 29045 - protein, 393 aa, Capillipedium parviflorum
EPARTEDPALSIAGAVQSQKLAVRAISRLQALPGGDVKLLCDTVVEHVRELTGYDRVMVYRFHEGEHGEVVAESRRDNLEPYLGLHYPATDIPQASRFLFRQNRVRMIADCHATPVRVIQDPGLSQPLCLVGSTLRAPHGCHAQYMANMGSIASLVMAVIISSGGDDEQTGRGGISSAMKLWGLVVCHHTSPRCIPFPLRYACEFLMQAFGLQLNMELQLAHQLSEKHILRTQTLLCDMLLRDSPTGIVTQSPSIMDLVKCDGAALYYHGKYYPLGVTPTESQIKDIIEWLTVCHGDSTGLSTDSLADAGYLGAAALGDAVCGMAVAYITPSDYLFWFRSHTAKEIKWGGAKHHPEDKDDGQRMHPRSSFKAFLEVVKSRSLPWENAEMDAIH

SEQ ID NO: 29046 - protein, 386 aa, Chasmanthium latifolium
PALSIAGAVQSQKLAVRAISRLQALPGGDVKLLCDTVVEHVRELTGYDRVMVYRFHEEEHGEVVAESRRDGLEPYLGLHYPATDIPQASRFLFRQNRVRMIADCHATAVRVIQDPGLSQPLCLVGSTLRAPHGCHAQYMANMGSIASLVMAVIISSGGDDEQTSRGGMSSAMKLWGLVVCHHTSPRFIPFPLRYACEFLMQAFGLQLNMELQLAHQLSEKHILRTQTLLCDMLLRDSPTGIVTQSPSIMDLVKCEGAALYYHGKYYPLGVTPTESQIKDIIEWLMLCHRDSTGLSTDSLADAGYVSAAALGDAVCGMAVAYITPSDYLFWFRSHTAKEIKWGGAKHHPEDKDDGQRMHPRSSFKASLEVVKSRSLPWENAEMDAIH

SEQ ID NO: 29047 - protein, 393 aa, Chusquea oxylepis
EPARTEDPALPIAGAVQSQKLAVRAISRLQALPGGDVKLLCDTVVEHVRELTGYDRVMVYRFHDDEHGEVVAESRRADLEPYLGLHYPATDIPQAPRFLFKQNRVRMIADCHAASVRVIQGPALPQPLCLVGSTLRAPHGCHAQYMANMGSIASLVMAVIISSGGDDEHNMTRGGIPSAMKLWGLVVRHHTSARCIPFPLRYACEFLMQAFGLQLNMELQLAHQLSEKHILRTQTLLCDMLLRDSPAGIITQSPSIMDLVKCDGAALYYHGKYYPLGVTPTEAQIKDIIEWLTLCHGDSTGLSTDSLADAGYPGAALGDAVCGMAVAYITPSDYLFWFRSHTAKEIKWGGAKHHPEDKDDGQRMHPRSSFKAFLEVAKSRSLPWENAEMDAIH

SEQ ID NO: 29048 - protein, 393 aa, Danthoniopsis dinteri
EPASTEDPALSIAGAVQSQKLAVRAISRLQALPGGDVKLLCDTVVEHVRELTGYDRVMVYRFHEDEHGEVVAESRRDDLEPYIGLHYPATDIPQASRFLFRQNRVRMIADCHATPVKVIQDTGLSQPLCLVGSTLRAPHGCHAQYMANMGSIASLVMAVIISSGGDDEQTARGGISSAMKLLGLVVCHHTSPRFIPFPLRYACEFLMQAFGLQLNMELQLAHQLSEKHILRTQTLLCDMLLRDSPTGIVTQSPSIMDLVKCDGAALYYHGKYYPLGVTPTESQIKDIIEWLTLCHGDSTGLSTDSLADAGYLGAAALGDAVCGMAVAYITPSDYLFWFRSHTAKEIKWGGAKHHPEDKDDGQRMHPRSSFKAFLEVVKSRSLPWENAEMDAIH

SEQ ID NO: 29049 - protein, 394 aa, Diarrhena obovata
EPARTEDPALSIAGAVQSQKLAVRAISRLQALPGGDVKLLCDTVVEHVRELTGYDRVMVYKFHDDEHGEVLAESRRADLEPYLGLHYPATDIPQASRFLFWQNRVRVIADCHAAPVRVIQDPAMPQPLCLVGSTLRSPHGCHAQYMANMGSIASLVMAVIISSGGEDEHNMARGAIPSAMKLWGLVVCHHTSPRCIPFPLRYACEFLMQAFGLQLNMELQLAHQLSEKHILRTQTLLCDMLLRDSPAGIVMQSPSIMDLVKCDGAALYYHGKYYPLGVTPTEAQIKDIIEWLTVCHGDSTGLSTDSLADAGYSGATALGDEVCGMAVAYITPSDYLFWFRSHTAKEIKWGGAKHHPEDKDDGQRMHPRSSFKAFLEVVKSRSLPWENAEMDAIH

SEQ ID NO: 29050 - protein, 394 aa, Ehrharta erecta
EPARTEDPALSIAGAVQSQKLAVRAISRLQALPGGDVKLLCDTVVEHVRELTGYDRVMVYRFHEDEHGEVVAESRRNDLEPYLGLHYPATDIPQASRFLFRQNRVRMIADCHAAPVRVIQDPGLPQQLCLVGSTLRSPHGCHAQYMANMGSIASLVMAVIISSAGDDENNMARGGIPSAMKLWGLVVCHHTSPRCIPFPLRYACEFLMQAFGLQLNMELQLAHQLSEKHILRTQTLLCDMLLRDSPTGIVTQSPSIMDLVKCDGAALYYHGKYYPLGVTPTESQIKDIIEWLTVCHGDSTGLSTDSLADAGYPGSAALGDAVSGMAVAYITPSDYLFWFRSHTAKEIKWGGAKHHPEDKDDGQRMHPRSSFKAFLEVVKSRSLPWENAEMDAIH

SEQ ID NO: 29051 - protein, 394 aa, Elymus sp. Kellogg s.n.
EPARTEDPALSIAGAVQSQKLAVRAISRLQALPGGDVKLLCDTVVEHVRELTGYDRVMVYKFHDDEHGEVLSESRRGDLEPYLGLHYPATDIPQASRFLFLQNRVRMIADCHAAAVRVIQDPAMPQPLCLVGSTLRSPHGCHAQYMANMGSIASLVMAVIISSGGEDEHNMTRGVIPSAMKLWGLVVCHHTSPRCIPFPLRYACEFLMQAFGLQLNMELQLAHQLSEKHILRTQTLLCDMLLRDSPTGIVTQTPSIMDLVKCDGAALFYHGKYYPLGVTPTESQIKDIIEWLTVCHGDSTGLSTDSLADAGYPGATALGDAVCGMAVAYITPSDYLFWFRSHTAKEIKWGGAKHHPEDKDDGQRMHPRSSFKAFLEVVKSRSLPWENAEMDAIT

SEQ ID NO: 29052 - protein, 394 aa, Eremitis sp. Clark and Zhang 1343
EPARTEDPALSIAGSVQSQKLAVRAISRLQALPGGDVKLLCDTVVENIRELTGYDRVMGYRFHDDEHGEVVAESRRADLEPYLGLHYPATDIPQASRFLFRQNRVRMIADCHTAPVRVIQDPVLPQPLCLVGSTLRAPHGCHAQYMANMGSIASLVMAVIISSGGDDSHNSSRGGIPSAMKLWGLVVCHHTSPRCIPFPLRYACEFLMQAFGLQLNMELQLAHQLSEKHILRTQTLLCDMLLRDSPTGIVTQSPSIMDLVKCDGAALYYHGKYYPLGVTPTEAQIKDIIEWLTLCHGDSTGLSTDSLADAGYPGAAALGDAVCGMAVAYITPSDYLFWFRSHTAKEIKWGGAKHHPEDKDDGQRMHPRSSFKAFLEVVKSRSLPWESAEMDAIH

SEQ ID NO: 29053 - protein, 394 aa, Glyceria grandis
EPARTEDPALSIAGAVQSQKLAVRAISRLQALPGGDVKLLCETVVEHVRELTGYDRVMVYKFHDDEHGEVLAESRRPDLEPYLGLHYPATDIPQASRFLFRQNRVRMIADCHAAPVRVIQDPAMPQPLCLVGSTLRSPHGCHAQYMANMGSIASLVMAVIISSGGDDEHHMARGNIPSAMKLWGLVVCHHTSPRCIPFPLRYACEFLMQAFGLQLNMELQLAHQLSEKHILRTQTLLCDMLLRDSPTGIVTQSPSIMDLVKCDGAALYYHGKYYPLGVTPTEAQIKDIIEWLTACHGDSTGLSTDSLADAGYSGATVLGDAVCGMAVACITPSDYLFWFRSHTAKEIKWGGAKHHPEDKDDGQRMHPRSSFKAFLEVVKSRSLPWENAEMDAIH

SEQ ID NO: 29054 - protein, 393 aa, Hakonechloa macra
EPARTEDPALSIAGAVQSQKLAVRAISRLQALPGGDVKLLCDTVVEHVRELTGYDRVMVYRFHEDEHGEVVAESRRADLETYLGLHYPATDIPQASRFLFRQNRVRMIADCHATPVRVIQDPGLPQPLCLVGSTLRAPHGCHAQYMANMGSIASLVMAVIISSGGDDEQTARGGISSTMKLWGLVVCHHTSPRFIPFPLRYACEFLMQAFGLQLNMELQLAHQLSEKHILRTQTLLCDMLLRESPTGIVTQSPSIMDLVKCDGAALYYHGKYYPLCVTPTESQIKDIIEWLTVCHGDSTGLSTDSLADAGYLGAAALGDAVCGMAVAYITPSDYLFWFRSHTAKEIKWGGAKHHPEDKDDGQRMHPRSSFKAFLEVVKSRSLPWENAEMDAIH

SEQ ID NO: 29055 - protein, 392 aa, Lithachne pauciflora
EPARTEDPALSIAGAVHSQKLAVRAISRLQALPGGDVKLLCDTVVEHVRELTGYDRVMVYRFHEDEHGEVVAESRRADLEPYLGLHYPATDIPQASRFLFRQNRVRMIADCHAAPVRVIQDPALQQPLCLVGSTLRAPHGCHAQYMANMGSIASLVMAVIISSGGDDEHNITRGGIPSAMKLWGLVVCHHTSPRCIPFPLRYACEFLMQAFGLQLSMELQLAHQLSEKHILRTQTLLCDMLLRDSPTGIVTQSPSIMDLVKCDGAALYYHGKYYPLGVTPTEAQIKDIIEWLTLCHGDSTGLSTDNFADAGYPGAAALGDAVCGMAVAYITPSDYLFWFRSHTAKEIKWGGAKHHPEDKDDGQRMHPRSSFKAFLEVVKSRSLPWENAEMDA

SEQ ID NO: 29056 - protein, 392 aa, Lolium perenne
TGYDRVMVYKFHDDEHGEVLAESRRADLEPYLGLHYPATDIPQASRFLFRQNRVRMIADCHAAPVRVIQDPAMPQPLCLVGSTLRSPHGCHAQYMANMGSIASLVMAVIISSGGEDEHNMGRGAVPSAMKLWGLVVCHHTSPRCIPFPLRYACEFLMQAFGLQLNMELQLAHQMSEKHILRTQTLLCDMLLRDSPTGIVTQSPSTMDLVKCDGAALYYHGKYYPLGITPTEAQIKDIIKWLTVCHGDSTGLSTDSLADAGYPGATELGDAVCGMAVAYITPSDYLFWFRSHTAKEIKWGGAKHHPEDKDDGQRMHPRSSFKAFLEVVKSRSLPWENAEMDAIHSLQLILRDSFRDAGEGTSNSKAIVNGHVQLGELELRGIDELSSVAREMV

SEQ ID NO: 29057 - protein, 394 aa, Lygeum spartum
EPARTEDPALSIAGAVQSQKLAVRAISRLQALPGGDVKLLCDTVVEHVRELTGYDRVMVYKFHDDEHGEVLAESRRTDLEPYLGLHYPATDIPQASRFLFRQNRVRMIADCHAAPVKVFQDPAMPQPLCLVGSTLRSPHGCHAQYMANMGSIASLVMAVIISSGGDDEHNMSRGVIPSAMKLWGLVVCHHTSPRCIPFPLRYACEFFMQAFGLQLNMELQLAHQLSEKHILRTQTILCDMLLRDSPTGIVTQSPSIMDLVKCDGAALYYHGKYYPLGVTPTESQIKDIIDWLTVCHGDSTGLSTDSLADAGYPGAAALGDAVCGMAVAYITPSDYLFWFRSHTAKEIKWGGAKHHPEDKDDGQRMHPRSSFKAFLEVVRSRSLPWENAEMDAIH

SEQ ID NO: 29058 - protein, 394 aa, Melica cupanii
EPARTEDPALSIAGAVQSQKLAVRAISRLQALPGGDVKLLCDTVVEHVRELTGYDRVMVYKFHDDEHGEVLAESRRADLEPYLGLHYPATDIPQASRFLFRQNRVRMIADCGAAPVTVIQDPAMPQPLCLVGSTLRSPHGCHAQYMANMGSIASLVMAVIISSGGDDDHNMVRGSIPSAMKLWGLVVCHHTSPRCIPFPLRYACEFLMQAFGLELNMELQLAHQMSEKHILRTQTLLCDMLLRDSPTGIVTQSPSIMDLVKCDGAALFYHGKYYPLGVTPTEAQIKDIIEWLTVCHGDSTGLSTDSLADAGYSGATALGDAVCGMAVAYITPSDYLFWFRSHTAKEIKWGGAKHHPEDKDDGQRMHPRPSFKAFLEVVKSRSIPWENAEMDAIH

SEQ ID NO: 29059 - protein, 393 aa, Miscanthus sinensis
EPARTEDPALSMAGAVQSQKLAVRAISCLQALPGGDVKLLCDTVVEHVRELTGYDRVMVYRFHEDEHGEVVAESRRDNLEPYLGLHYPATDIPQASRFLFRQNRVRMIADCHATPVRVIQDPGLSQPLCLVGSTLRASHGCHAQYMANMGSIASLVMAVIISSGGDDEQTGRGGISSAMKLWGLVVCHHTSPRCIPLPLRYACEFLMQAFGLQLNMELQLAHQVSEKHILRTQTLLCDMLLRDSPTGIVTQSPSIMDLVKCDGAALYYHGKYYPLGVTPTESQIKDIIEWLTVCHGDSTGLSTDSLADAGYLGAAALWDAVCGMAVAYITPSDYLFWFRSHTAKEIKWGGAKHHPKDKDDGQRMHPRSSFKAFLEVVKSRSLPWENAEMDAIH

SEQ ID NO: 29060 - protein, 388 aa, Molinia caerulea
EDPALSIAGAVQSQKLAVRAISRLQALPGGDVKLLCDTVVENVRELTGYDRVMVYRFHEDEHGEVVAESRRADLEPYLGLHYPATDIPQASRFLFRQNRVRMIADCHATPVRVIQDPGLSQPLCLVGSTLRAPHGCHAQYMANMGSIASLVMAVIIIIGGDDEQTARGSISSAMKLWGLVVCHHTSPRFIHFPLRYACEFLMQAFGLQLNMELQLAHQLSEKHILRTQTLLCDMLLRDSPSGIVMQSPSIMDLVKCDGAALYYHGKYYPLGVTPTESQIMDIIEWLTMCHGGSTGLSTDSLADAGYLGAAALGDAVCGMAVAYITSSDYLFWFRSHTAKEIKWGGAKHHPEDKDDGQRMHPRSSFKAFLEVIKSRSLPWENAEMDAIH

SEQ ID NO: 29061 - protein, 387 aa, Nardus stricta
PALSIAGAVQSQKLAVRAISRLQALPGGDVKLLCDTVVEHVRELTGYDRVIVYKFHDDEHGEVLAESRRTDLEPYLGLHYPATDIPQASRFLFRQNFVRMIADCHAAPVRVIQDPAMPQPLCLVGSTLRSPHGCHAQYMANMGSIASLVMAVIISSGGDDEHNMARGVVPSAMKLWGLVVCHHTSPRCIPFPLRYACEFLMQAFGLQPNMELQLAHQMSEKHILRTQTLLCDMLLRDSPTGIVTQSPSIMDLVKCDGAALYYHGKYYPLGVTPTESQIKDIIEWLTVCHGDSTGLSTDSLADAGYPGAAALGDAVCGMAVAYITQSDYLFRFRSHTAKEIKWGGAKHHPEDKDDGQRMHPRSSFKAFLAVVKSRSLPWENAEMDAIH

SEQ ID NO: 29062 - protein, 394 aa, Nassella viridula
EPARTEIPALSIAGAVQSQKLAVRAISRLQALPGGDVKLLCDTVVEHVRELTGYDRVMVYKFHDDEHGEVLAESRRADLEPYLGLHYPATDIPQASRFLFRQNRVRMIADCHAAPVRVIQDPAMQQPLCLVGSTLRSPHGCHAQYMANMGSIASLVMAVIISSGGDDEHNMGRGTIPSAMKLWGLVVCHHTSPRCIPFPLRYACEFLMQAFGLQLNMELQLAHQLSEKHILRTQTLLCDMLLRDSPTGIVMQSPSIMDLVKCDGAALYYHGKYYPLGVTPIEAQIKDIIEWLTVCHGDSTGLSTDSLADAGYSGATALGDAVCGMAVAYITPSDYLFWFRSHTAKEIKWGGAKHHPEDKDDGQRMHPRSSFKAFLEVVKSRSLPWENAEMDAIH

SEQ ID NO: 29063 - protein, 394 aa, Olyra latifolia
EPARTEDPALSIAGAVQSQKLAVRAISRLQALPGGDVKLLCDTVVEHVRELTGYDRVMVYRFHEDEHGEVVAESRRADLEPYLGLHYPATDIPQASRFLFRQNRVRMIADCHAAPVKVIQDSALQQPLCLVGSMLRAPHGCHAQYMANMGSIASLVMAVIISSGGDDEHNITRGGIPSAMKLWGLVVCHHTSPRCIPFPLRYACEFLMQAFGLRLNMELQLAHQLSEKHILRTQTLLCDMLLRDSPTGIVTQSPSIMDLVKCDGDALYYHGKYYPLGVTPTEVQIKDIIEWLTVCHGDSTGLSTDSLADAGYPGAAALGDAVCGMAVAYITPSDYMFWFRSHTAKEIKWGGAKHHPEDKDDGQRMHPRSSFKAFLEVVKSRSLPWENAEMDAIH

SEQ ID NO: 29064 - protein, 393 aa, Panicum capillare
EPARTEAPALSIAGAVQSQKLAVRAISRLQALPGGDVKLLCDTVVEHVRELTGYDRVMVYRFHEDEHGEVVAECRRDNLEPYLGLHYPATDIPQASRFLFRQNRVRMIADCHATPVRVIQDPGLSQPLCLVGSTLRAPHGCHAQYMANMGSIASLVMAVIISSGGDDEQTARGGISSAMKLWGLVVCHHTSPRFIPFSLRYACEFLMQAFGLQLNMELQLAHQLSEKHILRTQSLLCDMLVRDSPTGIVTQSRSIMDLVKCDGAALYYHGKYYPLGVTPTESQIKDIIEWLTVCHGDSTGLSTDSLADAGYHGAAALGDAVCGMAVAYITPSDYLFWFRSHTAKEIKWGGAKHHPEDKDDGQRMHPRSSFKAFLEVVKSRSLPWENAEMDAIH

SEQ ID NO: 29065 - protein, 394 aa, Pariana radiciflora
EPARTEDPAISIAGSVQSQKLAVRAISRLQALPGGDVKLLCDTVVEDIRELTGYDRVMVYRFHEDEHGEVVAESRRADLEPYLGLHYPATDIPQASRFLFRQNRVRMIADCHTAPVRVIQDPALPQPLCLVGSTLRAPHGCHAQYMANMGSIASLVMAVIISSGGDDSHNSSRGGIPSAMKLWGLVVCHHTSPRCIPFPLRYACEFLMQAFGLQLNMELQLAHQLSEKHILRTQTLLCDMLLRDSPTGIVTQSPSIMDLVKCDGAALYYHGKYYPLGVTPTEAQIKDIIEWLTLCHGDSTGLSTDSLADAGYPGAAALGDAVCGMAVAYITPSDYLFWFRSHTGKEIKWGGAKHHPEDKDDGQRMHPRSSFKAFLEVVKSRSLPWENAEMDAIH

SEQ ID NO: 29066 - protein, 353 aa, Pennisetum alopecuroides
TGYDRVMVYRFHEDQHGEVVAECRRDNLEPYLGLHYPATDIPQASRFLFRQNRVRMIADCHATPVRVIQYPGLSQPLCLVGSTLRAPHECHAQYMANMGSIASLVMAVIISSGGDDEQTTRGGISSAMKLWGLVVCHHTSPRFIPFPLRYACEFLMQAFGLQLNMELQLAHQLSEKHILRTQTLLCDMLLRDSPTGIVTQSPSIMDLVKCDGAALYYHGKYYPLGVTPTESQIKDIIEWLTVCHGDSTGLSTDSLADAGYHGAAALGDAVCGMAVAYITPSDCLFWFRSHTAKEIKWGGAKHHPEDKDDGQRMHPRSSFKAFLEVVKSRSLPWENAEMDAIHSLQLILRDSFR

SEQ ID NO: 29067 - protein, 395 aa, Peridictyon sanctum
EPARTEDPALSIAGAVQSQKLAVRAISRLQALPGGDVKLLCDTVVEHVRELTGYDRVMVYKFHDDEHGEVLAESRRVDLEPYLGLHYPATDIPQASRFLFRQNRVRMIADCHAAPVRVIQDPAMPQPLCLVGSTLRSPHGCHAQYMANMGSIASLVMAVIISSGGEDEHNMTRGVIPSAMKLWGLVVCHHTSPRCIPFPLRYACEFLMQAFGLQLSMELQLAHQLSEKHILRTQTLLCDMLLRDSPTGIVTQSPSIMDLVKCDGAALFYHGKYYPLGVVTPTEAQIKDIIEWLTVCHGDSTGLSTDSLADAGYPGATALGDAVCGMAVAYITPSDYLFWFRSHTAKEIKWGGAKHHPEDKDDGQRMHPRSSFKAFLEVVKSRSLPWENAEMDAIE

SEQ ID NO: 29068 - protein, 394 aa, Phalaris arundinacea
EPASTEDPALSIAGAVHSQKLAVRAISRLQALPGGDVKLLCGTVVEHVRELTSYDRVMVYKFHDDEHGEVLAESRRADLEPYLGLHYPATDIPQASRFLFRQNRVRMIADCHAAPVRVIQDPAMPQPLCLVGSTLRSPHGCHAQYMANMGSIASLVMAVIISSGGEDEHSMGRGAVPSAMKLWGLVVCHHTSPRCIPFPLRYACEFLMQAFGLQLNMELQLAHQLSEKHILRTQTLLCDMLLRDSPTGIVTQSPSIMDLVKCDGAALYYHGKCYPLGITPTEAQIKDIIEWLTVCHGETTGLSTDSLADAGYPGATALGDAVCGMTVAYITPSDYLFWFRSHTAKEIKWGGAKHHPEDRDDGQRMHPRSSFKAFLEVVKSRSLPWENAEMDAIH

SEQ ID NO: 29069 - protein, 394 aa, Pharus lappulaceus
EPARTEDPALSIAGAVQSQKLAVRAISRLQALPGGDVKLLCDTAVEHVRELTGYDRVMVYRFHDDKHGEVVAESRRDDLEPYLGLHYPETDIPQASRFLFRQNRVRMIADCHAAPVRVIQDPALPQPLCLVGSTLRAPHGCHAQYMANMGSIASLVMAVIISSGGDDEHNVARGAISSAMKLWGLVVCHHTSPRCIPFPLRYACEFLMQAFGLQLNMELQLAHQLSEKHILRTQTLLCDMLLRDSPTGIVTQSPSIMDLVKCDGAALYYHGKYYPLGVTPTEAQIKDIIEWLTLCHGDSTGLSTDSLADAGYPGAAALGDAVCGMAVAYITPSDYLFWFRSHTAKEIKWGGAKHHPEDKDDGQRMHPRSSFKAFLEVVKSRSLPWENAEMDAIH

SEQ ID NO: 29070 - protein, 388 aa, Phragmites australis
EDPALSIAGAVQSQKLAVRAISRLQALPGGDVKLLCDTVVEHVRELTGYDRVMVYRFHEDEHGEVVAESRRADLETYLGLHYPATDIPQASRFLFRQNRVRMIADCHATPVRVIQDPGLPQPLCLVGSTLRAPHGCHAQYMANMGSIASLVMAVIISSGGDDEQTARGSISSTMKLWGLVVCHHTSPRFIPFPLRYACEFLMQAFGLQLNMELQLAHQLSEKHILRTQTLLCDMLLRDSPTGIVTQSPSIIDLLKCDGAALYYHGKYYPLGVTPTEFQIKDIIEWWTVCHGDSTGLSTDSVADAGYLGASALGDAVCGMAVAYITSSDYLFWFRSHTAKEIKWGGAKHHPEDKDDGQRMHPRSSFKAFLEVVKSRSLPWENAEMDAIH

SEQ ID NO: 29071 - protein, 394 aa, Arundinaria japonica
EPARTEDPALSIAGAVQSQKLAVRAISRLQALPGGDVKLLCDTVVEHVRELTGYDRVMVYRFHDDEHGEVVAESRRADLEPYLGLHYPATDIPQASRFLFGQNRVRMIADCRAAPVGVIQDPVLPQPLCLVGSTLRAPHGCHAQYMANMGSIASLVMAVIISSGGDDENNITRGGIPSAMKLWGLVVCHHTSPRCIPFPLRYACEFLMQAFGLQLNMELQLAHQLSEKHILRTQTLLCDMLLRDSPTGMVTQSPSIMDLVKCDGAALYYHGKYFLLDVTPTEAQIKDIIEWLTMCHGDSTGLSTDSLADAGYPGAAALGDAVYGMAVAYITPTDYLFWFRSHTAKEIKWGGAKHHPDDKDDGQRMHPRSSFKAFLEVVKSRSLPWENAEMDAIH

SEQ ID NO: 29072 - protein, 397 aa, Puelia ciliata
TGYDRVMVYRFHDDEHGEVVAESRHADLEPYLGLHYPATDIPQASRFLFRQNRVRMIADCHAAPVRVIQDPALPQPLCLVGSTLRAPHGCHAQYMANMGSIASLVMAVIITSGGDDEHNMARGGISSAMKLWGLVVCHHTSPRCIPFPLRYACEFLMQAFGLQLNMELQLAHQLSEKHILRTQTLLCDMLLRDSPTGIVTQSPSIMDLVKCDGAALYYHGKYYPLGVTPTEAQIKDIIEWLTLCHGDSTGLSTDSLADAGYHGAAALGDAVCGMAVAYITPSDYLFWFRSHTAREIKWGGAKHRPEDKDDGQRMHPRSSFKAFLEVVKSRSLPWEHAEMDAIHSLQLILRDSFRDAAEGTSNSKAIVNGQVQLGELELRGIDELSSVAREMVRLIET

SEQ ID NO: 29073 - protein, 393 aa, Sesleria insularis
EPARTEDPALSIAGAVQSQKLAVRAISRLQALPGGDVKLLCDTVVEHVRELTGYDRVMVYKFHDDEHGEVLAESRRADLEPYLGLHYPATDIPQASRFLFRQNRVRMIADCHAAPVRVIQDPAMPQPLCLVGSTLRSPHGCHAQYMANMGSIASLVMAVIISSGGEDNMSRGGAVPSAMKLWGLVVCHHTSPRCIPFPLRYACEFLMQAFGLQLNMELQLAHQLSEKHILRTQTLLCDMLLRDSPTGIVTQSPSIMDLVKCDGAALYYHGKYYPLGITPTGAQIKDIIEWLKVCHGDSTGLSTDSLADAGYPGATALGDAVCGMAVAYITPSDYLFWFRSHTAKEIKWGGAKHHPEDKDDGQRMHPRSSFKAFLEVVKSRSLPWENAEMDAIH

SEQ ID NO: 29074 - protein, 382 aa, Sorghum halepense
EPARTEDPALSIAGAVQSQKLAVRAISRLQALPGGDIKLLCDTVVEHVRELTGYDRVMVYRFHEDEHGEVVAESRRDNLEPYLGLHYPATDIPQASRFLFRQNRVRMIADCHATPVRVIQDPGMSQPLCLVGSTLRAPHGCHAQYMANMGSIASLVMAVIISSGGDDEQTGRGGISSAMKLWGLVVCHHTSPRCIPFPLRYACEFLMQAFGLQLNMELQLAHQLSEKHILRTQTLLCDMLLRDSPTGIVTQSPSIMDLVKCDGAALYYHGKYYPLGVTPTESQIKDIIEWLTVCHGDSTGLSTDSLADAGYLGAAALGDAVCGMAVAYITPSDYLFWFRSHTAKEIKWGGAKHHPEDKDDGQRMHPRSSFKAFLEVVKSRSL

SEQ ID NO: 29075 - protein, 393 aa, Sporobolus giganteus
EPARTEDPALSVAGAVQSQKLAVRAISRLQALPGGDVKLLCDTVVEHVRELTGYDRVMVYRFHEDEHGEVVAESRRDDLEPYLGLHYPATDIPQASRFLFRQNRVRMIADCHATPVRVIQDPGLSQPLCLVGSTLRAPHGCHAQYMANMGSIASLVMAMIIIVVVMTKQTSRSGISSAMKLWGLVVCHHTSPRFIPFPLRYACEFLMQAFGLQLNMELQLAHQLSEKHILRTQTLLCDLLLRDSPTGIVTQSPSIMDLVKCDGAALYYHGKYYPLGVTPTESQIKDIIEWLTVCHGDSTGLSTDSLADAGYHGAAALGDAVCGMAVAYITPSDYLFWFRSHTAKEIKWGGAKPHPEDKDDGQRMHPRSSFKAFLEVVKSRSLPWENAEMDAIH

SEQ ID NO: 29076 - protein, 394 aa, Streptochaeta angustifolia
EPASTEDPALSIAGAVQSQKLAVRAISRLQALPGGDVKLLCDTVVEHVRELSGYDRVMVYRFHDDEHGEVVAENRRADLEPYLGLHYPAMDIPQASRFLFRQNRVRMIADCHAAPVRVIQDPSLKQPLCLVGSTLRAPHECHAQYMANMGSIASLVMAVIISSGGDDENSVGRSGISSATKLWGLVVCHHTSPRCIPFPLRYACEFLMQAFGLQLNMELQLAHQLSEKHILRTQTLLCDMLLRDSPTGIVMQSPSIMDLVKCDGAALYYHRKYYPLGITPTEAQIKDIIDWLAMCHGDSTGLSTDSLADAGYPGAAALGDAVCGMAVAYITPNDYLFWFRSHTAKEIKWGGAKHHPEDKDDGQRMHPRSSFKAFLEVVKSRSLPWENAEMDAIH

SEQ ID NO: 29077 - protein, 397 aa, Streptogyna americana
TGYDRVMVYRFHDDEHGEVVAESRRADLEPYLGLHYPATDIPQASRFLFRQNRVRMIADCHAAPVKVIQDPALPQPLCLVGSTLRAPHGCHAQYMANMGSIASLVMAVIISSGGDDEHNMMRGGIPSAMKLWGLVVCHHTSPRCIPFPLRYACEFLMQAFGLQLNMELQLAHQLSEKHILRTQTLLCDMLLRDSPTGIVTQSPSIMDLVKCDGAALYYHGKYYPLGVTPTEAQIKDIIEWLTLCHGDSTGLSTDSLADAGYPSAAALGDAVCGMAVAYITPSDYLFWFRSHTAKEIKWGGAKHHPEDKDDGQRMHPRSSFKAFLEVVKSRSLPWENAEMDAIHSLQLILRDSFRDAAEGTSNSKAIVNGQVQLGELELRGIDELSSVAREMVRLIET

SEQ ID NO: 29078 - protein, 396 aa, Thysanolaena maxima
  misc_feature (393)..(393): Xaa can be any naturally occurring amino acid
  unsure (1)..(396): unsure at all Xaa locations
TGYDRVMVYRFHEDEHGEVVAESRRDGLEPYLGLHYPATDIPQASRFLFRQNRVRMIVDCHATAVRVIQDPGLSQPLCLVGSTLRAPHGCHAQYMANMGSIASLVMAVIISSGGDDEQTMRGGISSAMKLWGLVVCHHTSPRFIPFPLRYACEFLMQAFGLQLNMELQLAHQLSEKHILRTQTLLCDMLLRDSPTGIVTQSPSIMDLVKCDGAALYYHGRYYPLGVTPTEFQIKDIIEWLTACHGDSTGLSTDSLADAGYHGAAALGDAVCGMAVAYITPSDYLFWFRSHTAKEIKWGGAKHHPEDKDDGQRMNPRSSFKAFLEVVKSRSLPWENAEMDAIHSLQLILRDSFRDSAEGTSNSKAIVNGQVQLGELELRGINELSSVAREMVRXIET

SEQ ID NO: 29079 - protein, 394 aa, Triticum aestivum
EPARTEDPALSIAGAVQSQKLAVRAISRLQALPGGDVKLLCDTVVEHVRELTGYDRVMVYKFHDDEHGEVLAESRRGDLEPYLGLHYPATDIPQASRFLFRQNRVRMIADCHAAAVRVIQDPAMPQPLCLVGSTLRSPHGCHAQYMANMGSIASLVMAVIISSGGEDEHNMTRGVIPSAMKLWGLVVCHHTSPRCIPFPLRYACEFLMQAFGLQLNMELQLAHQLSEKHILRTQTLLCDMLLRDSPTGIVTQSPSIMDLVKCDGAALFYHGKYYPLGVTPTEAQIKDIIEWLTVCHGDSTGLSTDSLADAGYPGATALGDAVCGMAVAYITPSDYLFWFRSHTAKEIKWGGAKHHPEDKDDGQRMHPRSSFKAFLEVVKSRSLPWENAEMDAIH

SEQ ID NO: 29080 - protein, 393 aa, Zea mays
  misc_feature (219)..(219): Xaa can be any naturally occurring amino acid
  unsure (1)..(393): unsure at all Xaa locations
EPASTEDPALSIAGAVQSQKLAVRAISRLQALPGGDVKLLCDTVVEHVRELTGYDRVMVYRFHEDEHGEVVAESRRDNLEPYLGLHYPATDIPQASRFLFRQNRVRMIADCHATPVRVIQDPGLSQPLCLVGSTLRAPHGCHAQYMANMGSIASLVMAVIISSGGDDEQTGRGGISSAMKLWGLVVCHHTSPRCIPFPLRYACEFLMQAFGLQLNMELXLAHQLSEKHILRTQTLLCDMLLRDSPTGIVTQSPSIMDLVKCDGAALYYHGKYYPLGVTPTESQIKDIIEWLTVFHGDSTGLSTDSLADAGYLGAAALGEAVCGMAVAYITPSDYLFWFRSHTAKEIKWGGAKHHPEDKDDGQRMHPRSSFKAFLEVVKSRSLPWENAEMDAIH

SEQ ID NO: 29081 - protein, 394 aa, Zizania aquatica
EPARTEDPALSIAGAVQSQKLAVRAISRLQALPGGDVKLLCETVVEHVRELTGYDRVMVYRFHEDEHGEVVAESRRNDLEPYLGLHYPSTDIPQASRFLFRQNRVRMIADCHSAPVRVIQDPALPQPLCLVGSTLRAPHGCHAQYMANMGSIASLVMAVIISSAGDDEHNMARGGIPSAMKLWGLVVCHHTSPRCIPFPLRYACEFLMQAFGLQLNMELQLAHQLSEKHILRTQTLLCDMLLRDSPTGIVTQSPSIMDLVKCDGAALFYHGKYCRLGVTPTEAQIKDIIEWLTVCHGDSTGLSTDSLADAGYPGAATLGDAVSGMAVAYITPSDYLFWFRSHTAKEIKWGGAKHHPEDKDDGQRMHPRSSFQAFLEVVKSKSLPWENAEMDAIH

SEQ ID NO: 29082 - protein, 156 aa, Prunus dulcis
MDVRIAGLDSPLFSTLQHIMDFTDEPDKSFNAPTRTYVRDAKAMASTPADVKEYPNSYVFVVDMPGLKSGDIKVQVEDDNVLLITGERKREEEKEGAKYVRMERRVGKFMRKFVLPENANVEAISAVCQDGVLTVTVEKLPPPEPKKSKTIEVKIA

SEQ ID NO: 29083 - protein, 399 aa, Legionella pneumophila subsp. pneumophila str. Philadelphia 1
MFNPGNGVFFYRLRQNPNLFAKKYFQFSQLAYLSAFIENIFCLKLGILRKSYFSLRLGMKFVDEALIKVEAGKGGNGCLSFRREKFIPRGGPDGGDGGDGGSIYFEASSDLNTLIDFRYTRQYKAENGQSGMGGNCTGKKGDDLTIKVPVGTMVYDADTGELLADISQPGIPVLIAQGGFHGLGNTRYKSSVNRSPRQTTPGSPGESRNLRLELRVLADVGLLGLPNAGKSTLIRAVSSSKAKVADYPFTTLHPGLGVVRVSPYKSFVMADIPGLIEGAAQGAGLGHRFLKHLSRTCVLLHVIDIAPLDGSDPVADAKAILNELTQYNPDLLNKPRWLVLNKIDMLPDEKEREEKIQSIIKGLEWKDKVFSISAIESKGTQELCYALMQLIDEMKESEA

SEQ ID NO: 29084 - protein, 138 aa, Bacillus anthracis
NLTLAGVDIYDPATYEEMDAMVASFVERRKGKATEEDARKILKDENYFGTMLVYMGKAHGLVSGAAHSTADTVRPALQIIKTKPGVTKTSGVFIMVREEEKYVFADCAINIAPNSQDLAEIGIESAKTAELFGIDPRV

SEQ ID NO: 29085 - protein, 138 aa, Bacillus mycoides
NLTLAGVDIYDPATYEEMDAMVASFVERRKGKATEEDARKILKDENYFGTMLVYMGKAQGLVSGAAHSTADTVRPALQIIKTKPGVTKTSGVFIMVREEEKYVFADCAINIAPNSQDLAEIGIESAKTAELFGIDPRV

SEQ ID NO: 29086 - protein, 138 aa, Bacillus pseudomycoides
NLTLAGVDIYDPATYEEMDAMVASFVERRKGKATEEDARKILKDENYFGTMLVYMGKAHGLVSGAAHSTADTVRPALQIIKTKPGVTKTSGVFIMVREDEKYVFADCAINIAPNSQDLAEIGIESAKTAELFGIDPRV

SEQ ID NO: 29087 - protein, 421 aa, Thermotoga maritima
MGSDKIHHHHHHMKEKVVLAYSGGLDTSVILKWLCEKGFDVIAYVANVGQKDDFVAIKEKALKTGASKVYVEDLRREFVTDYIFTALLGNAMYEGRYLLGTAIARPLIAKRQVEIAEKEGAQYVAHGATGKGNDQVRFELTYAALNPNLKVISPWKDPEFLAKFKGRTDLINYAMEKGIPIKVSKKRPYSEDENLMHISHEAGKLEDPAHIPDEDVFTWTVSPKDAPDEETLLEIHFENGIPVKVVNLKDGTEKTDPLELFEYLNEVGAKNGVGRLDMVENRFIGIKSRGVYETPGATILWIAHRDLEGITMDKEVMHLRDMLAPKFAELIYNGFWFSPEMEFLLAAFRKAQENVTGKVTVSIYKGNVMPVARYSPYSLYNPELSSMDVEGGFDATDSKGFINIHALRLKVHQLVKKGYQR

SEQ ID NO: 29088 - protein, 146 aa, Thermoplasma volcanium
MKTLFIDRDGTINKDCPYCHNPSDLFIYPDAVDLLQRYQDDGFRIIIVTNQSGIGRGYFTESQFKEFSDFMNDKLKENGIVISAIYYCPHKPEDSCNCRKPETGLFSEVLEDYKVDIPSSIVVGDRNEIDGEFARRIKLPFRLLRH

SEQ ID NO: 29089 - protein, 179 aa, Aneurinibacillus thermoaerophilus
MKNKALFLDRDGVINVEKNYVHKIEDFEFMDGIFETLRYFQEKGYLLIIITNQAGIGRGYYTEEQFHILNDWMLSEFEKEGIYITKVYYCPYHPEHGIGKYKRDSFDRKPNPGMILKSQKEFNIDLSKSILVGDKESDIQAGKRAGVNVNIIFSNNKNGDELDCCKKINSLSELVSLIL

SEQ ID NO: 29090 - protein, 718 aa, Cryptococcus neoformans var. grubii
MLTRQARLLRRIPPPNAVLQSGLQRRHRSTDRYSNNIHTSSTQNAPAPVYDTPIREKGMTLEAKERVRAHVRKIQSSASTAAASPAVRPQPAQHFQAAPQPMPTNMPRFESDSQVKNGLDYSFIGLSGGQIFQEMMLRHDVKQVFGYPGGAILPVFDAIYNSPHFEFVLPRHEQGAGHMAEGYARVSGKPGVVLVTSGPGATNVITPMQDALSDGVPMVVFCGQVATNLIGSDAFQEADVVGISRSCTKWNVMVKDIAELPRRINEAFKIATTGRPGPVLVDLPKDVTAAILRTPIPAKSVQPGHSPYLPSNPLNPSSQPSDPLPGDADLITEAAQMINKAKRPIIFAGNGVLSSPEGPKLLKELSDKGRIPVTTTLQGLGAFDERDEKSLHMIGMHGSAYANFAMQEADVLIALGVRFDDRVTGKVDTFAPAAKAAAAEGRGGIIHFEIQPKNINKIVEAQIPVLGDVVASLGELVPQIEAVDRSAWIGRCKATKERYPFTYTPSQEGQKLKPQEVVQELDRQAEALGKEKFVISTGVGQHQMWACQYYRWTEPRSWVSSGGLGTMGFGLPSAIGAKVAAPEKYVIDIDGDASFSMTAMELATASQYDIGVKVLLFNNEFQGMVEQWQDLFYENRYSHTRMTNPDFVKLSESMGAKGLRCTKLEDLPRMMKEFLEYDGKRPIVLECLVSSEHVYPMIPAGKALHEQLLHPLLRNGSE

SEQ ID NO: 29091 - protein, 613 aa, Nakaseomyces delphensis
MADGVFQGAIGIDLGTTYSCVATYESSVEIIANEQGNRVTPSFVAFTPEERLIGDAAKNQAALNPKNTVFDAKRLIGRRFDEESVQNDMKTWPFKVVDVEGAPVIEVEYLGETKQFSPQEISSMVLTKMKEIAEAKIGKKVEKAVITVPAYFNDAQRQATKDAGAISGLNVLRIINEPTAAAIAYGLGAGKSDKERHVLIFDLGGGTFDVSLLHIAGGVYTVKSTSGNTHLGGQDFDTNLLEHFKSDFKKKTGLDISNDARALRRLRTAAERAKRTLSSVTQTTVEVDSLFDGEDFEASLTRARFEDLNAALFKSTLEPVEQVLKDAKISKSQIDEVVLVGGSTRIPKVQKLLSDFFDGKQLEKSINPDEAVAYGAAVQGAILTGQSTSDETKDLLLLDVAPLSLGVGMQGDIFGVVVPRNTTVPTIKRRTFTTVGDNQTTVQFPVYQGERVNCKENTLLGEFDLKNIPPMQAGEPVLEAIFEVDANGILKVTAVEKSTGKSANITISNAVGRLSSEDIEKMVNQAEEFKAADEAFAKRHEAKQRLESYVASIEQTVTDPVLSSKLKRGSKTKIEAALADALAALQIEDGSTEEYRKAEVGLKRVVTKAMSSR

SEQ ID NO: 29092 - protein, 506 aa, Bacillus licheniformis ATCC 14580
MQNVISASGSAWMPKKIEKMTKGSVYMKTPLYTALVNHAEGHHYSFHVPGHHNGDVFFDEAKTFFETILKVDLTELTGLDDLHEPSGVIKEAQDLVSRLYGAEESFFLVNGSTVGNLAMILAVCQPGDTILVQRNCHKSVFHAIELSGAHPVFLTPEIDEAMAVPTHILYETVEDAISQYPHAKGIVLTYPNYYGHAVDLKPIIEKAHQHDISVLVDEAHGAHFVLGHPFPQSSLKAGADAVVQSAHKTLPAMTMGSYLHLNSGRINRDRLAYYLSVLQSSSPSYPIMASLDIARAYAEDILKTNRTADIEKELINMREVFSQINGADIVEPADARIRQDPLKLCIRSAYGHSGFELKSIFEANGIHPELADERQVLLILPLEGKNMPAPELISTISKDMKDTAVRNDLPAGIGIPSEKVTALPYRKSKLSAFKKESVPFTEAAGRISAESVTPYPPGIPLIMAGERITKETISRLTRLVDLNVHIQGSNQLKQKQLTVYIEEEKS

SEQ ID NO: 29093 - protein, 474 aa, Bacillus licheniformis ATCC 14580
MVGMLYIGYYAYKRTANLSDYMLGGRTLGPAVTALSAGASDMSGWLLMGLPGAMFATGLSGSWIVIGLVLGAWANWIFVAPRLRSYTEVAGNSITIPAFLENRFHDKSKILRIFSGVVIITFFTFYVSSGMVSGGVLFNSIFNLDYHAGLWIISGVVVAYTLFGGFLAVSWTDFVQGIIMFVALILVPIVTVIQTGGPGEAFSEIQSIDPNLLNIFKGTSVLGIISLFSWGLGYFGQPHIIVRFMAISSIKETKKARRIGMGWMIFSSAGALLTGLLGIAYYSKNGLHLDDPETIFIQLGNILFHPLITGFLISAILAAVMSTISSQLLVTSSSLTEDLYKTLFKRSASDKELVFFGRLSVLAVSIVGLCLAWTKNNTILGLVSYAWAGFGASFGPVVILSLFWKRMTKWGALAGMVAGALTVIIWAEAGLSDVLYEMIPGFAASLLFVFVVSLLTSKPEQQVLDEFEQYKQTL

SEQ ID NO: 29094 - protein, 493 aa, Bacillus licheniformis ATCC 14580
MSVEVFISLGIYFAAMLLIGWYSYRKTSNLNDYMLGGRGLGPAVTALSAGASDMSGWMLMGLPGAMYVTGLSSAWLAVGLTIGAYVNYLVVAPRLRTYTEVANDAITIPDFFENRFNDTTRILRLASAIVIMVFFTLYTSAGMVSGGRLFETAFGLDYKIGLFLTAAVVIAYTLFGGFLAVSLTDFVQGLIMFIALVLVPIVAFTQLGGITPTFNVIEEINPSLLDFFKGTTVISIISFLAWGLGYFGQPHIIVRFMAISSVKELKPARRIAMGWMIISVIGALLVGLTGVAYVHETGTALKDPETIFIVFSKVLFHPLITGFLLSALLAAIMSTVSSQLLVTSSAMTEDFYRTFFRRKASDKELVLVGRLSVLLVAVIAILLSLTPNNTILDLVGYAWAGFGSAFGPAILLSLYWKRMNQWGALAGMITGAVTVLIWILTGLQEKTGIYEMIPGFFLSLIVVYAVSMITNKPAKEARDMFEEMEQTHEEEHS

SEQ ID NO: 29095 - protein, 459 aa, Bacillus licheniformis ATCC 14580
MKTKVSAVLFLSFFLAASALAAEPTVQSVNDSVNMTWVAIGTLLVFFMHAGFAMVESGFTRAKNTLNILMKNFLTISIGSILYFFAGYAFMFGDSAGGFIGTSGFALAGDQDVGFFVFQAVFAATCATIISGAVAERMKLGSYMILTLFMTGLIYPVVGHWTWGEGWLYDLGFVDFAGSSIVHLTGAAGAVAAVMFLGPRIGKYTNGKVNAIPGHSIPLGALGVFILWFGWFGFNGGSTLAADPAAVPHVITTTLLAASGGVVSSALFTYFRYGRIDPSLTLNGALGGLVGITAGADGVSFTGSILIGFIAGVILVVGVQFIDQVLKLDDPVGALAVHGICGVWGTLAVGLFNTSSGLFYGGGAAQLGIQAVGILSIAAWTLAATYAVAAAMKALAPIRVSKEEEISGLDYAEHGSSAYEYKESYIDQDDVDVSSAFGTDLVSRLNNLKPGPSSKTEQV

SEQ ID NO: 29096 - protein, 332 aa, Bacillus licheniformis ATCC 14580
MLSALQPILNFISQDPARNWRIVEKQYRNESLGSFLNTHFSSGSIDMIGVLLDMEAYMGLSLVEVLRESIFFTSPTRFYEITCGMDLLTQAFLPQLKGNILFRQKLMKMSQTKNSVTAHCIHQQSAEHSAVTGDFAIVTIPFSALRFVAFEPFESFSYQKRRAIRELNYIAATKIGIEFKSRFWERVGQRGGRSITDLPIRFSYYPSSIGGHGHAVILASYTWADEALIWDSQPEEERIRYTLKNLAKIYGDIVYSEFVSGASFSWTQNPFSAGAFTAFEPGQELELYPYIPMPEGRVYFAGEHASLTHGWMQGAIESGIRAAYEVNQASRV

SEQ ID NO: 29097 - protein, 445 aa, Bacillus licheniformis ATCC 14580
MKNETALKRSLTLGPLVVIGLAYMDPLVVFDSYGVVAQLTKGHVPAAYVFTVAALLLTALSYGSMVKAYPKAGSVYTYAYESIHPHAGFLAGWTIMLDYLFLPMVNFAIGSAYLTAAFPEVPHGFWVVLLALSITVVNVLGIRLTANITGLFVAFQVIVALTFAGFMIAGLAGGLGTGELISADPFFHSDIEPSLIVSGATILCFSFLGFDAISTMSEETVNPKKNIPLAIFLTVAIGGTLFTAISYLMQQIYPSYDNFRHADSASLEIALYTGGAFLKSFFLAGTMVAVISSSLSSHASASRLLYAMGRDSSLPKRFFGYVHPTLKTPVFNILFIGLISLTAMIGELEVIYSFISFGALIGFIFVHLSVIGHYYIRRQEKGFLKTLRYLVMPFLGASFCGWLLLSISKNALIIGAGWLIAGFIYFLFRIRSLPDVTFGFDRDPR

SEQ ID NO: 29098 - protein, 612 aa, Bacillus licheniformis ATCC 14580
MSKVIGIDLGTTNSCVAVLEGGEPKVIPNPEGARTTPSVVAFKNGERQVGEVAKRQSITNPNTIMSIKRHMGTDYTVEIEGKKYTPQEVSAIILQHLKSYAESYLGETVSKAVITVPAYFNDAERQATKDAGKIAGLEVERIINEPTAAALAYGLDKTEEDQTILVYDLGGGTFDVSILELGDGVFEVRSTAGDNRLGGDDFDQVIIDHLVSEFKKENGIDLSKDKMALQRLKDAAEKAKKDLSGVSSTQISLPFITAGEAGPLHLELTLTRAKFEELSSHLVERTMGPVRQALQDAGLSASEIDKVILVGGSTRIPAVQEAIKKETGKEAHKGVNPDEVVALGAAIQGGVITGDVKDVVLLDVTPLSLGIETMGGVFTKLIERNTTIPTSKSQVFSTAADNQTAVDIHVLQGERPMAADNKTLGRFQLTDIPPAPRGVPQIEVSFDIDKNGIVNVSAKDLGTGKEQNITIKSSSGLSDDEIERMVKEAEENAEADAKKKEEIELRNEADQLVFTTEKTLKDLEGKADEAQVKKANEAKDALKAAIEKNDLDEIKAKKDELQAIVQELSMKLYEEAAKQAQAQQDGGAGAKKADDNVVDAEYEEVNDDKDQK

SEQ ID NO: 29099 - protein, 395 aa, Bacillus licheniformis ATCC 14580
MSKIIAINAGSSSLKFQLFEMPSEKVLTKGLVERIGLDNGIFTISVNDEKKTETTDIPDHSVAVKMLLDKLTKFGIIKDLNEIDGIGHRVVHGGEKFSDSVLLTDEMIHEIEEISELAPLHNPANIVGIKAFKEVLPNVPAVAVFDTAFHQTMPEQSYLYSLPYEYYEKFGIRKYGFHGTSHKYVTERAAELLGRPIEELRLISCHLGNGASIAAVEGGKSIDTSMGFTPLAGVAMGTRSGNIDPALIPFIMEKTGQTADEVLNTLNKKSGLLGISGFSSDLRDIVEATKEGNERAETALEVFASRIHKYIGSYAARMSGVDAIIFTAGIGENSVEVRERVLHGLEFMGVYWDPALNNVRGKEAFISYPHSPVKVIVIPTNEEVMIARDVVRLAH

SEQ ID NO: 29100 - protein, 512 aa, Bacillus licheniformis ATCC 14580
MILKNISSVFWIVIVITAAAVLWGIVAPDNLQALTTSIQGYVTNTLGWYYLLVVSLFVAFSIFLIFSPIGKIRLGKPEEKPEFSRLSWFAMLFSAGMGIGLVFYGAAEPISHYAISSPSGETETAQAFRDSLRYTFFHWGLHAWAIYAIVALCIAYFQFRKDAPGLISATLFPVFGDRVNGPLGKGIDCIAVFATVVGVATSLGIGATQINGGLHYLFGVPNSFQVQLAIIAVITVLFLISAWSGIGKGIKYLSNTNMVLAGVLMIFMLFVGPTVLIMNSFTDTIGTYISNVVQMSFRLAPNDPDSREWINSWTIFYWAWWISWSPFVGIFIARVSRGRTIREFLIAVLFAPTVLAFLWFSIFGVSAMDLQQKGIFNVAKLSTDTMLFGMFDHYPLAMITSIVALLLIAVFFITSADSATFVLGMQTTYGSLNPENSVKISWGIIQSAMAGALLYSGGLSALQNTAILAALPFSVVVILMIVSLYKSLSQERKEIKQAEKFQKPRSPRVKKA

SEQ ID NO: 29101 - protein, 222 aa, Bacillus licheniformis ATCC 14580
MMNMLIDSAHIPEIERLLDSFPAGGVTTNPALIARENKPFKQQIQDIRRLLPEHLPLHAQVIADHWRDMVDQAKALYNWLDGNVSVKIPVTTQGLYAIRKLAAENIQTTGTTVYTAAQAVLAAKAGASYVAPYVNRIDQEYGNGAGVVKTIVGLFNTNCLNCKVLAASFKHNRQILAVMEAGSHEATISPELISRLADHPAVDRDIHAFREIWHSQYGTFSF

SEQ ID NO: 29102 - protein, 591 aa, Bacillus licheniformis ATCC 14580
MPNCDTINLVKIFKRSAHHPMIRRFFSYYKPHKRLFFIDFSSAIVVAVLELAFPLVVQWFIDTLIPGGDWLEIVWVSIGLLLIYLLSTGLQYIVNYLGHKLGINIETDMRQELFQHVQRQSFRYFDNTKTGHIISRITNDLFDIGELAHHGPEDLFIAVMTFLGAFWIMLTINVKLALVAVLFVPLLIILIIYSNIRMNRAWRQMYSEIADVNARVEDSVSGVRVVQSFTNERFEISRFLKNNQKFRKAKLKGYKTMALTTAGTFLMTRLMILAVLVFGAWLSFSGNMSYGEFVGFVLYVNVLFKPIDKISAILELYPKGMAGFKRFTELIDTKPQIVDRKDAIDVPALEGNIVFKNVTFGYEKHKPVLRGIDLSIKAGETVAFVGPSGAGKTTISSLIPRFYDIDGGAITIDGIDIRDMTKRSLRSQIGIVQQDVFLFTGTLRENIAYGKLDATDEEIQRAAKMAHLEQLIESLPDGYETQVGERGLKLSGGQKQRIAIARMFLKNPPILILDEATSALDTETEQVIQNALTELAKDRTTLVIAHRLATIRNADRIVVVTENGIAEEGTHDELVERGGIFANLHRVQYQS

SEQ ID NO: 29103 - protein, 225 aa, Arabidopsis thaliana
GQSIKPVYGRNPSFSKLYPCFTESWGDLPLKENDSEDMLVYGILNDAFHGGWEPSSSSSDEDRSSFPSVKIETPESFAAVDSVPVKKEKTSPVSAAVTAAKGKHYRGVRQRPWGKFAAEIRDPAKNGARVWLGTFETAEDAALAYDRAAFRMRGSRALLNFPLRVNSGEPDPVRIKSKRSSFSSSNENGAPKKRRTVAAGGGMDKGLTVKCEVVEVARGDRLLVL

SEQ ID NO: 29104 - protein, 463 aa, Legionella pneumophila subsp. pneumophila str. Philadelphia 1
MDLFRKKDIKGSLDNESHLAKCLSVFDLTFLGVGAIIGAGIFVLTGIVAATISGPAVIFSYVVAGFACAFAALSYAELAASIGGCGSAYGYAYAGFGELIAWIVGWDLLLEYSIAVSAVSIGWSGYANDFLMALKIFIPTHLLHGPADGGDLNILAILIIAVLTTLLIVGVKSSSRFNNIMVLVKLLVIFIFIAIAFGEVKVENWSSFMPYGWAGVMKGASIIFFAYVGFDAVSTAAEEAINPQRDLPIGIIASLAICTVIYILVSGLLTGIAHYTTLNVSSPISHVLLVLGYKTAAGLVGVGAIAGLTTVMLVLFYGLTRVFLAMSRDGLLPRFLSKTNEHTKTPIRIILLCGILMASLASVTPIGTLAELVNIGTLFAFIVVCGGVLYLRRTHPDMERPFKTPFMPYVPILGIISCFYLILNLPWVTILRFIIWMAVGMAVYFAFSRGNSALSVEGDCAAE

SEQ ID NO: 29105 - protein, 437 aa, Legionella pneumophila subsp. pneumophila str. Philadelphia 1
MIGNKTMDMDIKHKPLKRELSLFGATMMGLGSIVGTGVFVSIGIAAGVTGPSVILAIALAALVATCNAFSSAQLAANHAVSGGTYEYGYRYLHPAFGFTAGWMFLCAKSASAATAALGFAGYFIHLSGLETVPVIPIALAVSITLILLVLSGLRRTNTVNIIIVMITLITLTVFIISGLPDFMQRGTANLRPFFPVSKQEGLSHFFYATALMFVAYTGYGRIATLAEEVKNPGKFIPAAIIITLMVSAVLYILVGLVAIGAVGVEKLAQVTETNATPLESAARAIGIPGLSVLVSIGACTAMLGVLLNLILGLSRVALAMGRKGDLPKMFCYVSETRHVPVSAVIGVGVVIIALVLTGSVETTWTFSAFTVLIYYAITNLAALHLPKEEQLYPPLFAIGGLLSCLFLAFWVPIGVWITGISLLFLGLLWKVVANRFL

SEQ ID NO: 29106 - protein, 392 aa, Legionella pneumophila subsp. pneumophila str. Philadelphia 1
MDIALAKRVQKVKPSPTLAVAAKAAQMKAQGLDIIGLGTGEPDFDTPQHIKLAAISAIEAGDTKYTAVDGIVELKEAVKNKFKRDNELDYQLNQILVSVGGKQSCYNLCQAYLNPGDEVIIPAPYWVSYPDMVLLADGVPVIIETTPAQRYKINAQQLEQAITPKTRMIFLNSPSNPSGIAYTQNELKELGDVLKKHPQILIATDDMYEHIIWSQPFTNILNACPELYDRTIVLNGVSKAYAMTGWRIGYAAGPAPLINAMKTIQSQSTSNPCSIAQRAAVAALNGSNESIEEMVNAFHQRHDYVADRLQSIDGIEVIPADGTFYIFPSVQAIIEKRGYANDIEFSEKLLNEVGVALVPGSAFGTEGCIRISFATGIDTLKDALNRLQRFCS

SEQ ID NO: 29107 - protein, 523 aa, Legionella pneumophila subsp. pneumophila str. Philadelphia 1
MRRQWYIGFGVILLCLFALFAMLQDIVWFFAFLIPIVILWIYDVLQTKHTILRNFPVLGHVRYFLEFLRPEIQQYFIATDESELPFNRETRSMIYQRAKNVRDTIPFGTERDILSVGYTWALHSLSPKHSSEVEPRIDVGGPDCKKPYNASRLNVSAMSFGSLSANAIMALNKGAKLGGFYHNTGEGGLSPYHLQGGDIVFQIGTAYFGCRDDKGDFDENEFIKEASRDEVKMIEIKLSQGAKPSHGGILPAAKLTEEIAKVRKVPMGKDVLSPIAHTAFDNPVGLLHFVKRLRDLSGGKPIGFKLCLGRRHEFMAICKAMLKTNILPDFITIDGAEGGTGAAPVEYTNFIGTPLEAGLVFVHNALIGTGVRDKIRVICSGKVTNGFDLLTNIALGADICNSARAMMMAIGCIQSKQCNANTCPTGVATQKKRLQYGLVVDQKKFLVANFHNNTIKSFLEMVGALGLNNPSDLKPSHIMRRIGVDEVKSFDQIYTYVKPGQFLQGDIPEDYRIHWEHANPDKF

SEQ ID NO: 29108 - protein, 394 aa, Legionella pneumophila subsp. pneumophila str. Philadelphia 1
MHLKRTLSLTLLAFYGLGTILGAGIYALVGEVAKEAAQFTPLSFLIASIIALFTAISYAELSSRLPLSAGSALYVRRAFHQKWLSGLIGWIVVLTGVISAATLSHGFVKYFQLFLPLPPSLIITILTVILAGVAVWGIRESATLILYMTLMEVGGLLMIIYYGRYSFASIDIQSFSLPHSFDGVLIGAFIAFYAFIGFEDMVNTAEETINPEKTLPKAIFLALISATILYVAVAWVIVSTIPSNALVKTDMPLIEIIKLQGQSPLLFSIIALISITNGILVQIIMASRLIYGMANQQNAPQIFSFVYSKTQTPVNSTLLVSLIILLFAYALPITTLAKLTSSIILCIFIIIHASLIKIKLTKKKPTNAISFPIVFPMISILLTLAFLIIQFFLK

SEQ ID NO: 29109 - protein, 403 aa, Legionella pneumophila subsp. pneumophila str. Philadelphia 1
MFSQSQQKIVCVLYDDPKGGFPPNYARESIPELKQYPDGQSLPNPDSIDFIPGEMLGSVSGELGLRQFLESNGHQLVVTSDKDGSDSVFARELKEATVVISQPFWPAYLTRDRIESAPKLKLAITAGIGSDHVDLQAAMEHNITVCEVTYCNSISVAEHTVMMILALVRDFIPQYNTVIDGGWNIADCVSRSYDLEGMQVGCVAAGRIGLAVLRRLKPFAVKLHYTDRHRLPVQLEQELNLTYHPSVESMVKVCDVVSIHCPLHPETEYLFDERLIKQMKRGSYLINTARGRICDQHAVADALESGHLAGYAGDVWFPQPPAKNHPWRSMPNHAMTPHTSGTTLSAQARYAAGVREILECWLGNKPIREEYLIVSQGHLAGVGSHSYSAGNTTSGTEQAAELV

SEQ ID NO: 29110 - protein, 77 aa, Legionella pneumophila subsp. pneumophila str. Philadelphia 1
MARGEVKWFNNAKGWGFIIPEGGGEDIFVHFSSIHGTGYKTLVPGQAVTYDVVNGERGLHASNVVALSENAEQEEIA

SEQ ID NO: 29111 - protein, 405 aa, Legionella pneumophila subsp. pneumophila str. Philadelphia 1
MKKVIKKIALAYSGGLDTSIMIPWLKEHYEHAEVIAVICDLGQQEDLDAIKNKALKSGASKAYVVDVKNEFATQYLWPLVKSGALYEDQYILGTISRPLIAQKLVEIALTEQVNAVAHGATGKGNDQVRFEYSIKALAPQLEIIAPWRTWDIKSRQEAIVYAKAHGIEVPVTPKAPYSRDHNIWYISHEGGVLEDPSQEMPNDVLLMTAPVSQTPDEEEVVVLDFKKGVPVALNGQELSPVDLLNSLNQKAGQHGIGVADIVENRLVGMKIRGIYEAPAAAVLYKAHKLLESLCLTRSTLHLKQSLQQTYANLVYEGRWFSQTKQALDAFIDVTQQHVTGCVKLKLFKGNIIPAGMHSPYSLHHPELATFEEDNVYNQKDAEGFINLFSLSAKIYSQVHQGGNYD

SEQ ID NO: 29112 - protein, 315 aa, Legionella pneumophila subsp. pneumophila str. Philadelphia 1
MSTMMIFTGNANPELALKISSHLQIPIGKATVGTFSDGETMVEILENVRGKDVFVLQSTCAPANNNLMELLIMADALRRSSAGRITAVVPYFGYARQDRRVRSARVPITAKVVADMMASVGICRVLTVDLHADQIQGFFYMPVDNVYSTPVLLEDITKQKLNNIMIVSPDVGGVVRARAVAKRLNDAELSIIDKRRSGPNKSEVMHIIGEPANKNCIIVDDIVDTAGTLCTAAHELKKNGAKSVRAYITHPVLSGPAVNNIKHSGLDEVVVTDTIPLSAEAQNCEKIRVVSLADMLAQAIKRVNVEESVSSMFAE

SEQ ID NO: 29113 - protein, 250 aa, Legionella pneumophila subsp. pneumophila str. Philadelphia 1
MLNIKELNVAVNGQSILKGINLEVKPGEVHAIMGPNGSGKSTLSKVLAGHPSYEVTRGDISYLGQDLLPMSPEERARAGIFMSFQYPVEIPGVTNINFLKASVNAVRKGQGKNTLDAIEFLSFIREKCQLLDMDESFLYRSINEGFSGGEKKRNEILQMAALEPKLAILDETDSGLDIDALRIISQGVNAMRSPERSIILVTHYQRLLDYIEPDFIHVLANGRIITSGDKSLALELEKKGYSWLEEVEQL

SEQ ID NO: 29114 - protein, 272 aa, Legionella pneumophila subsp. pneumophila str. Philadelphia 1
MVKIRPFLKWAGSKYNCLNEIISSLPTGQRLIEPFAGSGVVFMNTSYSSYLLAESNSDLVNIYRILQLNGESFIDYCQQYFTPEANCKEKYYELRSEFNNLMDSNQKSAVFLYLNRHGYNGLCRYNSKGKYNVPFGLYEKPYFPRKEMMLFYKKCLSAQFIHGDFRNTFALAKPGDVIYCDPPYVPLTENNQTLPYNQKLFSLEDQIELAELAQETASKGIPVIISNHDTEFTRHHYKKAQIKSFYVPRWISCRSKMRLPVKELVAVFNCSS

SEQ ID NO: 29115 - protein, 949 aa, Legionella pneumophila subsp. pneumophila str. Philadelphia 1
MVKIMPNLPGLYFLQAYPSEEIWRLFVDGRFWSKENGWRGYESREPGCLNAALESLCSIALQVEKSGEEFELSVDLIKRIHKKCGKKVEELQEKNPGELRTDEPVSFGIPAGRASIKGIEEFLSLVFLTEGGAEFGPGKAGPFGPRFDKNYFKNLNPEQIPDLAKQIYFDMCKYGHSNTNHFYLAVMKNVDVYLEKITQSYNKEIKTAETLDEKLKIIVKHIRMYEVLHPFRDANGRTFVNNLLNILLMQQGLPPATFYEPNVFDLYSAEELVVVVKEAIFNTVEIIEQSKRKTPITLYGYHSSLEEQTKFRDMLDSPSYEKIKHMDFSDLNPEKLHLKTQKCLSSLNEQYPLHRGAIYLSDPGEIKLLLSNRNESQINQQIEQGAPPIYVGKTPAHLAVISGNMAMLDELIAKKADLSLQDYDGKTALHYAAECGNMQIMGKILKVVLSQEDAIKVLNIKDNHGKTAFHYAAEFGTPELISALTTTEVIQINEPDNSGSSAITLAYKNHKLKIFDELLNSGADISDELLDAIWARKDKETLGKIIAKNEKILLNKEAFRIAISLGSVSLVKKFLRAGVDIDIPLTKDKATPLMLSINSGNPKLVSYLLKKGANTRLTDTSGNSVLHYVFYSKAENREALANIITEKDKKLINQPNANGNPPLYNAVVVNDLKMATILLEMGARVDFEDRLGNNILHSAMRRCDLPIILDIVKKDSTLLHKRNSERRNPFHQALHEMHTFPSSKETEEIHFMNLSDLLLKEGVDLNKKDIKGKTILDIALSKQYFHLCVKLMKAGAHTNISSPSKFLKNSDANSILERPFKFKNDLKKELDNNPLIAMAQINDLYVQIKNNRIRTPTGYAPKEGVSFFKGKSNDAKAHDEVLSVLKELYDSKLTEMLGNLPGEGLEEIKRSQKFFDGELKLLIKNQDISRKVDKKSIQEAVGTSLKLKW

SEQ ID NO: 29116 - protein, 567 aa, Legionella pneumophila subsp. pneumophila str. Philadelphia 1
MNTITESYRAGLFQKKYWLQNIISGLIVGVVALPLAMAFAIASGAKPEQGLYTAIVAGLIVSIMGGSRVQIAGPTGAFIVVLSGITAQYGISGLQIATLMAGFILVLFGFARLGSIIKFIPSPVIIGFTSGIAVVIWVGQWQYFFGLPAAGSGHFHEKFWHLLLSFPHMNIATTFLGICALFIVLYSSKLPGLKRIPGPLIALVLVTIIQSVWHFEGVATIGSLFGGIPQGLPAFTWPEITMGRLIELIGPAFAIAMLGAIESLLSAVVADGMSGTRHNSNRELVGQGIANIVAPLFGGFAATGAIARTATNIRNGGNSPLSGIIHSITLILVLLFLAPLAVDVPLAALAAILFVVSWNMSEARHFIKLIRVAPRADVVILLVTFCLTVFVDLVVAVNVGVIIAVLHFLRRMVNSIQIQRMSEGQLSQELAQEKNYDLPEGVMVYVIEGPFFFGAVETFQSALANTHTDPKVLIIRMRWVPFIDVTGLQAMEEIILNLQKRGVRVLLSEANPLVDAKLRKMGIVQLIGEQNYYKEFSQALDVCRINDSDRKSQPPFEVAKPLASVTQ

SEQ ID NO: 29117 - protein, 320 aa, Legionella pneumophila subsp. pneumophila str. Philadelphia 1
MNFCTLGLAVIETEAQAVFELTQRIDEHFEKACELLLSCKGRIVVTGMGKSGHIANKLASTFSSTGSPAFFMHPGEASHGDLGMITRQDIVVAISNSGNTHEIVTLLPLLKRLEVPLITLTGNKQSTLAKSADVNLDVSIKQEACPLGLAPTTSTTVSLVMGDALAISLLQARGFSAEDFALSHPGGALGKKLLLKIDDLCHTGEQLPLANENATVSDALIEVTNKKLGMTCVVDNHGYLVGVYTDGDIRRTLTRQFNINTTLIKDVMTKNCRTISKGMLAAEALAIMQKYSITSLVVVENDNRPYAVLHLHDLLKAGVF

SEQ ID NO: 29118 - protein, 377 aa, Legionella pneumophila subsp. pneumophila str. Philadelphia 1
MMIATLMESAQETRVAITPNSAKQYIKLGYDVGIEKNAGLSSDFANEEFEKAGAIIFDSKSTLLKKTQILLCVNEPDPKNLNGLPPDSLIIGHIDNNPLSPLVKWCLDQKMTLFSMNLIPRISRAQSMDSLSSQANLAGYRAVLEAAATFHRAIPMMMTAAGMIQPAKALILGAGVAGLQAIATAKRLGAVVYAFDVRKAAKEQVESLGAEFIEVMQEQDSETAGGYATETSEEYKKLQAELIDQYAKTADIVISTALIPGRQAPVLLYKKTVEQMKPGSVIVDLATSRGGNCELSVADKIIKHGEITIVGLSNMAGLVPATASDLYSNNLVHLINILAKNPAELNLNPDDEIIQQAVLCHKGTYLPFQGVKEKQNA

SEQ ID NO: 29119 - protein, 373 aa, Legionella pneumophila subsp. pneumophila str. Philadelphia 1
MLVGVPKEIKSHENRVGLVPSSVREIIRAGSDVLVEKGAGLGIGISDDDYRNAGAEVVDTADDVFANAELIVKVKEPQPIECKRLREGQTLFTYLHLAPDPHQARLLKESGVTAIAYETVTQDDGGLPLLTPMSQVAGRMAIQAGAHCLEMAQGGSGILLGGVPGVAAANVVVIGGGVVGTNAVRMAMGMEARVIVLDRSLQRLNELDFQFGSKLNTVYSTADSIEKYVSSADLVIGAVLVPGAAAPKLVTRSMLSSMRPGSVLVDVAIDQGGCFETSRATTHQEPTYMVDNVVHYCVANMPGAVPRTSTFALNNATLPFILSIVTKGVKLALLSDPHLLNGLNVHQGKITYEAVARDLGYEYTPAAAALSGR

SEQ ID NO: 29120 - protein, 311 aa, Legionella pneumophila subsp. pneumophila str. Philadelphia 1
MTWLLECFKNKQESRLMSSYCGYIALVGRPNVGKSTLLNRILQQKLSITSRKPQTTRHSILGIRTEGEFQFVYVDTPGIHQGNAKAINRMMNKTAISVLRDVDVIAFLVDGTHWKDEDEYVLNLIKQAKVPCILVVNKVDKITDKTQLLPWIEQISQRYQFAAIIPLSAKTGLQVDELEGKLKNYLPEGPHLFPDDQFTDRSTKFLCAELLREKIFRFCGQELPYSVTVDIESFKDEGNLIRIHALILVDKDNHKRMIIGDKGQKLKEMATNARLDMEKMLDKKVFLQCWCKVKSGWSDDERILKQLGYDQ

SEQ ID NO: 29121 - protein, 657 aa, Legionella pneumophila subsp. pneumophila str. Philadelphia 1
MEICYRIWDKLIRGRKTNNLSLFSALWRERMLFQYIKKFFLFLWVQAVSISFLLAMASVSFAQLTAQDHAAHHQGEKESEGMGGMMKNIGTPSKELYPSLMNLPTLSPEKRLAIQQKAHQRITSGMALMKGGLNELLLASNNNDYAKMQEALEKLREGIAQYESALAALRALSEGKNPRDIALQWFKREMNLLPSTPQAKNVLGGPFFHLTIIALFGLFFLVMIWMYFFKMRRAAALLDRLTKQNATVSSETPPQFSKAPEPTPSLTSVEPIKSSQVSKVPSETAPTTPPTCPAHKCPVPQFPVMRSLTEPEEKWEGQLRVCRIFQEAPGIKTFHLASTHEVALPFTYYPGQFITLTALINGKTVRRSYTMASTPTQLHYCAITVKREEQGVFSRYLHDEIKEGDLLEVMGPNGKFTFTGEEAKSIVLICGGVGITPMMSIIRYLTDIGWHNDIYLLYCCRTTSEFLFREELEQLQERYLNLHVYASMLRSEGTIWMGLQGLFTKNIISHLVPDIASHRIHVCGPPAMMAAILGILKELKVPADLILTEAFGPEKKPEIIQEDLEAIKADTRSMISFRKSEKMVPILPDRTLLEIAEANGIAIDNACRTGQCGLCKVKLLSGEVTMACEDALSKEDKQQRLILACQAKATQNIEVDA

SEQ ID NO: 29122 - protein, 87 aa, Legionella pneumophila subsp. pneumophila str. Philadelphia 1
MTLCNLLDYKEINKMTNKIRGKVKWFNKDKGFGFIESSGKDYFVHFSSIQSNGFKTLPDGATVLFKMGKGQKGPQAEEVEVIKNDHH

SEQ ID NO: 29123 - protein, 559 aa, Legionella pneumophila subsp. pneumophila str. Philadelphia 1
MCSIGEYLAKRLEELNISEYFAIPGDYNLILLDEVLKNEKIKMINCCNELNAGYAADGYARVKGVSALFVTYSVGGLSVVNAVAGAYAENLPILVISGGPNTNSIQDAEILHHTLATEDNLYVRDIFSRITAHVVCIRKPEQAAMQIDEAIAIAIAKKKPVYIEIACNIANYPISKPTQRAFNTYKISDSSSLAAAVEHAAEKLNSALKPSLIVGSKVRHCNAINSVSELAKCTGYAMAAMPDAKGFISEQHPNFIGIYWGPVSSSGCAEIIDSSDAYLLIGPNENDYTTVGYVWGINPHKSIKTTKGGVIIGETVYTNIFMNDFLRELSKKLKFNDASYKAYKRIAEETVVYPELDQPDAPLSSRYLFGQIQKMLSDKKALLAETGDSWFNCMRLSLPEGCPFEIQMQYGSIGWSVGALLGMQAALHNQKRVIACIGDGSFQMTAQEISTMIRYGYKPIIFLMNNACYTIEVQIHDGPYNVINNWRYAELVNVFRGEQSNAKSFVVKTNKELLTAIKQAEKTDALCFIEVFLDKDDCNKNLLEWGSRVANYNSRPPRR

SEQ ID NO: 29124 - protein, 352 aa, Legionella pneumophila subsp. pneumophila str. Philadelphia 1
MKKILFIDRDGTLVEEPFDFQVDSLDKIKLTSGVIPALLQLQKAGFTFIMVSNQNGIGTVAFPEEDFAVCHEFILDLFSSQGILFDEIFICPHTPENNCICRKPKTGLLEPYLKETVFAKQYSWVIGDRDTDKEFADNLGVNFLPISKTHTWEMVASAIINDARKASVQRKTKETTIDLSVQLDSDQTSVIDTPIPFFTHMLEQVAKHGGFDLRLQASGDLEVDEHHLIEDTAIALGEAIRTALGDKWGINRYGYTLPMDESLATIAIDISGRSFCDFKGQFTREFIGGMATEMIPHFFQSLSSALGATIHIEVTGTNHHHMIEACFKVLGRALRQACSRTNNYLPSTKGVL

SEQ ID NO: 29125 - protein, 79 aa, Legionella pneumophila subsp. pneumophila str. Philadelphia 1
MRMSQRETGHVKWFNEKKGFGFIVNQKGEDIFVHYKDIQGVGFKTLHENDPVTFELDRGPKGLKAQNVVVASESVHTEE

SEQ ID NO: 29126 - protein, 551 aa, Legionella pneumophila subsp. pneumophila str. Philadelphia 1
MTEQTEKRAHFIRQLIIDDLANGKHQGIVTRFPPEPNGYLHVGHAKSICLNFGLAEEFKGKCFLRFDDTNPIKEEEEYVNAIIDDVRWLGFEWCAMTHSSDYYHELYELAIYLIKKDMAYVDSLSMEEIRAFRGTLQEPGRESPYRNRTIEENLDLFARMKAGEFPDGTHVLRAKIDMKSGNLNMRDPVLYRIRHARHQRTGDEWCIYPMYDYAHPISDALEKITHSLCTLEFQDHRPLYDWLVDNLPLPAKPVQTEFARLNLSHTVTSKRKLRELVEKKIVTGWDDPRLPTLRGMRKRGYPPAAIRQFCEIIGISRSDSVIDMSLLEECVRAEFNKTAKRALCVMDPLKVVIVNYPENKVEQLQAAFYPQNPESASRNLPFSREIYIEKSDFMENPPNKYFRLSPGAEVRLRHAYVIKCQEVIRNDQGEITELHCTYDENTLGKNPEDRKVKGVIHWVSSSHAYPVTIYQYDRLFTDPNPAREEDYFQFLNHNSLQTLQGFCEPAMAEQAEGDVFQFERLGYYCVNSVAEGCVQAFHRVVDLKDTWGKVS

SEQ ID NO: 29127 - protein, 387 aa, Legionella pneumophila subsp. pneumophila str. Philadelphia 1
MAIKPIYFDYMATTPVDPRVVEQMIKYLGPEGDFGNPASATHEYGRVASMAVEQARSQIAETINASPQEIVFTSGATEADNLAILGAARFYKNKGMHLVTMSTEHKAVLDSFHQLEKEGFQVTYLNPESDGLLDLEKLESALRLDTILVSVMHVNNEIGVIQDIASIGELLRNRGIIFHVDAAQSAGKLPIDLSQLSVDLMSFSAHKNYGPKGVGALYVRHKPRIRLQPLSYGGGHEGGLRSGTLPTHQIVGMGEAFAIAEADRIPEQTRILNLRKQLWDGIRHLPAIKLNGHEHRRIAGNLNVSFVGLNGDSLLFALSELAISTTSACSSASIQPSYVLRAIGLTDTEAQSTIRLSIGRFTSEVQIKKAIDIICTQVSRLHELSPL

SEQ ID NO: 29128 - protein, 859 aa, Legionella pneumophila subsp. pneumophila str. Philadelphia 1
MSGILIMQQVVIKFGGTSVSTRATWNNIAAITQKHLNTGVQPVIVCSALTQISNKLEKAIEAALLDEHHSLFNDIQSSHLNLAEQLEVNHQLIANDLHQLQQWLTGISLLKQAPAKTHAQILSLGELMMTRLGHAFLEKQGIKVKWYDARELLTSTPTLGGETMNYLSARCESEYDSALVEKFLSSGAQAIITQGFFAANPHGETVLLGRGGSDTSAALLAGKLQAASCEIWTDVPGIYTANPHQLPHARLLKQLNYDEAQEIASMGAKVLHPNCIPPVRKANIPMVVKYTHLPEHSGTLITKDIDESAPLIKSIQVKHSILLISIDTLNMWQQVGFLADVFAAFKKHGFSVDLLSSSEFNVTLSLDVNAKIHDRPAINALLDDLNQFGRAKLIEPCSAVSLVGHHIRTVLPHLGPALEVFEAKQVYLMSLASNDLNLTFVVDESHADKLCQRLHHLLIESNPQIFYYSKSWHEEFGKPNVRPTPWWEIERDRLLTTSAIHSPCYVYHSPTQATRARQLSALESIDSLFYAIKANPFPTILKTLEKEGIGFECVSIQELELVLKLFPNIKKERILFTPNFAPKSEYEFALQTGCYVTIDSLYPLENWPDLFKDREVIVRIDPGTGAGHHKHVSTGGNESKFGITQNDISKILSLTKVNHIKVIGLHAHSGSGILSTDLWQQTAVMLASLTDQFPEVRSINLGGGLGIVEKPGQHPIDFAALDAQLMAVKSQYPGLAIWLEPGRFFVAESGVILAKVTQCKEKGKVKFIGIETGMNSLIRPSLYGAYHEIVNLTRLHEEKAGFAHIVGPICESGDTLGYDRLLPVTREGDVILIANTGAYGHCMSSHYNLRPPAQEIVLE

SEQ ID NO: 29129 - protein, 597 aa, Legionella pneumophila subsp. pneumophila str. Philadelphia 1
MRTRLTSKLMKNNLPIKSRLLYKRLLSYVKPFWPVLLLGVLANILYSGIDAGFTYMTKLFLDKSFITIDLNFVKQIPLIVLIGITLRGLVSSLGSYCMTWVARSVVKVLRQTVFSHIIHLPADYYDEATSGQLLSKILYDVEQVAQVSADALTDFIQNICLVIGLLTVMMVICWQLSLMFLLTIPFVGIIVNYTNKRVRRISHKVQKTMGEVTEIASEAIEGYRVVRIFGGERYEITKFNKATEYSRKNDMKVAISKAINVSGVQLVIAIGIATIIMAAIHLSTVITISAGSFLAIIAAMLQLIKPMKTLTTLNATIQRGLAGAESVFNLLDLPLERNNGLILKEKIRGEIEFKHVYHAYRQGQNILHDVNFVIEAGTSVALVGHSGSGKTTIASLLPRFYELSQGMITLDGMPIQQLSLESLRKQMSLVSQNVTLFNDTLANNIAYGRFDASREQIITAAKLAYADEFIKQLPDGYDTRVGENGVLLSGGQRQRIAIARAILKDAPILILDEATSALDSESEHYIQAALEQVMKGRTTLIIAHRLSTIKHAHKIIVLQHGRIVEQGSHQELLDMDGHYAQLYKVQQFGRINEEVVA

SEQ ID NO: 29130 - protein, 394 aa, Legionella pneumophila subsp. pneumophila str. Philadelphia 1
MEHNDVVIVAAKRTPMGAMLGNLSALSSPELGAVAHMAALSQSGIAPAEIDEVISGCVLQAGIGQAPARQAAIKAGIPNSTGATTINKMCGSGMKAVMLAHDLIKAGTANVILASGMESMSNAPYLLSKARAGYRLGHGELKDHMFLDGLEDAYDKGQLMGCFAETTAKHFNFSREQQDEYALRSMTKALKAIENGAFREEIAPVTLTTRKGDITVDVDEGPETAKLAKIPQLKPAFQADGTVTAANSSSISDGAASLILMSASNAEKRGIKPLAKIIAHASHSQAPQWFTTAPVDAIRKVMNKASWKQDDVDLFEINEAFAVVAMAAITQLELNPEQVNIHGGACALGHPIGASGARILVTLMHALKHQGKKRGIASLCIGGGEATAMAIELI

SEQ ID NO: 29131 - protein, 176 aa, Legionella pneumophila subsp. pneumophila str. Philadelphia 1
MNRIILLDRDGVINTDSINYIKNVDELIIIPDSIIAIARLSAAGYKIGVATNQSGVSRGLYSEDDLSAIHCKLREVLAEAGGQIDALEYCIHLPEDNCFCRKPQPGMLKALAEKLNCSLDSVPFVGDRVSDIQAALAVGAQPIIVLSNMTDMSELAQYPKVPIYNSLLQYVNQLLL

SEQ ID NO: 29132 - protein, 649 aa, Legionella pneumophila subsp. pneumophila str. Philadelphia 1
MEQNRMAKIIGIDLGTTNSCVAVMEGDKPKVIENSEGHRTTPSIVAFTDDNEILVGQSAKRQSVTNPEKTLFAIKRLIGRRFDDPIVQKDIKMVPYKIMKADNGDAWVRVKDQDKAPPQISAEVLRKMKKTAEDYLGEEVKEAVITVPAYFNDSQRQATKDAGRIAGLEVKRIINEPTAAALAYGMDKKRGDSVIAVYDLGGGTFDISIIEIAEVDGEHQFEVLATNGDTFLGGEDFDLALIEYLASEFKKDTGIDLHNDPLALQRLKEAAEKAKIELSSAQQTDVNLPYITADASGPKHLNIKLTRAKLESLVEKLVERTIEPCKTALKDAGLTVSQINEVILVGGQTRMPLVQKTVEEFFGKEPRKDVNPDEAVAVGAAIQAAVLSGEVKDILLLDVTPLSLGIETMGGVMTKLIEKNTTIPTKATQVFSTADDNQTAVTVHVLQGEREQASANKSLGRFDLRDIPPAPRGVPQIEVTFDIDANGILNVSAKDKATGKAQSIVIKASSGLSEEEVAAMVKDAQSHAEEDKKFKEMAELRNQADSLIHSCEKSMKDLADELSEDEKRGIETAISELKEAVQGTDKARIEDKLKVLTDASAKMAERIYAKKSSEGQAAQGQTQSQESTKPAEEGVVDAEFEEVKEEDKK

SEQ ID NO: 29133 - protein, 278 aa, Legionella pneumophila subsp. pneumophila str. Philadelphia 1
MIKNSEKESIIRIRPFLKWAGGKFQIINKIRASLPKGARLIEPFVGSGAVFLNTNYNKFILADINADLINLFEHLKFEKHDFIHFCKQFFTAEFNKKSTFLSLRTEFNSTTDSHLKAALFIYLNRHAFNGLMRYNSSGMFNTAFGDYKKPYFPENEMLVFIQKAEKAEFKCADYSVIMGEAIKGDVVYCDPPYVPLSASANFTKYHSTAFGQEDQRRLVELAKELAAKGIPVILSNHDTAFTQNLYQGSSIISFEVQRNISCNGSTRGRAREMLALFN

SEQ ID NO: 29134 - protein, 69 aa, Legionella pneumophila subsp. pneumophila str. Philadelphia 1
MSKTVNGVVKWFNEIKGFGFIEQEGGPDVFAHFKEISSSGFKTLTEGQRVQFIVTQGAKGLQAQNITAL

SEQ ID NO: 29135 - protein, 188 aa, Legionella pneumophila subsp. pneumophila str. Philadelphia 1
MEVTTMDIKKLAPWNWFKEEEAQNKSVPLSTTGQSCISPLSQLHQEIDRIFDNVLRSVGISNLDIEKTPSNSAQNLLLKPCIDIAATDKEYTITVEVPGVEEDHIKLELSDNTLIIKGEKKHESEKKDKDIYRIERAYGSFQRVLSLPEDANQEDIKAQIKNGVLTITMPRKEVSKPKGKLIDIKKAS

SEQ ID NO: 29136 - protein, 468 aa, Legionella pneumophila subsp. pneumophila str. Philadelphia 1
MNNEFLENVTYEELTLGRRASLNRTLTQDDINLFAAMSGDINPSHVDPQFAKSDVFHGVVGHGMWSGALISTLLGTVLPGPGTIYLEQDIQFITPVRIGDNLTITIVVRDKHPGKSIVHFDCMGVNQKGETVIKGLAKVIAPTKKMKVPRTVLPLVQIHHNDHFNKIIEACSNLPSIKTAVVHPVTANVLEAVYDSVKAGLITPVLIGPMAKIKCAASEAKIDLSNWEMIDTEHSDAAAFKAVELAASGKVDSIMKGALHTDELMSAVVPATSGLRTKYRISHAYVMDVPTYHKPLIITDAAINIAPNAADKADICQNAINLWRILYGEEIKPKVAILAAVEIVNPKMQATVDAAVLCKMADRGQIINGILDGPLAFDNAINKQASKEKNIISPVAGDADILLVPDIESGNMLAKQLTFLGHADAAGIVLGARVPIILASRADSLRTRLLSCAVATKIAAARKAGKIK

SEQ ID NO: 29137 - protein, 372 aa, Legionella pneumophila subsp. pneumophila str. Philadelphia 1
MRHSALLIINSGSSSVKFQVFSNTETLDLLAKGKIINIGGEPSFTAVNETLEHQRTLITLEKDMTYEQAIHLILDWISQQQQSWEIHAVAHRVVHGGEYFTQSVLVTPQIISQLETLNSLAPLHQPHNLAAIKIIGRIKPELPQIACFDTAFHAQHTPLFTTCALPEYLRQQGIRRYGFHGLSYEWISLVLKKDYPDLANNRIIIAHLGNGASLCAINRGISIDTTMSLTALDGLPMGTRCGSLDPGAVIYMMRELNLPPDKVEEILYNESGLLGLSGKTNNVLELQSSPDKNAQFALEYFCLKTAQFIGMMAISLGGVDGIVFTGGIGENSEPIRANILKRIECLHPFSVIVIPANEEKMMAMHTLTALRT

SEQ ID NO: 29138 - protein, 84 aa, Legionella pneumophila subsp. pneumophila str. Philadelphia 1
MNEVILYTTGYCPYCIKAKELLDRKKVIYTEIRVDLQPELREEMIQKSGRRTVPQIFINGQAIGGCDDLYALEAQGTLNELLKK

SEQ ID NO: 29139 - protein, 388 aa, Legionella pneumophila subsp. pneumophila str. Philadelphia 1
MNHYEKMSLLKDSATVAINSLAQQKINAGIKIHNLSAGEPKLPPHPSIINAVTQAMEQGHTLYPPIMGIPELRHMGCEWMYRSYDCSFQNEQCLVVNGGKLGIYLLMQLLLQPNDEVIIPSPYWVSYPAMVSLFGGTPVPVETTEAEEWKLTPQALQKACTTKSKILILNNATNPTGALYTQSELIHLLQTAKKHNLLVISDEVYSELTYDGHHYVSCGSLPQFRERVIIIQSCSKNFSMTGWRVGFIFAPEIFIKPLSALVSQSTSGVTTLSQWAAVAALQEVNQVNIWVQQNMEKRRNCLLRTLHDYLGLTITPPISSLYVFLSLKDIGCKNQNSEEFCKQALDKANVAMVPGIAFGKEGYVRLSFGGNEDDLKSGIYALAQWLHR

SEQ ID NO: 29140 - protein, 314 aa, Legionella pneumophila subsp. pneumophila str. Philadelphia 1
MKPFVYLTNQFLEPIIPMLIPDWNIIHGWKMASRVDQSRVVALATTVWDQIDHSFLMQFPNLKIISHLGIGTDNIDINFLKQNHIILHSQPNAGVHDTAELAIALLLTLSRRVILNDRYTRNNEWVEKKPRFLGNHLLGKQLGLVGFGQIGEKIAQFAEPFGLKIAYTARSQKNSPYLYCPTAANLASISDFLIICCSGGIDTQHLINKQVLDNLGPEGYLINVARGSIVDQNALIDALQRHTIAGAALDVYQYEPEVPFALRQLDNVVLSPHMGSSTKENLNQMFQLQAKHLNQYLNESLWQRESHVTLFEEQ

SEQ ID NO: 29141 - protein, 639 aa, Legionella pneumophila subsp. pneumophila str. Philadelphia 1
MNDMVKNLFLWLIIAIVLVSVFSNFGPRNSVAEKISYSQFLQEVDQGMINSVTIEDNKIIKGVTKNNKRFVTYMPMQDNALLGELLKSKVDVSGQEKQQESFLLHLFINWFPMLLLIGVWIFFMRQMQGGGGRGAMSFGRSRARLLGEDQVKVTFADVAGVDEAKEEVKELVDFLRDPTKFQNLGGRIPRGVLLVGSPGTGKTLLARAVAGEAKVPFFTISGSDFVEMFVGVGASRVRDMFEQAKKHAPCIIFIDEIDAVGRHRGAGLGGGHDEREQTLNQLLVEMDGFEGNEGVIVVAATNRPDVLDPALLRPGRFDRQVVVPLPDIRGREQILKVHLQKVPVDSHVEVKAIARGTPGFSGADLANLVNEAALFAARANKRKVGMIELDKAKDKIMMGAERRSMVMDDNEKKLTAYHEAGHAIVGLSVPEHDPVYKVSIIPRGRALGVTMFLPEQDRYSHSKRRLESQLCSLFGGRIAEELIFGPESVTTGASNDIMRSTEIARKMVTTWGLSALGPLTFGEEEEEIFLGRSVNKHKEMSDRTAQQIDDEVRAIIDRNYQRAKEILETNIDKLHLMAQSLIKYETIDTNQIQEIMSGKEPTPPEDWGSTKPMDKAESVNDAPAKPINGETIENPAEGH

SEQ ID NO: 29142 - protein, 68 aa, Legionella pneumophila subsp. pneumophila str. Philadelphia 1
MSEKIRGTVKWFNESKGFGFLESGGKDYFVHFSAIQGSGFKTLAEGATVMFKACNGQKGPQAEEVEVV

SEQ ID NO: 29143 - protein, 71 aa, Legionella pneumophila subsp. pneumophila str. Philadelphia 1
MSVKETGHVKWFNDDKGYGFISRDNGQDDVFVHFRSIVSNAGRKTLLEGQRVEFLVTKGAKGLQAEEVTAI

SEQ ID NO: 29144 - protein, 423 aa, Legionella pneumophila subsp. pneumophila str. Philadelphia 1
MSIFRSVLITLLFISSAMAATPDQVTYLPGWGPIKNNQYAGYFPVNPKAGLFYWFVESNNPSMDAPIVLWLNGGPGAASLYGFFMENGPYQVDKNGKLTARKDSWTKAANYLVIDQPAGVGYSYGSSKSYGSEGEAIDQLQGALQLIFKKHPELYGKPLFLAGESYAGKYLPQLAIRLLKDKNMNLKGLLLGDPWINPRLQQKANIDYAYYHGLIDNKARKRVRVLYENCVKEIDKQSPSTSKANKTCEQIQEFIKQESGGLNLANIATGVEPEDTNMVNYLNQKVVREALHIPVTVSEFKTFSTAAAKKLEIGEQDSVADLYPQLLAAGIRILIYNGLEDGKDSNFLSTELLLASLDWHGKNAFAKAPTCIWRTNNEVSGYAKGAVGLTQVKIRGAGHLAPIDQPARVFDLFKHFINDKPLC

SEQ ID NO: 29145 - protein, 133 aa, Legionella pneumophila subsp. pneumophila str. Philadelphia 1
MAYRKMLKSKIHRACVTQADLDYEGSITISPELLKVANILPYEAVNVWNITAGTRFETYAITGEKGSTDICVNGAAAHLVTPGDLVIIASFTQILEEDCAAHEPTVVFVDQFNRLKEIRPERIGVKSRIPNPA

SEQ ID NO: 29146 - protein, 89 aa, Legionella pneumophila subsp. pneumophila str. Philadelphia 1
MLYMKGTPKMPQCGFSARAVQCIEACGVDFAYVDILANPDIRQVLPQFSDWPTFPQLYVKGELIGGSDIIAEMFQQGELEPMLRDAVAA

SEQ ID NO: 29147 - protein, 556 aa, Legionella pneumophila subsp. pneumophila str. Philadelphia 1
MDIRRIVLYMALALIGLSLWNAWQIDYPAKQPVEEKTASQLTSDGHLLPQIIPSNAEQPVTLKAEEKASSGKQLIQVKTDVLDVDIDLKNGDIVKGLLLDYPLSVEDKNKPFPLLQNQASQRYVANSSLFVLDGQTPQSLDFDFTSEKEYYELKPDQNQLIVTLNGKSEDGLDVKKEFVFTKGSYLIEVNYKIANTGNSLWKGYFNTQLLRSSPKEDKSSIFHIGSYTGASFSNPGKNRYQKVSFSDMSKSNLDVDAKGGWIAMQQHYFLSAWVPNADSENKFYTLATDKDYTIGAVSQPITVKPKEDKIVGSKLYIGPEITSVLKGISPSLDLTVDYGILWFLSSLLFSLMKAIYTVVGNWGWSIVLVTVLIKLAFYRLSATSYKSMASMRKLQPKLQALRERYGDDKAKISQATMELYKQEKVNPLGGCLPILIQIPVFIALYWVLLESVELRQAPFIFWINDLASADPYHVLPLIMGATMLIQQKLNPAPADPMQAKVMMFLPILFTGLFWNFPSGLVLYWIVNNTLSILQQWYITRKYSDEKPAKKVVATAK

SEQ ID NO: 29148 - protein, 385 aa, Emericella nidulans
ALFTFSDGRYCGANLDRNGLRPCRFYVTDDDRIICASEVGAVDIDQERVVQKGRLQPGKMLLVDTVAGRIIDDSELKYTVAHRHDFSRWLKKELVKLPAITEKLVEQNMDLRHDLDNTTVQNDPRLKAFGYSFEQVTLLLGPMGADSKEALGSMGNDAPLACIAKQPRLLYEYFRQLFAQVTNPPIDPIREAVVMSLECYVGPQGNLLEMDPSQCRRLLLPSPILSIPEFNALKNINTVHKDWTVRLIDITFEKKKGVPGYIEALDRICDAATEAIQQGDKILILSDRATSADRVPVSALLATGLVHHHLVRNKWRSLAALIVETAEAREVHHMCVLVGYGADGINPYLAMECILKMNREKLIRKELSDEKVIENYRASCDGGIL

SEQ ID NO: 29149 - protein, 291 aa, Arabidopsis thaliana
MMKRLSSSDSVGGLISLCPTTSTDEQSPRRYGGREFQSMLEGYEEEEEAIVEERGHVGLSEKKRRLSINQVKALEKNFELENKLEPERKVKLAQELGLQPRQVAVWFQNRRARWKTKQLEKDYGVLKTQYDSLRHNFDSLRRDNESLLQEISKLKTKLNGGGGEEEEEENNAAVTTESDISVKEEEVSLPEKITEAPSSPPQFLEHSDGLNYRSFTDLRDLLPLKAAASSFAAAAGSSDSSDSSALLNEESSSNVTVAAPVTVPGGNFFQFVKMEQTEDHEDFLSGEEACE

SEQ ID NO: 29150 - protein, 96 aa, Glycine canescens
LYAGINISGTNGEVMPGQWEYQVGPSVGIEAGDHIWASRYILERITEQAGVVLSLDPKPIEGDWNGAGCHTNYSTKSMREDGGFEVIKKAILNLSL

SEQ ID NO: 29151 - protein, 444 aa, Mycosphaerella graminicola
MASLALRRSALTTTTTSKSIMTSSSPAQRLQAVQRHFSSTSPRPKEIQEAYILSAVRTPTALFNGSFSSVSAPQLGATAIKEAIKRSSIPQEKISHVYMGNVISAAAGQAPARQAAIFAGLPSSVEATTINKVCASGMKAVAIAAQQVELGQEEALVAGGMENMSRVPYYTPRGPQLPAFGNLSMEDGLMKDGLWDVYNNIHMGNCAESTAKKYDISREEQDEYAVLSFKRAQEAWKNKLFDEEIVPVVVKGKKGDTTISEDEGYNRLKPEKVATLKPAFDRSGNGTVTAANASSMNDGASALVITNKELAKKYGGGKRVLARIVSYADAAVDPIDFPVAPAKVVPIALERAGITADQVKVWEFNEAFAAVVKANAKILNLGIDNVNPRGGAISLGHALGSSGARILVTLLHQLKKGEYGCAAICNGGGAASGMVIQMVDAEDL

SEQ ID NO: 29152 - protein, 324 aa, Oryza sativa Japonica Group
MRGLRSRILRTLQSFPNAVNVQPGLLLPAPDVQPSPPPPPKAPCRSQEEQPDGGGGGGGDDKENVSPEVAPRKAKKMRVSLGAAEDEAAAYYRRPDPATATLFDPDLLAAFRGAVDAYARALQEAKRRDDDDNDGFFLLDEEEGCGVAGGVGFGVDEDPLEGFETRCPPGGERAVVLYTTSLRGVRKTFEDCATVRRLLEGLRVAFLERDVSMHAPYRDELRALLVGLDDAAVPPRLFVDGRYLGGANEVVTLHEQARLRPVLRRAPRRGAGDAACAVCGGAWFVVCGACSGSHRLYDAAAAAGGRVPCTGCNENGLVPCPLCS

SEQ ID NO: 29153 - protein, 315 aa, Hordeum vulgare
MASSSYTSLLVLVALVTAASAQLSPTFYDTSCPRALATIKSGVMAAVTSDPRMGASLLRLHFHDCFVQGCDASVLLSGMEQNAIPNAGSLRGFGVIDSIKTQIEAICKQTVSCADILTVAARDSVVALGGPSWTVPLGRRDSIDANENEANTDLPGFNSSRAELEAAFLKKGGLNTVDMVALSGAHTIGQAQCSTFRARIYGGDTNINTAYAASLRANCPQTVGSGDGSLANLDTTTANTFDNAYYTNLMSQKGLLHSDQVLFNNDTTDNTVRNFASNPAAFSSAFTTAMIKMGNIAPKTGTQGQIRLSCSRVNS

SEQ ID NO: 29154 - protein, 583 aa, Spinacia oleracea
MPAIFVRSSSSSSSTFISTTDVFTNDDDIERIKRLQNGSDVSRVALEGEKGREVDLTPPAVEAIAESFGEWLIAKLRDDDDYKEKQGVDVVKVSLGKDPRVTGAKLSVAVFSGLARAGCLAFDMGLATTPACFMSTVFPHFSYHGSIMMTASHLPYTRNGLKFFTRRGGLTSLEVEEICDRAARKYANRQAKVSLTLINPPTKVNLMSAYANHLRDIIKERINHPTNYDTPLQGFQIIVNAGNGSGGFFTWDVLDKLGADTFGSLYLNPDGMFPNHIPNPEDKKAMALTRAAVLENSADLGIVFDTDVDRSGVVDNKGNPINGDKLIALMSSIVLKEHPETTIVTDARTSIGLSRFITNRGGKHCLYRVGYRNVIDKGVQLNEDDIETHLMMETSGHGALKENYFLDDGAYMVVKIIIEMVRMRLSGSSEGIGNLIEDLEDPVESVELRMDVISEPRYAKTKAVEVIDTFRRYVEEDKLEGWMLDSCGDCWVGEGCLVDLNENPTAIDAHMYRVKVLDNEQNEHGWVHLRQSVHNPNIAVNMQSSIPGGCRSMTEIFKDKFLFASGLDKVVDTSQIEQYVKEH

SEQ ID NO: 29155 - protein, 479 aa, Schizosaccharomyces pombe
MSDAHDTIKSLTGDASNSRRLIVVSNRLPITIKRKDNGTYDFSMSSGGLVSALSGLKKLMTFQWLGWCGQEIPEDEKPMIIQRLQDECSAIPVFLDDETADRHYNGFSNSILWPLFHYHPGEINFDEENWEAYRAANYAFAEAIVKNLQDGDLIWVQDYHLMVLPQMLRELIGDKFKDIKIGFFLHTPFPSSEIYRVLPVRNEILEGVLNCDLVGFHTYDYARHFLSACSRILNLSTLPNGVEYNGQMVSVGTFPIGIDPEKFSDALKSDVVKDRIRSIERRLQGVKVIVGVDRLDYIKGVPQKFHAFEVFLEQYPEWVGKVVLVQVAVPSRQDVEEYQNLRAVVNELVGRINGRFGTVEYTPIHFLHKSVRFEELVALYNVSDVCLITSTRDGMNLVSYEYICTQQERHGALILSEFAGAAQSLNGSIVINPWNTEELANSIHDALTMPEKQREANENKLFRYVNKYTSQFWGPKLCR

SEQ ID NO: 29156 - protein, 350 aa, Acinetobacter calcoaceticus
MSYQVTIEPAGTIIQVEEDQTILDAALRQGVWLPFACGHGTCGTCKVQVTDGFYDVGEASPFALMDIEREENKVLACCCKPESDMVIEADVDEDEDFLGYLVQDYQAKVIEITDLSPTIKGVRLQLDRPMQFQAGQYINIQLPNIEGTRAFSIANTPSDKNLIELHIRKVQGGAATRYVHDELSVGEEMALSGPYGQFFVRKSDQQNVIFIAGGSGLSSLQSMILDLLEHGDTRIIYLFQGARDVAELYNREKFEQLVKEYPNFRYIPALNAPKPEDQWTGFTGYVHEAVANYFENKCSGHKAYLCGPPPMIDAAISTLMQSRLFEKDIHTERFLSAADGANGQSRFGTF

SEQ ID NO: 29157 - protein, 477 aa, Nicotiana tabacum
MISSSPASPSSYLAFPPSLSPSVLLDSPVLFNNSNTLPSPTTGSFGNLNSKEDNSRISDFSFQSKAATSSSMFQSSAPRNSLEDLMTRQQHANQQNEFSTVKTRGVKSEVAPIQSFSQEKMQSNPAPVHYTHPSQYVREQKAEDGYNWRKYGQKQVKGSENPRSYYKCTFPNCPTKKKVERNLDGHITEIVYKGNHNHPKPQSTRRSSSQSIQNLAYSNLDITNQSNAFLDNAQRDSFAGTDNSSASFGDEDIDQGSPISKSGEDDGNEPEPKRWKGDNENEVISSASRTVREPRIVVQTTSDIDILDDGYRWRKYGQKVAKGNPNPRSYYKCTFTGCPVRKHVERASHDLRAVITTYEGKHNHDVPAARGSGSYAMNKPPSGNSNNSMPVVPRPSMLANNSNQGMNFNDTFFNTRVQTTQNQPPITLQMLQSSGNSSYSGFDTSSGSYMNQMQPMNNIKPISKEEPKDDFFSSFLN

SEQ ID NO: 29158 - protein, 355 aa, Saccharomyces cerevisiae
MVIDLEHVVDYIMHIDSQLQLHKASPAKMNSESREDMAINSIKLLAGNSHPDLAEQISKKLGIPLSKVGVYQYSNKETSVTIGESLRDEDVYIIQTGIGEQEINDFLMELLILIHACQIASARKITTVIPNFPYARQDKKDKSRAPITAKLVANLLQTAGADHVITMDLHASQIQGFFHIPVDNLYAEPSVLNYIRARKTDFDNAILVSPDAGGAKRVAALADKLDLNFALIHKERQKANEVSKMVLVGDVTNKSCLLVDDMADTCGTLVKACDTLMEHGAKEVIAIVTHGIFSGSAREKLRNSRLSRIVCTNTVPVDLDLPIADQIDISPTFAEAIRRLHNGESVSYLFTHAPV

SEQ ID NO: 29159 - protein, 203 aa, Bifidobacterium longum DJO10A
MHIGNGASASAEVSGKPVETSMGLTPLEGLMMGGRTGDIDPAVVFHLIRNAHMNVDELDALFNKRSGMMGMTGYGDLREVHRLVSEGNEDAKLALDVYVHRIVSYIGNYTYQMGGCDVITFTAGVGENDDVVRKMVCDKLAPFGVKLDEEKNATRSKEPRVISTPDSSVIIAVIPTNEELAIARKSAAIAEAGTDTYGNTFAK

SEQ ID NO: 29160 - protein, 401 aa, Bifidobacterium longum DJO10A
MAQWQTLSDRINTVAPSATLAVDSKAKAMKAAGLDVVGFGAGEPNFPTPANVVKAAADACLDPKNYKYTPTPGLPELREAIAAKMLRDSGYEVNADQVVVTNGGKQAVYESFQILLNDGDEVIIPAPYWTSYPEAVKLAGGVPVEVFAGADMNFEPSLEALEAARTEHTKAIIVNSPNNPTGAVWKPETVEAIGRWAVEHHIWVISDEIYEHLNYDDAHTTYIGAAVPECRGQLLVLNGVAKTYAMPGWRVGWMVAPLEVAKAAAKLQGHMTSNVANISQRAALAAVAGPLDEVHEMRKAFDARRRAIVTALNDIEGVNCPTPTGAFYAFADITALLGKPLGPKGTVSDTSADFAAALLDEAHVAAVPGEAFGAPGYLRFSYALADEDLAEGMRRFKEWAN

SEQ ID NO: 29161 - protein, 636 aa, Bacteroides fragilis YCH46
MKTFEELGVSPEIRKAIEEMGYENPMPVQEEVIPYLLGENNDVVALAQTGTGKTAAFGLPLIQKINVKNRIPQSLVLCPTRELCLQIAGDLNDYSKYIDGLKVLPVYGGSSIDSQIRSLKRGVHIIVATPGRLLDLMERKTVSLATVTNVVMDEADEMLNMGFTDSINAILADVPQERNTLLFSATMSPEIARISKNYLHNAKEITIGRKNESTSNVKHVVYTVHAKDKYAALKRIVDYYPQIYGIIFCRTRKETQEIADKLMQEGYNADSLHGELSQAQRDTVMQKFRIRNIQILVATDVAARGLDVDDLTHVINYGLPDDTESYTHRSGRTGRAGKTGTSIAIINLREKGKMREIERIIGKKFIAGEMPTGKQICEKQLLKVIDDLEKVKVNEEDINDFMPEIYRKLEWLSKEDLIKRMVSHEFNRFVDYYRNREEIEVPTDSRSERAGKSREGKSSRQAEPGYTRLFINLGKMDNFFPHELITLLNNNTRGRVELGRIDLMKNFSFFEVEEKQAQNVVKALNRTNWNGRKVTVEVAGEEASTEHKGRGKRNEGNDQGGRGRSSAPSADRKERGKGSKDSKQADSRKGKKPSREERGYSAARGPKGKDEWKQFFKDAEPDFSEEGWARRKPKKS

SEQ ID NO: 29162 - protein, 201 aa, Bacteroides fragilis YCH46
MIESIQELLQKEAQAVLNIPVTDAYEKAVELIVEQIHRKKGKLVTSGMGKAGQIAMNIATTFCSTGIPSVFLHPSEAQHGDLGILQENDLLLLISNSGKTREIVELTQLAHNLNPGLKFIVITGNPDSPLASESDVCLSTGHPAEVCTLGMTPTTSTTVMTVIGDILVVQTMKRTEFTIEEYSKRHHGGYLGEKSRKLCVK

SEQ ID NO: 29163 - protein, 611 aa, Bacteroides fragilis YCH46
MKEFFQLMRRFVSPYKKFLGWAVFLNLLSAVFNIFSFTLLIPILQILFKMDNKVYEFIPWDAAGEGLKDIAVNNFYYYVTRMIEINGPSLTLLFLGLFLAFMTLLKTSCYFASSAVMIPLRTGVVRDIRIMVYSKVMSLPLGFFSEERKGDIIARMSGDVGEVENSITSSLDMLIKNPILIVMYFGTLIITSWQLTLFTLLVVPGMGWIMGKVGKKLKRQSLEAQAKWSDTMSQLEETLGGLRIIKAFIAEQKMINRFTECSNEFRDATNRVAMRQALAHPMSEFLGTLLIVVVLWFGGSLILGNHSSIDAPTFIFYMVILYSVINPLKEFSKAGYNIPKGLASMERVDKILKAENKIVEIPNPKPLNGLEEQVEFKDISFSYDGKKEVLQHINLTVPKGKTVALVGQSGSGKSTLVDLLPRYHDVQEGTITIDGVNIKDVRISDLRSLIGNVNQEAILFNDTFFNNIAFGVENATMEQVIEAAKIANAHDFIMEKEDGYHTNIGDRGSKLSGGQRQRISIARAILKNPPILILDEATSALDTESERLVQEALERLMKTRTTIAIAHRLSTIKNADEICVLYEGEIVERGKHEELLAKNGYYKRLNDMQSL

SEQ ID NO: 29164 - protein, 250 aa, Bacteroides fragilis YCH46
MLEIKDLHASINGKEILKGINLTVKPGEVHAIMGPNGSGKSTLSSVLVGNPAFEVTKGSITFYGKNLLELSPEDRSHEGIFLSFQYPVEIPGVSMVNFMRAAVNEQRKYKGLPALTASEFLKLMREKRAVVELDNKLANRSVNEGFSGGEKKRNEIFQMAMLEPRLSILDETDSGLDIDALRIVAEGVNKLKTPDTSCIVITHYQRLLDYIKPDIVHVLYKGRIVKTAGPELALELEEKGYDWIKKELGE

SEQ ID NO: 29165 - protein, 339 aa, Bacteroides fragilis YCH46
MLNLINSIVARAQANRQRIVLPEGTEERTLKAANQILTDEVADLILLGNPEEINAAAAKWGLGNINRATIIDPENHPKKEEYAQLLCELRKKKGMTIEEARKLVLDPLYLGCLIIKSGDADGQLAGARNTTGDVLRPALQIIKTSPGITCVSGAMLLLTHAPECGQNGLLVMGDVAVTPVPDASQLAQIAVCTARTAQAVAGIAEPKVAMLSFSTKGSAKHENVDKVVEALKLAKEMAPDLNIDGEMQADAALVPSVGASKAPGSPVAGEANVLIVPSLEVGNISYKLVQRLGHADAVGPILQGIARPVNDLSRGCSIEDVYRMIAITANQAIAAKNGK

SEQ ID NO: 29166 - protein, 398 aa, Bacteroides fragilis YCH46
MKVLVLNCGSSSIKYKLFDMDSKEVIAQGGIEKIGLKDSFLKLTLPNGEKKILEKDIPEHTVGVEFILNTLVSPEYGAIQSLEEINAVGHRMVHGGERFSKSVLLTKEVLEAFAACNDLAPLHNPANLKGVDAITAILPNVPQIGVFDTAFHQTMPEHAYLYAIPYELYKKYGVRRYGFHGTSHRYVSQRVCEYLGIKPEGLKLITCHIGNGGSIAAIKDGKCIDTSMGLTPLEGLMMGTRSGDIDAGAVTFIMDKEGLTTTGISNLLNKKSGVAGMMNGSSDMRDLEAAVAKGDPQAILTEQMYFYRIKKYIGAYAAALGGVDVILFTGGVGENQATCRAGVCEGLEFLGVKLDPEKNKVRGEEAIISTDDSRVKVVVIPTDEELLIASDTMAILDK

SEQ ID NO: 29167 - protein, 401 aa, Bacteroides fragilis YCH46
MEQKKKVVVAFSGGLDTSFTVMYLAKEKGYEVYAACANTGGFSEEQLKQNEENAYKLGAVKYVTLDVTQEYYEKSLKYMIFGNVLRNGTYPISVSSERIFQALAIARYAKEIGAEAIAHGSTGAGNDQIRFDMTFLVMTPGVEIITLTRDMALSRQEEIDYLNKNGFEADFTKLKYSYNVGLWGTSICGGEILDSAQGLPETAYLKQVTKEGSELLRLEFKNGELHAVNGEVFEDKIAAIQKVEEIGAAYGIGRDMHVGDTIIGIKGRVGFEAAAPMLIIGAHRFLEKYTLSKWQQYWKDQVANWYGMFLHESQYLEPVMRDIEAMLQESQRNVNGTAILELRPLSFSTVGVESQDDLVKTKFGEYGEMQKGWTAEDAKGFIKVTSTPLRVYYANHKDEEV

SEQ ID NO: 29168 - protein, 397 aa, Bacteroides fragilis YCH46
MNQLSDRLNSLSPSATLAMSQKSAELKAQGVDVINLSVGEPDFNTPDHIKEAAKKAVDDNFSRYSPVPGYPALRNAIVEKLKKENGLEYTAAQISCANGAKQSVCNTIMVLVNPGDEVIVPAPYWVSYPEMVKLAEGTPVIVTAGIEQDFKITPAQLEAAITPKTKALILCSPSNPTGSVYSKEELAGLAAVLAKYPQVIVVADEIYEHINYIGKHQSIAQFPEMKDRTVIVNGVSKAYAMTGWRIGFIAGPEWIVKACNKLQGQYTSGPCSVSQKAAEAAYTGSQAPVEEMRQAFERRRDLIVKLAKEVPGFEVNVPEGAFYLFPKCSSFFGKSAGDRKIENSDDLAMYLLEDAHVACVGGTSFGAPECIRMSYATSDENIVEAIRRIKEALAKLK

SEQ ID NO: 29169 - protein, 811 aa, Bacteroides fragilis YCH46
MKVMKFGGTSVGSVNSILSVKKIVESAGEPVIVVVSALGGITDQLISTSRMAAMGDAAYEGAYREIVRRHEEMVQGVIPAGETQTLLHYQVNELLDELKDIFQGIYLIKDLSPKTSDTIVSYGERLSSLIASRLIQGAVWFDSRTFIKTEKKHNKHTLDTELTNRLVREAFKEIPRVSLVPGFISSDKVSGDVTNLGRGGSDYTAAVIAAALDADSLEIWTDVDGFMTADPRVISTAYTISELTYVEATELCNFGAKVVYPPTIYPVCHKNIPILIKNTFNPDARGTVIKQHVDHTKSKAIKGISSINDTSLITVQGLGMVGVIGVNYRIFKALAKNGISVFLVSQASSENSTSIGVRNADADLACEVLNEEFAKEIEMGEISPIQAEKNLATVAIVGENMKHTPGIAGKLFGTLGRNGINVIACAQGASETNISFVVDSKSLRKSLNVIHDSFFLSEYQVLNLFICGVGTVGGSLVEQIRQQQKKLMVENGLKLHVVGIIDATKAMFSRAGFDLANYREELKEKGVDSSLDTIRDEIIGMNIFNSVFVDCTASPDIASLYKDFLQHNISVVAANKIAASSAYENYRELKLIARQRGVKYLFETNVGAGLPIINTINDLIHSGDKILKIEAVLSGTLNYIFNKISADVPFSRTIKMAQEERYSEPDPRIDLSGKDVIRKLVILAREAGYKLEQEDVEKNLFVPNDFFEGSLEDFWKKVPSLDADFEARRKVLESENKHWRFVAKLENGKASVGLQEVDRNHPFYGLEGSNNIILLTTERYKEYPMMIQGYGAGAGVTAAGVFADIMSIANV

SEQ ID NO: 29170 - protein, 555 aa, Bacteroides fragilis YCH46
MGLFIKKPFEALLAEANASGSKSLKRVLGPWSLVALGVGVIIGAGLFSITGTVAAGYTGPAITLSFAIAALGCCFAGLCYAEFASMIPVAGSAYTYSYATMGELIAWIIGWDLVLEYTVAATTVSISWSRYLVVFLEGLDIHLPQALTACPWDGGIVNIPAFLIVVLMSIFLIRGTEGSSIFNGIVVFLKVSVIAIFVVLGWKYINADNYTPYIPANTGTLGEYGLSGVLRGAAIVFFAFLGFDAVSTAAQETKNPKRNMPIGILVSLLVCTVLYMLFAHVMTGVAHYTEFSGQQGIAPVAIAIEHMGHADATGIIHPDYPWLNRAIVLAILFGYCSVIMVTLLGQSRVFLSMSHDGLLPPFFSHINEKFRTPARSNLLFMLIVGLLAAFVPARLAGEMTSIGTLMAFTLVCAAVLVVRKTMPNVPRSFKTPFVPLVPILGILTCLCMMLFLPADTWIRLVLWMLIGLDIYVGYGMKHSKLEHGVKNRRGQSALNMIGIALSLLCVITGLWHQQTVGWNESKVLLIISFVFAFTHCAYYMMRIWKGTTKQTNDNG

SEQ ID NO: 29171 - protein, 664 aa, Bacteroides fragilis YCH46
MPKFNLNWMYMIIALMLLGLYFANGSSSVSKNISYDEFQQYVRDGYVSKVIGYDDNSVEIYIKPQYVGTVFKQDSTRVGRNPMITTEAPSRENLDNFLQKEKEETHFDGSVSYDKKKDYFSAILWNVLPIVFLIALWIFFMRRMGSGASGGAGGVFNVGKSKAQLFEKGGSIKVTFKDVAGLAEAKQEVEEIVEFLKEPQKYTDLGGKIPKGALLVGPPGTGKTLLAKAVAGEANVPFFSLAGSDFVEMFVGVGASRVRDLFKQAKEKAPCIVFIDEIDAVGRARGKNPAMGGNDERENTLNQLLTEMDGFGSNSGVIILAATNRVDVLDKALLRAGRFDRQIHVDLPDLNERKEVFGVHLRPIKIDDTVDVDLLARQTPGFSGADIANVCNEAALIAARHGKKFVGKQDFLDAVDRIIGGLEKKTKITTEAERRSIALHEAGHASISWLLEYANPLIKVTIVPRGRALGAAWYLPEERQITTKEQMLDEMCATLGGRAAEDLFIGRVSSGAANDLERVTKQAYGMIAYLGMSEKLPNLCYYNNDEYSFQRPYSEKTAELIDEEVKRMVNEQYERAKQILSEHKEQHNELAQLLIDKEVIFAEDVERIFGKRPWASRSEEIMAANNKQENAVHPADGEDVDTTTPQATESQEGNTQQESAASQN

SEQ ID NO: 29172 - protein, 117 aa, Bacteroides fragilis YCH46
MMIEVLKSKIHCARVTEANLNYMGSITIDENLLDAANMIAGEKVYIADNNNGERFETYIIKGERGSGKICLNGAAARKVQPDDIVIIMSYALMDFEEAKSFKPTVIFPDPATNSVVK

SEQ ID NO: 29173 - protein, 105 aa, Bacteroides fragilis YCH46
MYAIVEINGQQFKAEAGQKLFVHHIQNAENGATVEFDKVLLVDKDGNVTVGAPTVDGAKVVCQIVSSLVKGDKVLVFHKKRRKGHRKLNGHRQQFTELTITEVVA

SEQ ID NO: 29174 - protein, 386 aa, Bacteroides fragilis YCH46
MAESNFVDYVKIYCRSGKGGRGSTHMRREKYTPNGGPDGGDGGRGGHVILRGNRNYWTLLHLRYDRHAMAGHGESGSKNRSFGKDGADKIIEVPCGTVVYNAETGEYVCDVTEHGQEVILLKGGRGGLGNWHFKTATRQAPRFAQPGEPMQEMTVILELKLLADVGLVGFPNAGKSTLLSAISAAKPKIADYPFTTLEPNLGIVSYRDGQSFVMADIPGIIEGASEGKGLGLRFLRHIERNSLLLFMIPADSDDIRKDYEVLLNELKTFNPEMLDKQRVLAITKSDMLDQELMDEIEPTLPEGIPHVFISSVSGLGISVLKDILWTELNKESNKIEAIVHRPKDVSRLQQELKDMGEDEELDYEYEDDGDEDDLDYEYEEEDWEDK

SEQ ID NO: 29175 - protein, 862 aa, Bacteroides fragilis YCH46
MNFNNFTIKSQEAVQEAINLAQSRGQQAIETAHILYGVMKVGENVTNFIFQKLGLNGQQISLVLDKQIDSFPKVSGGEPYLSREANEVFQKATQYSKEMGDEFVSLEHLLLALLTVKSTVSTILKDAGMTEKELRGAISELRKGEKVTSQSSEDNYQSLEKYAINLNEAARSGKLDPVIGRDEEIRRVLQILSRRTKNNPILIGEPGTGKTAIVEGLAHRILRGDVPENLKNKQVYSLDMGALVAGAKYKGEFEERLKSVVNEVKKSEGNIILFIDEIHTLVGAGKGEGAMDAANILKPALARGELRSIGATTLDEYQKYFEKDKALERRFQIVQVDEPDNLSTISILRGLKERYENHHHVRIKDDAIIAAVELSSRYITDRFLPDKAIDLMDEAAAKLRMEVDSVPEGLDEISRKIKQLEIEREAIKRENDEPKLQTIGKELAELKEQEKSYKAKWQSEKSLMDIIQQNKVEIENLKFEADKAEREGNYGKVAEIRYGKLQELHKEIEDTQKKLHEMQGDTAMIKEEVDAEDIADVVSRWTGIPVSKMMQSEKDKLLHLEEELHQRVIGQDEAIAAVSDAVRRSRAGLQDPKRPIGSFIFLGTTGVGKTELAKALAEFLFDDETMMTRIDMSEYQEKHSVSRLVGAPPGYVGYDEGGQLTEAIRRKPYSVVLFDEIEKAHPDVFNILLQVLDDGRLTDNKGRVVNFKNTIIIMTSNMGSSYIQSQMEKLNGANNEEVVEETKKEVMNMLKKTIRPEFLNRIDETIMFLPLTEKDIKQIVLLQIKSVQKMLAGNGVELELTDAALDFLSQVGYDPEFGARPVKRAIQRYLLNDLSKKLLAQEVDRSKAIIVDAQGDGLVFRN

SEQ ID NO: 29176 - protein, 639 aa, Bacteroides fragilis YCH46
MGKIIGIDLGTTNSCVSVFEGNEPVVIANSEGKRTTPSIVAFVDGGERKVGDPAKRQAITNPTRTIFSIKRFMGENWDQVQKEIARVPYKVVKGDNNTPRVDIDGRLYTPQEISAMILQKMKKTAEDYLGQEVTEAVITVPAYFSDSQRQATKEAGQIAGLEVKRIVNEPTAAALAYGLDKAHKDMKIAVFDLGGGTFDISILEFGGGVFEVLSTNGDTHLGGDDFDQVIIDWLVQEFKNDEGADLTQDPMAMQRLKEAAEKAKIELSSSTSTEINLPYIMPVGGVPKHLVKTLTRAKFESLAHNLIQACLEPCKKAMQDAGLSNSDIDEVILVGGSSRIPAVQKLVEDFFGKTPSKGVNPDEVVAVGAAVQGAVLTDEIKGVVLLDVTPLSMGIETLGGVMTKLIDANTTIPARKSETFSTAADNQTEVTIHVLQGERPMAAQNKSIGQFNLTGIAPARRGVPQIEVTFDIDANGILKVSAKDKATGKEQAIRIEASSGLSKEEIEKMKAEAEANAEADKKEREKIDKLNQADSLIFQTETQLKELGDKLPADKKAPIEAALQKLKDAHKAQDMTTIDSAMAELNTAFQAASAEMYAQSGAQGGAQAGPDMNAGQSNAGQNNGKQDDNVQDADFEEVK

SEQ ID NO: 29177 - protein, 369 aa, Bacteroides fragilis YCH46
MIIGVPKEIKNNENRVGMTPSGVAELVKRGHTVYIQHTAGENSGFQDEAYTAVGAQILPTMEETYAMAQMIVKVKEPIAPEYRLIRKGQLLFTYFHFASDRELTLAMIENGSVCLAYETVEKADHSLPLLIPMSEVAGRMAIQEGARFLEKPQGGKGILPGGVPGVKPAKVLILGGGIVGSNAAQMAAGLGADVTIADINLSRLRYLSETLPKNVKTLYASEVRLKKELPDVDLVVGSVLIPGDKAPHLITRDMLKMMQPGTVLVDVAIDQGGCFETSHPTTHSEPTYVVDGIVHYAVANIPGAVPYTSTLALTNATLPYVIALANKGWRKACKEDPALALGLNVVEGKVVYRAIADVFGLKYEQLNLE

SEQ ID NO: 29178 - protein, 427 aa, Bacteroides fragilis YCH46
MTFENLNLIEPILKALRQEGYTSPTPIQEQSIPILLQGKDLLGCAQTGTGKTAAFSIPILQKLYKTDHRKGIKALVLTPTRELAIQIGESFEAYGRYTGLKHAVIFGGVGQKPQTDALRSGIQILVATPGRLLDLISQGFISLSSLDFFVLDEADRMLDMGFIHDIKRILKLLPARRQTLFFSATMPPEIETLANSMLTKPEKVEVTPASSTVDIISQQVYFVEKKEKKDLLIHLLKDTSIESVLIFTRTKYGADKLARVLTKAGIGAEAIHGNKTQNARQRALTNFKNHTLRALIATDIAARGIDVDQLSHVINYELPNVPETYVHRIGRTGRAGHEGVAISFCESEELPYLKDIQKLIGKNIPVVKDHPFVTTEGIKAQEEKQEEIKVKAKANKTYRGSRANGDFWRRKKQKTNQPSSTKQEKRK

SEQ ID NO: 29179 - protein, 318 aa, Bacteroides fragilis YCH46
MKIVVLDGYAANPGDLNWDELRTLGECEIYDRTAPDEVLERSKDAEAILTNKVVITAEHMASLPNLKYIGVIATGYNIIDVAAAKERGITVTNIPAYSTPSVGQMVFAHILNITQRVQHYADEVREGRWTQSQDFCYWDTPLIELLGKKIGLIGLGQTGYNTARIAIGFGMKVWAYTSKSRLQLPPEIRKAELDQIFRECDIVSLHCPLTESTRDLVNTRRLELMKPNAILINTSRGPLVNEHDLAEALNNYKIYAAGLDVLSTEPPRADNPLLTARNCFITPHIAWATSAARERLMAILVDNLKAYIGGKPVNNVAK

SEQ ID NO: 29180 - protein, 224 aa, Bacteroides fragilis YCH46
MAKILLVEDEVNIASFIERGLKEFGHSVSVANDGDAGWELIRQEAFDLLILDIIMPKMNGLELCRLYRQQYGYLTPVIMLTALGTTEDIVKGLDSGADDYLVKPFSFQELEARIKAILRRGREDSVQQLVCDDLVLNCNTRRARRKEVEIELTVKEYRLLEYFMTHQGMVLSRLTLLKDVWDKNFDTNTNVVDVYVNYLRGKIDKEHDKKLIHTVVGSGYIMYA

SEQ ID NO: 29181 - protein, 305 aa, Bacteroides fragilis YCH46
MVFSGTNSRYLAEKICASLNCPLGNMNITHFADGEFAVSYEESIRGAHVFLVQSTFPNSDNLMELLLMIDAAKRASAKSVVAVVPYFGWARQDRKDKPRVSIGAKLVADLLSVAGIDRLITMDLHADQIQGFFNIPVDHLYASAVFLPYIQSLKLDELVIATPDVGGSKRASTFSKYLGVPLVLCNKSREKANEVASMQIIGDVKGKNVVLIDDIVDTAGTITKAANIMLEAGANSVRAIASHCVMSDPASFRVQESGLTEMVFTDSIPYSKKCVKVKQLSIADMFAETIKRVMNNESISSQYII

SEQ ID NO: 29182 - protein, 618 aa, Bacteroides fragilis YCH46
MDKNTITGLVLIGILLVGFSFLSRPSEEQIAAQKRYYDSIAVVQQQEEALRAKTEAALANEKEETAADSASLFFNATKGKEAFTTIQNNLVEITLDNKGGRVYSALLKNYMGQDKKPVVLFNGSDASMNFNFYNKKGALQTKDFYFEAVNKTDSSVTMRLAADSASYIDFIYTLKPDNYLMSFVIKATGMDGKLAASTNYVDISWSQRARQIEKGYTYENRLADLTYKYTGDDVDNLSASKDDEKSVSERLDWIAFKNQFFSSVFIAEQDFEKTTVKSKMEKQGSGYIKDYSAEMSTFFDPTGKQPTDMYFYFGPNHYKTLTALDKGREEKWELNNLVYLGWPLIRWINKWITINVFDWLSGWGLSMGIVLLLLTIMVKIVVFPATWKTYMSSAKMRVLKPKIDEINKKYPKQEDAMKKQQEVMGLYSQYGVSPMGGCLPMLLQFPILMALFMFVPSAIELRQQSFLWADDLSTYDAFITFPFHIPFLGNHLSLFCLLMTVTNILNTKYTMQQQDTGAQPQMAAMKWMMYLMPIMFLFVLNDYPSGLNYYYFISTLISVVTMIILRRTTDENKLLTELEAKKKDPKQMKKTGFAARLEAMQKQQEQLAKERANKQNKK

SEQ ID NO: 29183 - protein, 558 aa, Bacteroides fragilis YCH46
MCGIAGIFNIKIQSRELRNKALRMARKIRHRGPDWSGMYCGGSAILAHERLSIVDPQSGGQPLYSSDRKQVLAVNGEIYNHRDIRAQYAGRYEFRTGSDCEVILALYRDKGIHFLEELNGIFAFALYDEEKDEYLIARDPIGVIPLYIGKDAEGHVYFGSELKALEGFCDEYEPFLPGHYYHSKERTMKRWYTRDWMEYKEENDKQADSRSPTRQIQDALENAVHRQLMSDVPYGVLLSGGLDSSVISAIAKKYAAKRIETDGASDAWWPQLHSFAIGLKGAPDLIKAREVAEYIGTVHHEINYTLQEGLDAIRDVIYFIETYDVTTVRASTPMYLLARVIKSMGIKMVLSGEGADEIFGGYLYFHKAPDARAFHEETVRKLSKLHLYDCLRANKSLAAWGVEGRVPFLDKEFLDVAMQLDPEIKMAPGKVIEKKVLREAFADMLPSGIAWRQKEQFSDGVGYSWIDTLKEITATAVSDEQMAHAAERFPIHTPMNKEEYYYRSIFEEHFPSESAARSVPSIPSVACSTAEALAWDTTFKNLNDPSGRAVKGVHEEAY

SEQ ID NO: 29184 - protein, 582 aa, Bacteroides fragilis YCH46
MTDMTDIKNEEAGEKKSLNFIEQAVENDLKAGKNGGKVQTRFPPEPNGYLHIGHAKAICLDFGIAAAHGGVCNLRFDDTNPTKEDMEYVEAIQEDIRWLGFQWGNVYYASDYFQQLWDFAVTLIKEGKAYVDEQTSEQIAQQKGTPTQPGVESPYRNRPIEESLALFEKMNSDEAKEGSMVLRAKIDMASPNMHFRDPIMYRILHVAHHRTGTQWKAYPMYDFAHGQSDYFEGVTHSLCTLEFVPHRPLYDLFIDWLKEGKDLDDNRPRQTEFNKLNLNYTLMSKRNLLILVKEGLVNDWDDPRMPTLCGFRRRGYSPESIRKFIDKIGYTTYDALNDFALLESAVREDLNARATRVSAVLNPVKLIITNYPEGQVEELEAINNPEDPTAGSHTIEFSRELWMERDDFMEDAPKKYFRMTPGQEVRLKNAYIVKCTGCKKDENGTVTEVYCEYDPNTRSGMPDANRKVKGTLHWLSCNHCLPAEVRLYDRLWKVENPRDEMAAIREAKGCDALEAMKEMINPDSLTVLPHCYIEKYVADMPALSYLQFQRIGYFNIDKDSTPGHLVFNRTVGLKDTWGKINK

SEQ ID NO: 29185 - protein, 439 aa, Bacteroides fragilis YCH46
MKVLKFGGTSVGSAQRMKEVAKLITDGERKIVVLSAMSGTTNTLVEISDYLYKKNPEGANEIINKLEAKYKQHVDELYATEEYKQKGLEVIKSHFDYIRSYTKDLFTLFEEKVVLAQGELISTAMVNYYLQECGVKSVLLPALEYMRTDKNAEPDPVYIKDKLQAQLDLYPDAEIYITQGFICRNAYGEIDNLQRGGSDYTASLVGAAIHASEIQIWTDIDGMHNNDPRIVDKTAPVRQLHFEEAAELAYFGAKILHPTCIQPAKYANIPVRLLNTMDPHAPGTLISNDTEKGKIKAVAAKGNITAIKIKSSRMLLAHGFLRKVFEIFESYQTSIDMICTSEVGVSVSVDNTKHLNEILDDLKKYGTVTVDKDMCIICVVGDLEWENVGFEAKALDAMRDIPVRMISFGGSNYNISFLIRECDKKVALQSLSDMLFNGK

SEQ ID NO: 29186 - protein, 588 aa, Bacteroides fragilis YCH46
MAHGDHLKYSGKPKAGKKTFLRLISYVACDRRLLIVIGVLIVISIAANLTGSYMLRPIINDYILPGDFQGLVRILLFLAAIYLTGVAATYIEYILLNKIGQRTVTRMREELFGKMERLPVRYFDTHQHGDVMSRYTNDIDRISDALTDSLSDMLSSALTVIGIFCLMIFISPILTAVTLITVPLMFLSAKGIVKRSRKYFKAQQEALGMMNGYAEEMISGQKVVKVFGHEQKVETDFGILNQSLKDKSLKAQFYSGLMMPVMQNLNTLNYVIITIVGALLAIFRGFDVGGLAAFLQYSRQFGRPINELASLYNSIQAAIAGAERIFEIIDEAPEKADVPEAVTLKNIKGDVALKNVYFGYRPEKTILKGVSLHAPAGKKIALVGATGAGKTTILNLLPRFFDIQSGEITIDNHPIDRIERNSLRRSMAIVLQDTHLFTGTVRENIRFGRLSATDDEVVAAARLTAAHSFIKRLPQGYDTLLENDGANLSQGQRQLLNIARAAVADPAILLLDEATSNIDTRSEILIQRGLDQLMQGRTSLIIAHRLSTIRNADTILVLEHGEIIEQGSHQELLALKGKYYSLNEEQFK

SEQ ID NO: 29187 - protein, 218 aa, Bacteroides fragilis YCH46
MKFFIDTANLDQIREAHDLGVLDGVTTNPSLMAKEGIKGVENQRRHYVEICNIVQGDVSAEVIATDYEGMVREGKELAALNPHIVVKVPCIADGIKAIKHFSGKGIRTNCTLVFSTGQALLAAKAGATYVSPFVGRLDDICEDGVGLVADIVRMYRFYNYPTQVLAASIRSSKHIMECVEAGADVATCPLSAIKGLMNHPLTDAGLKKFLEDYKKVNE

SEQ ID NO: 29188 - protein, 762 aa, Bacteroides fragilis YCH46
MAKITKEAALLYHSQGKPGKIEVVPTKPYSTQTDLSLAYSPGVAEPCLEIEKNPQDAYKYTAKGNLVAVISNGTAVLGLGDIGALSGKPVMEGKGLLFKIYAGIDVFDIEVNEKDPDKFIEAVKAIAPTFGGINLEDIKAPECFEIERRLKEELDIPVMHDDQHGTAIISSAGLVNALQVAGKKIEDVKIVVNGAGASAVSCTKLYVSLGARLENIVMLDSKGVISKARTDLNEQKRYFATDRTDIHTLAEAIKDADVFLGLSKGNTLSQDMVRSMAPMPIVFALANPTPEISYEDAMAARPDVLMATGRSDYPNQINNVIGFPYIFRGALDTQAKAINEEMKIAAVHAIANLAKQPVPDVVNEAYHVNNFTFGPEYFIPKPVDPRLITEVSIAVARAAMESGVARKNIENWDDYKTHLRELMGQESQLTRQLYDTARRNPQRVVFAEGGHPNMLKAAVEAKSEGICHPIILGNEERIEKLAKELDLSLDGIEIINLRHDREAERRERYAHILSQKRAREGATYEEANDKMFERNYFGMMMVETGDADAFITGLYTKYSNTIKVAKEVIGIRPEYKHFGTMHILNSKKGTYFLADTLINRHPDTSTLIDIAKLADQTVRFFNHTPVISMLSYSNFGSDQAGSPLKVHEAVAYMQQEYPELAIDGEMQVNFAMNRELRDSKYPFTRLNGKDVNTLVFPNLSSANAGYQLLQAMDPDTEFIGPIQMGLNKPIHFTDIESSVRDIVNITAVAVIDAIVEKKKANK

SEQ ID NO: 29189 - protein, 565 aa, Bacteroides fragilis YCH46
MSKDIISGGEALMRSLEYHGVKTIFGYPGGSIMPVFDALYDHRETLNHILVRHEQGAAHAAQGFARASGEVGVCLVTSGPGATNTITGIADAMIDSTPIVVIAGQVGTAFLGTDAFQEVDLVGITQPITKWSYQIRRAEDVPWAVARAFYIAKSGRPGPVVLDFAKNAQVEKAEYMPAKLDFIRSYVPVPETDPEAVKAAAELINGAERPLVLVGQGVELGNAQQELRAFIEKADMPAGCTLLGLSALPTEHPLNKGMLGMHGNLGPNMNTNKCDVLIAVGMRFDDRVTGNLATYAKQAKVIHFDIDPAEINKNVHADVAVLGNCKETLSAVTALLQPNEHKEWLDSFLPYEQVEEEKVIRPELHPMGDTLSMGEVVRAVSDATNHEAILVTDVGQNQMMSARYFKYSKDRSMITSGGLGTMGFGLPAAIGATFGRPDRTVCVFMGDGGLQMNIQELGTIMEQKAPVKIIVLNNNFLGNVRQWQAMFFNRKYSFTPMLNPDYIKIASAYDIPAKRVFTREELADAIDEMIATDGPFLLEACVIEEGNVLPMTPPGGSVNQMLLEC

SEQ ID NO: 29190 - protein, 345 aa, Bacteroides fragilis YCH46
MSYLIKPQNYKPLLDLKQTELGIKQIKEFFQLNLSSELRLRRVTAPLFVLKGMGINDDLNGIERPVSFPIKDLGDAQAEVVHSLAKWKRLTLADYHIEPGYGIYTDMNAIRSDEELGNLHSLYVDQWDWERVITAEDRNADFLKEIVNRIYAAMIRTEYMVYEMYPQIKPCLPQKLHFIHSEELRQLYPDMEPKCREHAICKKYGAVFIIGIGCKLSDGKKHDGRAPDYDDYTSKGLNDLPGLNGDLLLWDDVLQRSIELSSMGIRVDKEALLRQVKQENQEQRLELYFHKRLLNDTLPLSIGGGIGQSRLCMFYLRKAHIGEIQASIWPEEMRRECTALNIHLI

SEQ ID NO: 29191 - protein, 391 aa, Bacteroides fragilis YCH46
MKTSPRSNRLHIALFGKRNSGKSSLINALTNQNAALVSDIAGTTTDPVYQPMEIHGIGPCVFIDTAGFDDEGELGSLRIERTLQAADKADIALMVCCDTELSEEQRWIELLKERNIPYLLVLNKADLLEKPDEVADKLEQQTGQHPLIVSAKEKTGIDSIRQSILHRLPELNEQPDIVGDLANEGDVVLLVMPQDIQAPKGRLILPQVQTLRELLDKKCITLSCTTDQLDNALKVLSAPPSLIITDSQVFRTVYEKKPPQSRLTSFSVLFARYKGDIDYYTEGAYIIDQLTENSRVLIAEACTHAPLSEDIGRVKLPRMLRKRIGEKLHIDIVSGNDFPKDLNCYDLIIHCGACMFNRKHVLNRIVKAKAQGVPMTNYGIVIAYINGIPFH

SEQ ID NO: 29192 - protein, 293 aa, Bacteroides fragilis YCH46
MHKAGFVNIVGNPNVGKSTLMNVLVGERISIATFKAQTTRHRIMGIYNTDDMQIVFSDTPGVLKPNYKLQESMLNFSTSALADADVLLYVTDVIETPDKNNEFIQKVRQQSAPILLLINKIDLTDQEKLVKLVEGWKELLPQAEIIPISAATKFNVDYVMKRIKDLLPDSPPYFDKDQWTDKPARFFVNEIIREKILLYYDKEIPYSVEVVVEEFKEDAKKIHIHAVIYVERDSQKGIIIGKQGKALKKVATEARRDLERFFGKTVFLETYVKVDKDWRSSDKELRNFGYQLD

SEQ ID NO: 29193 - protein, 300 aa, Bacteroides fragilis YCH46
MNWNKIVECVPNFSEGRDLEKIDRIVAPFRARSGVKLLDYSNDEDHNRLVVTLIGEPEALRDAVIEAIGVAVELIDLNHHRGQHPRMGAVDVVPFIPIKNVTMDEAVSLSREIGEKVAGLYHLPVFLYEKSATAPHRENLAAVRKGEFEGMAEKMKLPEWHPDYGPAGCHPTAGVVAIGARMPLVAYNINLSTDNLEIATKIAKNIRHINGGLRYVKAMGVELKERNITQVSINMTDYTRTALYRAFELVRIEARRYGVTILGSEIVGLVPMEALIDTASYYLGLENFSMRQVLESRIME

SEQ ID NO: 29194 - protein, 371 aa, Bacteroides fragilis YCH46
MDKLNISSTPSSVKNGRGERLLVINPGSTSTKIAVYENETPLLVRNIRHTVEELSAFPRVIDQFEFRKSLVLRELEVNDIPFRFDAVIGRGGLVKPIPGGVYEVNEAMKRDTLHAMRTHACNLGGLIADELAAALPGCRAFIADPGVVDELEEVARITGSPLMPRITIWHALNQKAIARRYAAEHGTRYEDLDLIVCHLGGGISVAVHRHGRAVDANNALDGEGPFSPERAGTLPAGQLIDLCFSGKFTKDELKKRISGRAGLTAHLGTTDIPAIIQSIEAGDDHARLVLDAMIYNVAKSIGAASTVLCGKVDAILLTGGIAYSDYVISRLRERISFLAPVFVYPGEDEMEALALNALGALRGELPVQVYQ

SEQ ID NO: 29195 - protein, 918 aa, Bacteroides fragilis YCH46
MKNTNLFRLAFLLFAGLSIFLSSCQPKEEGDKKYVIGFSQCTSDSWREAVLLEMQIEASNYRNVELVVYNAMDNSSRQVSQIRKLISQNVDVLIISPNEAVPITDVAVEAYRKGIPTIIHDRKIQSDEYTVSIGANNYNIGSAIGEYINGQLPPNSKILEIWGLEGSSPAMERHDGFIDHLRSDKNFQVTQVFGKWHYNSAYDAVNRLATFADIDLVYAHNDVMALAARDVIMKRDSVSGKRIRFIGIDGVYGDGAGLQAVADEKLEASFQYPTGGAISIQVAMQIINGEKVKKNYVLNTAIINRGNAKTILAQSEQLNHYQKRINRQKQEEDNLLSRFKFLRNSTILILALMLLIIPLLGYVMYMNLRVKNKNKELHDKNQLVEAQKEELAVKNSQIENISNQKLQFFTNISHEIRTPLTLILGPVNKLIKNSKLDPSIQEDVALMKRNVDRLYRIVNQILDFRRIDNDKMKLILRQVDLIGMVREVFDYFTGIAEEKQIHYRFSTNIDELNIYIDVNKIEQVLVNIISNAFKYSDSGGDISVRITGEAETVLLEVEDHGRGISKESMEHLFERFYTGNKTFGTVGFGIGLNLSKEYVDLHDGEIRAESQPGEYTLFSVRLYKDITHYTHEYILEETDRFNLSYHDMEVDTTVVNEMLSKTYDYHVLVVEDDPDVRYSLRKELSANFQVEVAGNGNEALDLLGQGDAFHLILSDVLMPGMNGFQLVNRVKNDLAFSHIPIILLTALSEDSQRIYGIAEGADEYIPKPFNIDFLKIRIINMISERQKMKEAYMKNLRAGTMDNVEVCKLMKVDELFRDKLLSIVDTQYENSDFSIEDLSEHLGLSRVHLYRKMKTLFGVSPTDYLRNYRLNKAMLLLKARQYNISEIAYMTGFTSPAYFTKCFRTLYGVTPTEAMVAN

SEQ ID NO: 29196 - protein, 610 aa, Burkholderia mallei ATCC 23344
MTERERAARGRNDARRGGGDSGGDDEAWRRWLPGIATLRTYRRAWLARDLYAGVALTAVLVPVGMSYAQAAGLPVIAGLNASIAALVGYAIFGPSRILVLGPDSALAALIAGAIAPLAHGEPAHAVALAAALALMSGGFCVLAGLLKLGFVTDLLSKPIQYGYLNGLALTLIASQLPSLLGTVPLGGTFVDQVASLAATVAQGRIDFASLALGGGCLAGIALLRRVAPAWPGMLIAVAGASIVAAWLGAAPDAGGAHAHVAYAHVANAHVALVGSLAGTLPPLGLPSISLADASRLIAGALAIAMVSVADISVLSHVFAQHDGSETDRNQELCALGAANLLAGMLRGCAVSSSASRTPVALAAGARTQLTSLVAAACIALLLIAPTLLARVPLAALAAVVVYSANALVDVRAIVRLYRVRRGECAVSVLCFAGVVLLGVVPGILLAVGLSLLSFVWRAWHPYDAVLGRVEGMHGYHDVSRHPGATLTRGLVAFRWDAPLFHANATIFRDHVRDAIAEAGAPVRCVVIAAEPITDVDVTAADMLATLRDELAARRIALVFAEMKGPVKDRLRTYGLFEKIGADHFFPTVTDAIEHFTRMRKDVATARRARR

SEQ ID NO: 29197 - protein, 622 aa, Burkholderia mallei ATCC 23344
MCGITGWIDFARDLRNEAPIVDTMTDTLARRGPDARGVWLDTHAALGHRRLSIIDPERGAQPMLTPERGPRGLPRAVISYAGETYNFRELRAELGALGHRFDTHCDTEVVLRAYLEWGAAFVDRLNGMYSIAIWDTARDELLLVRDRLGVKPLFYYPTADGVIFGSEPKAILAHPDVRARTSSEGLCDALLFLRTPGQVPFSGMREVKPGHVLRVRRGGLAEQRYWALEARPHTDDLPTTIATIRALLDDIVSRQMISDVPLCALLSGGVDSSTIAALAQKRRRANGGGALSTFCVDFTGHTRNFRADPIRPTADAPFALEVARHIGSDHHTIELDQAGLLDPQVREAVLRAWDLPFNFADLDVSLHRLFAEVRKHATVALSGEAADEIFGGYLWFSDPAARRAHTFPWLKLGAHRGLDPRALFHRSFIDALRLGEYEAQLYRAALAEVPRLDGENAEDRRTRELHYLTLTRWLPVLLDKKDRMGMASGLEGRVPFCDHRLVEYVFNIPWAMKTFSGQEKALLRAAAADLLPESVLNRKKAAYPSIQAPGYDRGLIERLNRAIAAGRAPLEPFIDAGALRGLTEKTAAGSLSEFERILLESSSRLNDWLDLYRVELDGVPAG

SEQ ID NO: 29198 - protein, 295 aa, Burkholderia mallei ATCC 23344
MKLGFVGLGVMGQPMALNLARAGTELVVWNRTRERCEPLRAAGAQVADSAADVYRRARIVILMMATDAAIDAVLDRGKPAFASNVAQHTIVQMGTVSAEYSRGLEADIRAAGGRYVEAPVSGSRQPAEAGRLVAMLAGEPAAVEEVRALLAPMCREIVATGQVPSGLLMKLAVNTFLIAMVTGLAEAAHAARGFGLDMKQFQAVLDAGPMASSVSRVKIDKLVNEDFEVQASIVDVFKNSRLATEAAHGAHLAAPLLEVCCELYRETEALGHGQADMAAVVHAIEARSVARYAGN

SEQ ID NO: 29199 - protein, 200 aa, Burkholderia mallei ATCC 23344
MLLDKDGTLLENVPYNVDPARMRLARGAARALATFGELGMPIAVVSNQPGVALGRFPETALGAARHRLAELFAQQGAMLAGFFYCPHHPAGTVVRYACDCACRKPQPGLLFRAAAQLGVSLDASWMIGDILDDVEAGRAAGCRTILVDCGNETEWRYGGLRTPDFIASRLDDAAWIVARECAATAAAPAAPGEAPQEGRR

SEQ ID NO: 29200 - protein, 317 aa, Burkholderia mallei ATCC 23344
MSDDYFQPQSGNAMPRFAGIATMMRLPQAASAAGLDACFVGVPFDLGTSNRTGARFGPRQIRSESVLLRPYNMATRAAPFDSLRVADLGDVATNPYNLADSIARIEAAYHAILAHGCRPVTLGGDHTITLPILRAMHRRHGRVGLIHVDAHADVNDTMFGEKIAHGTPFRRALEEGLLDGDRVVQIGLRGTGYAAEDFDWCRDQGFRVVQAEACWNRSLAPLMDEVRARVQGGPVYLSFDIDGIDPAYAPGTGTPEIAGLTVPQGLEIVRGAWGLDIVGADLVEVAPPYDPFGTTALLGANLAYEMLCVLPGVARRA

SEQ ID NO: 29201 - protein, 671 aa, Burkholderia mallei ATCC 23344
MLTNRLVRAYALYTIGFAAFVLLLWRIERATGPGVWIGYVFLFVPIAVYAVIGLLSRTSDLVEYYVAGRRVPSAFNGMATAADWLSAASFIGLAGSLYATGYDALAYLMGWTGGFCLVAFLLAPYVRKLARYTIPDFLGTRFSSTLVRALAAIAAILCSFVYLVAQIQGIGLIATRFIGVDFSIGIFCGLAGILVCSFLGGMRAVTWTQVAQYIILIIAFLLPVSLIAMKNGLGPVPQFNYGHLMSRVETLEGEMRDAPQERQVRETYRRQAGAIQARLDRLPASYDEARAKLVDQVAELRRHNGPLREINQRERALAEFPRDPAAARVVWEQARDELLARAAAPVPMHEPFPAASGDDRRPRGRNFLALLLCLSLGTASLPHILTRYNTTTSVAAARRSVGWTLFFIALFYLTVPVLAVLIKYEILTNLVGRPFADLPAWITQWHRFEPGLIGVTDLLRDGIVHWSEIQMQPDIVVLAAPEIAGLPYVVSGLIAAGALAAALSTADGLLLTIANALSHDVYYHMVAPDASSQRRVTISKVLLLGVALFASYVASLNTGKILFLVGAAFSLAASSFFPVLVLGVFWKRTTTRGAVAGMMTGLGVCVYYIVSTYPFFTQITGFAGPGWLGIEPISLGVFGVPAGFATAIVVSLLDRRPDAYTNALVDYIRHP

SEQ ID NO: 29202 - protein, 373 aa, Burkholderia mallei ATCC 23344
MTHIYLDYNASTPIDPAVANAMRPLLPEAFGNPSSGHWASVPAKVALDRARAQVATLIGAAPDEIVFTSGGSEANNLALKGTVLASSNAGGHVITQSTEHPAILKPLQFLERLGTKVTCVPVDGNGRVDPDAIRRAITPRTTLITVMHANNETGTIQPIEDIGTIAREHGIRFHTDAAQSIGKIPADVDALGVDLLSIAGHKLYAPKGIGALYVRKGVGLEPLIHGAGHENGRRAGTESALLAAGFGEACALARDLAAMDGIRALRDRLWHALQDRFDDRVRLNGHLEYRLPNTVNVSFVGRVGTDVLAALDGVAASTGSACHAGRMTLSPVLAAMGIAEQVGMGAIRFSLGRHTTADEIDTVIAKLSAIARG

SEQ ID NO: 29203 - protein, 339 aa, Burkholderia mallei ATCC 23344
MEHRIALQFEDGVTRFIACRDGETLADAAYRQQINLPLDCRDGACGTCRCRCESGDYALPASSYIEDALTANEAAQRYVLACQTRPRSDCVIDVPASSAACKTGAARHEGTLASVERLSASTIHFSIDVDEPAKLAFLAGQYVNVEIPGLGATRSYSFSSRPGDARVSFLVRNVPGGRMSRYLTDEAAPGQRIAFSGPHGSFYLRDAARPALFLAGGTGIAPFLSMLDVCASRDGAPPVRLVYGVTRDDDLVALERLGDVERRLAGFAYRTCVADEASAHPRKGYVSAHVEPEWLNGGDVDIYLCGPAPMVDAVQAWLRERGVTPANLYFEKFSSSNAP

SEQ ID NO: 29204 - protein, 884 aa, Burkholderia mallei ATCC 23344
MSDIGRVTLFGKLNTFLYETLEQATGFCRLRGNPYVELAHWLNQMLRRPDSDVHRILRRFDIDAAAIDRGIVSALDRLPRGAGSVSDLSAHIDDAIERAWVYATLKYDAAQIRGAVLLLALVKTPQLRNVLYAIARDFERIVPDVLADELERIVAGSPEAPSPAARAAAGAIGDAGAAPSAAREGSALARYAIDLTARARAGEIDPVVGRDGEIRQIVDILLRRRQNNPLLVGEAGVGKTAVAEGFALRIVAGDVPPPLRDVELYLLDIGLLQAGASVKGEFESRLRGVIDEASSSERPVILFIDEVHTLVGAGGAAGTGDAANLLKPALARGLLRTIGATTWSEYKQYIEKDPALTRRFQLVQVREPEEGAALAMLRGLAAKLEAHHRVLVLDDALQAAVTLSHRYIPARQLPDKAISLLDTACARVAVSQHAVPAPIEDVRRRIDSLRVERELIARECALGAGDAQRLDAIDASIAGEQTTLDALDARWQAERDALGKIVDWRASLLADDSSRVLDEAARADVQAKLSAALRALAELQGETPLVLPAVDTHAVAAVVSDWTGIPLGRMVRDEMQSVLKLAETLAERVVGQPHAVELIAERIQTARARLDDPAKSHGVFLLCGPSGVGKTETALALAEMLYGGEHNAITINMSEFQEAHTVSTLKGAPPGYVGYGQGGVLTEAVRRRPYSVVLLDEIEKAHRDVHEIFFQVFDKGWMEDGEGRYIDFRNTVILLTSNVGSERVMQLCRDPQRLPDAQTLTDALREVFPAALLGRLTVVPYYPLTDEMLARIVALQLARIERRIEAHHGIALRCADSATALIAERCRTIESGGRMVDAILTHTVLPRISQEILRATIEGRALRAIDVSAEDGQFVYRFEEEGAT

SEQ ID NO: 29205 - protein, 676 aa, Burkholderia mallei ATCC 23344
MPPSRSTPRTTLKPPVVVPSLAVIGALLAVCALRPNEAGALFGAAQQWIVERFDWFYVLAITTFLIFLVLIAASRFGNIKLGPDDAEPEFSFVSWTAMLFAAGMGIGLMYFGVGEPIQHYLSPPTAAGGTPAAAREAMLMSFFHWGLHAWATYGVMGLVLAYFGFRYNLPLTLRSGLYPVLREGVNGWIGHTVDAFALVGTVAGIAVTLGYGVLQLSAGLHTIAGWQTDTDTFRIGLVAVVVALAGLSAASGLDKGVRRLSELNLMLAFALLAFVVVAGPTSFLLRAIGDNIGEYLSKLVSLSFRTYAYEAPNDKGWFGGWTLLYWAWWVSWSPFVGMFIARISRGRTIRQFVIGVLLVPTAFNLVWMTAFGNSAIWLDTHAAAGALAQTATNVDALLFRFFDYLPLTQLLSVAAIVLIAVFFVTSADSGAFVIDAIATRGAPQSPVWQRLFWAAVLGVTASVLLVAGGLKALQALTLVAALPVALVMLALCYGLWRGLKADHAHYSQDMAPATSFWTGQHWRHRLSQILRHTSDADARQFIAQTVEPALRKVADELKAGGVDAHVARDDDDAVRLTVPAPAQRDFVYGARVSRKSAPAFRIREAAEPEPQREHVCEVLTFFADGRLGYDIEYLRGDEIIADVLRQYERYVSLAADTRTHLLNRAPEHAGPDGLSR

SEQ ID NO: 29206 - protein, 353 aa, Burkholderia mallei ATCC 23344
MNTARIKAAAADMPERARLRIGFVALSDAAPLVAAQRLELGARYGLTLELCRQPSWASIRDKLLSGELDAAHALYGLVYGVQLGIGGPRADLAVPMVLNRNGQAITFSNRLADAYRASGELKAALATLGRRPVFAQTFPTGTHAMWLYHWLASHGVDPLRDVRSVVIPPPEMVDALAAGELDGLCVGEPWNAVAEARGAGRTVAATSEVWPDHPEKALACRREFVALYPNAARLLVRTLLDACAWLDDPAHRMQAARWLAQPDTIGVPVEQIAPRLLGDYGAGPFAQPPAPIRFHAHGTANRPAASDGLWFLSQYRRWGMLSGDVDDAAIANGVAHTALYDEAVALGGARRGE

SEQ ID NO: 29207 - protein, 392 aa, Burkholderia mallei ATCC 23344
MSEPLLLTFNAGSSTLKIGLYSVANGEPAPLGRGKIDFNRAPLQFEYANGGEAHAVPLAAPVTDDLHAVLDEALGWIDAHLSVHELVSVGHRVVHGGDTFDGPVRIDERTLDAIAALVPLAPLHQPQSVRLIRALRHVRPHLPQVASFDTAFHRTQSDLVRRFALPRALFDAGIKRYGFHGLSYRYVAGRLRERHPSIARGKVVAAHLGSGASLCALDAGVSRDTSMGFSTLDGIPMATRCGALDAGVVLHLQKTLGRTLDDVEQMLYHRSGLLGVSGVSGDARALLADPSAGARDALELFAFRIAGETARLAATLGGLDALVFTAGIGEHQPQTRAAVCERLRWLSVELDAHANARNAETVSRDGSRVAVLVVPTDEEQVIARDAASVLHA

SEQ ID NO: 29208 - protein, 420 aa, Burkholderia mallei ATCC 23344
MPHRAGSLTILQGAALYIGAVLGTGVIALPALAAEVAGPASLLAWAALVMLSIPLAATFAALGARYPDAGGVSTYVRKAFGPKAAAVVGWCFYFAVPAGAPAAAMFGGAYVAAVTGGAHATMIASAAVLIALVAAANAFGVTVSGRMQLVLSALLVALLVAAVLASAPHARAANLHPFAPHGWLAVGEAAALLVWSFAGWEAITHLAAEFRRPARDLPRSTGIAVAVVGLLYLSVAAASVLVLGPAAGESGAPLAALIARGIGGNAQLIATAAALLFTLGTMNAYFAGAAKLGAALGRDGALPRWFAQGSQTGGVPRRSLAVVAALAGCALVAAVATGMGPKPLVLATSGNFVMVYVLGAAAATRLLPRGGLAHRASIVALLSALLLLATTGWYLLWPLLLTASAIGYLFITGRRAAAKR

SEQ ID NO: 29209 - protein, 519 aa, Burkholderia mallei ATCC 23344
MPAQGNAQRTAPLARPAPTDAGHGKFKKQLSLTDLTFIGLGAIFGSGWLFAASHVSTIAGPAGILSWLLGGFAVLLLGIVYCELGAALPRAGGVVRYPVFSHGPLLGYLMGAITLIAFSSLIAIEVVAARQYAAAWFAGLTVEGSGNPTTLGWLVQAALLCFFFYLNYSSVKTFAKANNVISVFKFVVPLAVIVVLFAFFKPANLTLHGFAPFGMPGVEMAVSAGGIIFAYLGLTPIVSVASEVRDPQRTIPIALILSIVLSTLIYVLLQLAFLGGIPSAMLAGGWLAYMVVADAMISPSGCGNIYMNATPRVVYGWAKTGTFFKVFARVDEASGIPRAGLWLTFALALFWTLPFPSWEALINTVSAALVLSYAVAPVSVAALRRTAPGLPRPFRASAFALTGPASFVIAALIVYWSGWRTVSWLLGLQIAMFAVYLACRRRVPTAHLSLAEQVRSCAWLIAFYALMIVASYFGGFGGTGQLAHPYDTFAVAAVALVIYYWGAHTGVPSAKLQLDDDEN

SEQ ID NO: 29210 - protein, 656 aa, Burkholderia mallei ATCC 23344
MCGITGFVGPVACAPQTARATLARMTDSLAHRGPDDTGLWIDHDAGVALGHRRLSIVDLSEHGHQPMLSACGRYAMTFNGEIYNFRQLRSELEREHRAPEWRGHSDSEVLLAAFCAWGVDRALQKAVGMFALALWNRESRVLTLARDRIGEKPLYYGRIGGSFVFGSELKALRRFPGFDAHPIDRDALCLYLRHASVPAPYTIYEGIRKLPPGTYAQLEDLAEAPAPRRYWSLERAIAAGRANPFDGDANAAVAQLDYVLRDAIAEQSVADVPLGAFLSGGVDSSVIVALMQTQTAQPVQTFTIGFHEAGYDEAGYAKAVARHLGTSHTELYVKPADVLATVPRMPCVYDEPFADSSQIPTLLVSELTRRHVKVSLSGDGGDELFGGYTRYFLTPRLWGRLRRVPAAVRMRIAAALHALRPDHADQIASLVQGAWSASAQRDASPRVGDRLHKLANVMTADSRASLYRLLMSSVHHPERFTLAGHEPQTLIDTPGAWPAGLSFAEQAMAVDTLTYLPTDILTKVDRAAMAVSLETRMPFLDHRVVEFAWRLPEALRIPDGQDKWLLRKLLYRYVPRPLIDRPKQGFCAPVGAWLRGELSDWAAELLRPARLRDEGYLDAARVERLWRQHQSGRMNWQHPLWTVLMFQAWLERQRAE

SEQ ID NO: 29211 - protein, 102 aa, Burkholderia mallei ATCC 23344
MDTQQRIKQIVDENPVVLFMKGTAQFPMCGFSGRAVQVLKACGVDQFKTVNVLEDEEIRQGIKEFSNWPTIPQLYVKGEFVGGSDIMMEMYQSGELQQLFTA

SEQ ID NO: 29212 - protein, 381 aa, Burkholderia mallei ATCC 23344
MMRDAANFEPADSRVTRPAFWQALPERWTSDVEETLVCCHVRQETHDVKSFFFRSPQGRAFSFEPGQFVTLELDIDGETINRCYTISSSPARPHTISITVKRVPGGKVSNWLHDNLQPGAPLRVLGPAGEFTCARHPARKYLFLSAGSGITPLMSMSRAHHDLAEDRDIVFVHSARTPDNIIFARELDLIASTHANFRTAFVCERLGARTNWHGVTGFLSLPLLKLVAPDFMEREIFTCGPAPYMKAVRELLAEAGFDRSRYHEESFSFETLAQGEAPADAPAGEDAAARGAQVRQYTIAFAKSHREIACGADQHVFDAARRAGVRLPASCTQGMCGTCKVKLVSGQVDMKHNGGIRQREIDQGMVLLCCSKPLSDLVVDK

SEQ ID NO: 29213 - protein, 194 aa, Burkholderia mallei ATCC 23344
MTLSDSALDQIFRTARTHNAWQPKPVDDALLRELIDLVKWGPTSANSSPARFVFVKSPEAKAKLKPALSEGNLAKTMAAPVTVIVGMDMAFHDHLPKLFPHADARSWFAGNDALIEATAFRNASLQGAYLIVAARALGLDAGPMSGFDQAAVDAAFFAGTSIKSNFLVNLGYGDAAGLFPRSPRFSFDEIARIE

SEQ ID NO: 29214 - protein, 310 aa, Burkholderia mallei ATCC 23344
MKPRLLVLIPLRDHAHAHIADVFDILYALTPDQRRRAIAERGAAVQAVLTNGTTGLFAEEIACLPALEFVAALGAGYENIALDDARSRGITVVNGAGTNDDCVADHAFALLLAAVRAVPKLDAACRAGVWRDALPMRPNMSGKKLGIVGLGNIGQKIARRAAGFDLEIGYHNRRPREGAAYRYFAGLDALAHWADFLVVATPGGAATHHLIDARILDALGERGFLVNVSRGSVVDTAALADALREGRVAGAGLDVYEGEPQPPRALAALDSVVLTPHVGGWSPEALERSVRQFLENAARHFAGRPVLTPI

SEQ ID NO: 29215 - protein, 67 aa, Burkholderia mallei ATCC 23344
MDTGTVKWFNETKGFGFITPDSGGDDLFAHFSEIRSEGYKTLAENQKVSFETKRGPKGLQAANIKPL

SEQ ID NO: 29216 - protein, 469 aa, Burkholderia mallei ATCC 23344
MAIISESSSAAAAAAPGGARAPDTLARSLNVRDVVMITVSGVTPASSIFVIAPFAIQQAGSGAVMSFVLGGLLAFAFALCYAELSAAHRSAGGEYVMVKRVFGALPGYLTFVAVLAVNVFIPAVLASGAAPYLNAALGTQLGNQSVALAIVLASYALGILNIRTNAWITGAFLVIEILVLALIAYLGFSEPHRSPLALVHPVVANGAALVPATLAAIMPAVGTAIFCYNGFGAAVFLAEDLEGGNRDIAKAVICSLAVILVVELVPLTAIVLGAPSFVELAKSADPIGYVVRALSNPGVSRVVSGGIFLSVFNAIIAIVIMVGRFLYSSGRHALWSHACNGAFTRIHPRLESPWIATLTLAVPSTLLVFVLSLDALTAFTVDLLLLVYLAVGVAALASRVMRRDVDHHYRMPWWPLPPIVAIAGAGYTLYTTIAAATKPTDLYIIAGLAAVSLAAYARWARRSAAFREL

SEQ ID NO: 29217 - protein, 400 aa, Burkholderia mallei ATCC 23344
MTEAFLCDAIRTPIGRYGGALAPVRADDLGAVPLKALVERNRDVDWAAVDDVIYGCANQAGEDNRNVARMSLLLAGLPHAVPGATINRLCGSGMDAIGLAARAIKAGEASLMIAGGVESMSRAPFVTGKAMSAFSRQAEIFDTTIGWRFVNPLMKQRYGVDSMPETAENVATDYRVSRTDQDAFALRSQQKAARAQADGTLAQEIAPVTIAQKQGEPLVVARDEHPRETTLEALAKLKGVVRPDGTVTAGNASGVNDGACALLVASEAAARRHGLVPRARVLGIATAGVEPRVMGIGPAPATQKLLARLGMTLDQFDVIELNEAFASQGLAVLRLLGVADDDARVNPNGGAIALGHPLGASGARLVTTATYQLHRTGGRFALCTMCIGVGQGIAIAIERV

SEQ ID NO: 29218 - protein, 400 aa, Burkholderia mallei ATCC 23344
MTEAFLCDAIRTPIGRYGGALAPVRADDLGAVPLKALVERNRDVDWAAVDDVIYGCANQAGEDNRNVARMSLLLAGLPHAVPGATINRLCGSGMDAIGLAARAIKAGEASLMIAGGVESMSRAPFVTGKAMSAFSRQAEIFDTTIGWRFVNPLMKQRYGVDSMPETAENVATDYRVSRADQDAFALRSQQKAARAQADGTLAQEIAPVTIAQKQGEPLVVARDEHPRETTLEALAKLKGVVRPDGTVTAGNASGVNDGACALLVASEAAARRHGLVPRARVLGIATAGVEPRVMGIGPAPATQKLLARLGMTLDQFDVIELNEAFASQGLAVLRLLGVADDDARVNPNGGAIALGHPLGASGARLVTTATYQLHRTGGRFALCTMCIGVGQGIAIAIERV

SEQ ID NO: 29219 - protein, 447 aa, Burkholderia mallei ATCC 23344
MTSRDERLHRGLEERHINLMALGATIGVGLFLGSATAIRAAGPAILLTYILGGVAIFLIMRALGEMAIDNPVAGAFSRYARDYIGPLAGYLTGWTYWFMWIVTCMAEITAVGVYMHMWFPDVPNWIWTFAALIVMGAVNFIAVKLYGEFEFWFALIKIVTIVLMIAGGALMIVAGVGNGGVPTGVSNLWAYGGFLPNGWPGVVDALPIVMFAYLGVEMLGLTAGEARNPEKSLAKAVNSVFWRVVIFYVGALFVIMSVYPWNQIGTQGSPFVMTFSRLGIPAAAGIINFVVLTAALSSCNSGIFSTARMLFNLAEQGQAPERLASVNRRGVPVHGVLISVALLFVGVVLNYFAPQKVFVWLTSVSTFGAIWTWCVILIAQLRFRRRVSAERLARLPLRVPCYPLSSFVALAFLAFVVVLMAFSPDTRVALVIGPLWIAALTVYYYAS

SEQ ID NO: 29220 - protein, 467 aa, Burkholderia mallei ATCC 23344
MEGSQTGLGTGLKQRHVTMLSIAGVIGAGLFVGSGHAIVEAGPAALIAYAIAGLLVVLVMRMLGEMAVAQPDSGSFSTYADRAIGHWAGFTIGWLYWWFWVLVIPIEATAAATILNAWFPGVATWIFALGITSVLTVTNLFSVKNYGEFEFWFALIKVVAIVVFLAIGGAAIVGLLPGSNVSGAARLVNAGGFMPNGVGAVLAAMLTTMFSFLGTEIVTIAAAESEHPERQIVRATNSVIWRISLFYLGSIFVVAALVPWNDALLPAHGSYQRAMELIGVPHAKGIIDVIVLVSVASCLNSALYTASRMIFSLSTRGDAPAFLRRTDASGTPRAAVLASTAFGFLTVIANYVMPEQVFGFLLATSGAIALLVYLVIAISQLRMRSTLDATGERLPLRMWCFPWLTWAVIVFICGVLVVMLLREDHRMEVGATAVLALAVVVASRMNRRARGGDEPTPAASRVSANLR

SEQ ID NO: 29221 - protein, 558 aa, Burkholderia pseudomallei K96243
MDIKRTVLWVIFFMSAVMLFDNWQRSHGRPSMFFPNVTQTNTASNATNGNGASGASAAAAANALPAAATGAAPATTAPAAQAQLVRFSTDVYNGEIDTRGGTLAKLTLTKAGDGKQPDLSVTLFDHTANHTYLARTGLLGGDFPNHNDVYAQVAGPTSLAADQNTLKLSFESPVKGGVKVVKTYTFTRGSYVIGVDTKIENVGAAPVTPSVYMELVRDNSSVETPMFSHTFLGPAVYTDQKHFQKITFGDIDKNKADYVTSADNGWIAMVQHYFASAWIPQSGAKRDIYVEKIDPTLYRVGVKQPVAAIAPGQSADVSARLFAGPEEERMLEGIAPGLELVKDYGWVTIIAKPLFWLLEKIHGFVGNWGWAIVLLTLLIKAVFFPLSAASYKSMARMKEITPRMQALRERFKSDPQKMNAALMELYKTEKVNPFGGCLPVVIQIPVFISLYWVLLASVEMRGAPWVLWIHDLSQRDPYFILPVLMAVSMFVQTKLNPTPPDPVQAKMMMFMPIAFSVMFFFFPAGLVLYYVVNNVLSIAQQYYITRTLGGAAAKKKAS

SEQ ID NO: 29222 - protein, 467 aa, Burkholderia pseudomallei K96243
MSLFRKKNVDRMIAGAQAAGLKKALGAVDLTFLGIGAIIGTGIFVLTGTGAVQAGPALMLSFVIAAIACGLAALSYAEFASTIPVAGSIYTYSYATLGELVAWIIGWDLMLEYGLAASAVSVGWSGYLQSLLQGFGVSLPTALTAAPGALPGVVTYFNLPAFVVMLVITTLLSIGIRESTRVNNIMVFIKVAVVLLVIAVGVFHVTPANWKPFMPHGWNGVFGAAAVMFFAFIGFDAVSSAAEEVKNPKRDLPVGIIASLGVCAFLYVAVAAIATGIVPWAQYANVSHPISYALQVAGEKWVAGFIDLGAVIGMLTVILVMSYGQTRIIFAMSRDGLLPAALSRVHPRFATPFLTTWLVGLFFGLIAALIPLNVLAELINIGTLAAFSMVSIAVLVLRRTHPDLPRAFRCPGVPLVPILAVAACLFLMLNLQPVTWIAFLTWLVIGLFVYFAYSRSRSKLAHGAQQH

SEQ ID NO: 29223 - protein, 446 aa, Burkholderia pseudomallei K96243
MTTILENLPAGQKVGIAFSGGLDTSAALHWMRIKGAVPYAYTANLGQPDEDDYDAIPKRAIQYGAEGARLIDCRAQLVAEGIAALQCGAFHISTAGVTYFNTTPIGRAVTGTMLVAAMKEDGVNIWGDGSTYKGNDIERFYRYGLLVNPDLKIYKPWLDQQFIDELGGRAEMSEFMRQAGFEYKMSAEKAYSTDSNLLGATHEAKDLESLESGIKIVNPIMGVAFWRDDVKIDKEEVTIRFEEGRPVALNGVEYKDAVALLLEANRIGGRHGLGMSDQIENRIIEAKSRGIYEAPGLALLYIAYERLVTGIHNEDTIEQYRENGRRLGRLLYQGRWFDPQAIMLRETAQRWVARAVTGEVTVELRRGNDYSIIGTRSPNLTYQPERLSMEKVQSMFSPRDRIGQLTMRNLDITDTRDKLRIYSQVGLLAAGESSALPKLKEDESGN

SEQ ID NO: 29224 - protein, 397 aa, Burkholderia pseudomallei K96243
MTAVDQDPIVIASAARTPIAGFQGEFASLAAPQLGAAAIAAALERAGLQPEQIDEAVMGCVLPAGQGQAPARQAALGAKLPLSVGCTTINKMCGSGMRAAMFAHDMLVAGSVDVIVAGGMESMTNAPYLLPKARAGMRMGHGQVLDHMFLDGLEDAYDKGRLMGTFAEECAGEYAFSRDAQDAFAIESLARAKRANEDGSFAWEIAPVTVAGKKGDAVIARDEQPFKANPEKIPTLKPAFSKTGTVTAANSSSISDGAAALVMMRASTANRLGLAPLARVVGHSTFAQAPSKFTTAPVGAIRRLFEKNGWRAAEVDLYEINEAFAVVTMAAMKEHGLPHEKVNVNGGACALGHPIGASGARILVTLIGALRARGAKRGVASLCIGGGEATAMGIELI

SEQ ID NO: 29225 - protein, 318 aa, Burkholderia pseudomallei K96243
MSSHDGLMVFTGNANPALAQEVVKILGIPLGKAMVSRFSDGEIQVEIQENVRGKDVFVLQSTCAPTNDNLMELMIMVDALKRASAGRITAAIPYFGYARQDRRPRSARVAISAKVVANMLEIAGVERIITMDLHADQIQGFFDIPVDNIYATPILLGDLRKQNYPDLLVVSPDVGGVVRARALAKQLNCDLAIIDKRRPKANVAEVMNIIGEVEGRTCVIMDDMVDTAGTLCKAAQVLKERGAKQVFAYATHPVLSGGAADRIAASALDELVVTDTIPLSAESLACPKIRALSSAGLLAETFSRIRRGDSVMSLFAES

SEQ ID NO: 29226 - protein, 327 aa, Burkholderia pseudomallei K96243
MIAKINDDRALALARDVLDIEANAVRALAEQLDGEFVAAVGLLLNCRGRVVVSGIGKSGHIARKIAATLASTGTPAFFVHPAEASHGDLGMVTKDDVFVAISNSGESEELVAILPLIKRLGAKLIAMTGRPASSLATLSDVHLNAGVAKEACPLNLAPTASTTAALALGDALAVAVLDARGFGSDDFARSHPGGALGRRLLTYVRDVMRTGDEVPAVPLDATLSDALFQITAKRMGMTAVIDDANRVAGIFTDGDLRRVLERDGDFRRLPIVDVMTRHPRTIAPDHLAVEAVELMERHRINQMLVVDERGALIGALNMHDLFSKKVI

SEQ ID NO: 29227 - protein, 399 aa, Burkholderia pseudomallei K96243
MSKQLQDAYIVAASRTPIGKAPRGAFKNTRPDELLVHAIKSAIAQVPEFDTKLIEDAIVGCAIPEAEQGLNVARMGALLAGLPNTVGGVTVNRFCASGITALAMAADRIRVGESDALLAAGVESMSMVPMMGNKPSMSPHIFDRSEDFGIAYGMGLTAERVAEQWKVSREDQDAFSVESHRKAIAAQQAGEFKDEIAPYAIVERFPNLATGEIDTKTREIALDEGPRAETSLEGLAKLKTVFANKGSVTAGNSSQTSDGSGALLVVSEKVLKQFNLTPLARFVSFAVRGVPPEIMGIGPKEAIPAALKAAGLKQDDIDWIELNEAFAAQSLAVIRDLGLDPSKVNPLGGAIALGHPLGATGAIRAATVVHGLRRRNLKYGMVTMCVGTGMGAAGIIERL

SEQ ID NO: 29228 - protein, 187 aa, Burkholderia pseudomallei K96243
MPTSLSKKLVVLDRDGVINVDSDAFIKSPDEWIPLPGSLEAIARLNHAGYRVVVATNQSGIGRGLFDMATLNAMHLKMHRAAAAVGGRIDAVFFCPHTADDHCDCRKPKPGMMKLIAERFEIDPADTPVVGDSLRDLQAGEALGFRPHLVLTGKGKKALAAGGLPEGTRVHDDLRAFALDFLSEEHE

SEQ ID NO: 29229 - protein, 510 aa, Burkholderia pseudomallei K96243
MCGIGAIFSTQRASVDGIERSLSALMSKIAHRGDASRFNENLIRERFGLATNRLAIVERDHARQPVSDHERDLHVVLNGQIYNYKELRDELAARGHRFSHAGDAEVLLRAYLEYGPSFATKLDGMFSFVLFDNLNGKFLIGRDHVGIKPLYYAQRDGVWYVASELKALTHVNARIETLAPGTLFDGKETIRYVSYDASRPVSRDSFDEAKARVRTLLEESVRRRVDTDLPICVMFSGGIDSAIVLQLAHRYHPDVTAISFGLPGSNDIEIAHRYCAEHGIRHVIYTFTKQDLLENIDDAVYYGEFFEKIDAIDSAIAHFGYYIANKLGLKVALCGEGSDEIFGGYDLFKTHAQPGALSLYRLNNLHRTDLQRVDRASMRNTVEARVPFMDAELIDYVLSLDFSYKLHGGVEKHILREAFRDVLPGYIIDRPKIRMPDGSGVKNVIIDHIDSLGDAPPDDAARRLGEIGLSDRSALFFARKYLECNFPFPTQRFKQAGKDFSESGYFDFIS

SEQ ID NO: 29230 - protein, 485 aa, Burkholderia pseudomallei K96243
MSFASLGLAEPLVRAVNELGYTQPTPIQAQAIPAVLGGGDLLAGAQTGTGKTAGFTLPILQRLHAFYAENRSARRAVRALILTPTRELAAQVEESVRAYSKYVKLRSTVMFGGVSINPQIDALKRGVDIVVATPGRLLDHMQQKTIDVSSLDILVLDEADRMLDMGFIHDIKRVLAKLPAKRQNLLFSATFSDEIKSLADSLLDSPALIEVARRNTTAETIAQKIHPVDRDRKRELLTHLIREHNWFQVLVFTRTKHGANRLAEQLTKDGISAMAIHGNKSQSARTRALSEFKSSTLQVLVATDIAARGIDIDQLPHVVNFDLPNVPEDYVHRIGRTGRAGANGEAVSLVCVDEKQLLRDIERLIKREIPQQVIPGFEPDPNAKPEPIQRRGQRGAVAGNGGSGNGNSGGAGNGGRGNRAPRAASQPQAQQGQAAARRDGGTQAKAAKPQQARGGNSRPAGNGNSNGGGAHANRSRSSRSGQRGR

SEQ ID NO: 29231 - protein, 539 aa, Burkholderia pseudomallei K96243
MTPPDLRADAPARAPYTVRDAVIDLLRRFGIRKVFGNPGSTELPMFRNFPDDFEYVLGLHEAVAVGMADGYVQASGNAAVVNLHSAAGVGNAMGVLFTAYRNKTPLVVTAGQQARSILPFEPFLASVQAAELPKPYVKWSIEPARAEDVPAAIARAYHVAMQEPRGPVFVSIPADDWDRPAEPMPARTVSSEVRPAPEALARLGDALDASERPAFVVGAAVARAGAWDDAVRLAERHRARVYAAPMSGRCSFPEDHPLFAGFLPPIRERIVEQLAGHDFILAFGAPVFTYHIEGFGPHVPAGAALHQLVDDPSVAAWTPVGDAVVGNLRLAARDLLARAAPRERPMPAPRAPRGRVGPGAPGERMPVAFALQTLADVRGSRDVVVEEAPSARPAMHEHLPFSSADTFYTMDSGGLGYGMPAALGIALGSPGRRVIALIGDGSSLYSIQALWSAVHLKLPVTFVILNNARYAALQDFAPVFGFRDGEPVQGTALPGLDFVSLARGFGCDGVRVSDAARLRDALEQALASPVPVVVDVDVA

SEQ ID NO: 29232 - protein, 67 aa, Burkholderia pseudomallei K96243
MATGIVKWFNDAKGFGFITPDEGGEDLFAHFSAINMQGFKTLKEGQKVSFEVVQGPKGKQASNIQAA

SEQ ID NO: 29233 - protein, 343 aa, Burkholderia pseudomallei K96243
MAFNVTLKQSGRQFQVEADETVLAAALRQNVHLPYGCKNGACGSCKGTIVQGQFEQGPHSASALSNDERTRGLALLCCSKPQSDLEVDVREIAGVDGVQVKKLPCRVAALERRADDVIVLKLQLPANERLQYLAGQYIEFILKDGARRSYSMATAPHEEGPIELHIRHMPGGKFTDHVFGPMKERDILRFEGPLGTFFLREDSDKPIVLLASGTGFAPIKAIIEHAHHVKLERPMTLYWGARRKKDLYLLDAAEQWAKEIPNFKFVPVLSEPDASDAWTGRTGFVHRAVIEDLPDLSGHQVYACGAPVMVESAQRDFTQHHRLPADEFYADSFTSAADLAHTV

SEQ ID NO: 29234 - protein, 559 aa, Burkholderia pseudomallei K96243
MYQYDQYDQTIVDERVAQYRDQVRRRLSGELSEDEFRPLRLQNGLYMQRHAYMHRIAIPYGNLRSVQLRMLARIAREHDRGYGHFSTRSNIQYNWVKLEETPEILAKLASVQMHAIQTSGNCIRNITADQFAGVAQDEELDPRPWAEILRQWSTFHPEFAWLPRKFKIAVSGSKADRAAVQIHDLGVYLKKNDAGEVVASILAGGGLGRTPIVGAIIRENLPWQHLLTYCEAVLRVYNRYGRRDNLYKARIKILVKALSPAKFAQQVEAEWQHLKDGPSTLTQAELERVSQFFQPPAYEKLADTDASFEQHLLENRAFARWVERNVAPHKVPGYAAVTLSLKNHRVAPGDASAEQMEQVADWADAYSFGELRVSHEQNLILANVKKRDLFAVWEKAKAAGFATPNVGLLTDIIACPGGDFCSLANAKSIPIALAIQQRFDDLDYVYDLGDVSLNISGCMNSCGHHHVGNIGILGVDKDGAEWYQVSLGGEQGTGAGGARLGRVIGPSFSAEEVPDVISKLIDTFVESRIDGERFIDTYERIGIAPFKERVYAARQTAHA

SEQ ID NO: 29235 - protein, 128 aa, Burkholderia pseudomallei K96243
MQRHMLKSKIHRAAVTHCELHYEGSCAIDEDLLEAANIVENERIDIWNVNNGERFSTYAIKGERGSGMISLNGSAARRAQLGDLVIIAAFAMIDEQELKAGWKPDLVFVDEDNKIKGSRDHVPTQNWT

SEQ ID NO: 29236 - protein, 241 aa, Burkholderia pseudomallei K96243
MTTQILIVDDDQELRDLLRDYLVRQGIEVSVLHDAASLEKRLERERPDLIVLDLMMPGVDGLTALRQLRAAGDDIPVIMLTARADDVDRIVGLELGADDYLGKPFNPRELLARAQAVLRRRRASPSAAAPEQREPYAFGRFVLDFQARTLSVDSKPATLSSSEFALLKIFVNHALRTLTRERLLELLHGPEYDGTDRGIDVQVWRLRRILETDPSTPRFIQTVRGRGYVFVPNGEAHAQTH

SEQ ID NO: 29237 - protein, 472 aa, Burkholderia pseudomallei K96243
MSRLIVVSNRVAAGQDARPTAGGLAVGVLDALKETGGVWFGWNGEIAGAPEEPVIERDGNVTYATVGLTRRDYDQYYRGFSNATLWPVFHYRGDLARFDRQEYAGYLRVNCALAKQLCALVQPDDIIWVHDYHLLPFAHCLRELGVKNPIGFFLHIPFPSPEVLRTVPPHEELMKFMCAYDVIGLQTESDKQAFVDYIERRGLGTSSEDGILHAHGRVVKVAAYPIGIYPDAIGKAAIEYGSRKAVKALRDTMRERKLVISVDRLDYSKGLVERFQAFERMLANAPGWQGRVSLVQIAPPTRSDVQTYQRIRQTLEGEAGRINGRFAQLDWTPIQYLNRKYERNLLMALFRLSQVGYVTPLRDGMNLVAKEYVASQDPNDPGVLVLSEFAGAAAELPGALLVNPFDLSQMAESLERALAMPLEERQARHAENIARLRKNDLSVWRDSFLTDLRSVATAASVTQRAGRRVANA

SEQ ID NO: 29238 - protein, 516 aa, Burkholderia pseudomallei K96243
MNLTATFVFVLFFVGVTIMGFLAANWRRGNLAHLDEWGLGGRRFGTVVTWFLLGGDLYTAYTFVAVPALVFGAGAMGFFALPYTILIYPFAFVVFPKLWSIAKRHGYVTAADFVSARYGSRSLALAVAVTGIVATMPYIALQLVGIEVVIGGLGFDTKGFIGDLPLIIAFAILAAYTYTSGLRAPAMIAIVKDILIYITIAAAVIVIPAKLGGFGHIFGAVPPAKLLLKAPDAASLNGFSAYTTLAIGSALALFLYPHSVTAILSSSSGNTIRRNMAMLPAYSFVLGLLALLGYMALASGVKDMPEYAPYFKAFGPNFAVPALFLHFFPSWFVGVAFAAIGIGALVPAAIMSIAAANLYTRNIHREFVNRNMTHDQETHVAKLVSLIVKVGAVAFILGLPLTYAIQLQLLGGIWIIQTLPAIVLGLYTRVLDYRGLLAGWAAGLVCGTWMAISLKLASSIFTIHLFGHAIPGYAAVWALAVNLVVSIVVSVLVRAFGIAHAEDRTRPEDYLDVVES

SEQ ID NO: 29239 - protein, 482 aa, Burkholderia pseudomallei K96243
MSDSVAKPVDATFDQFGLAAEILKAIAEQGYTTPTPIQAKAIPVVLSGRDVMGAAQTGTGKTASFSLPIIQRLLPQANTSASPARHPVRALILTPTRELADQVAANVHAYAKHTPLRSAVVFGGVDMNPQMAELRRGVEILIATPGRLLDHVQQKTANLGQVQILVLDEADRMLDMGFLPDLQRILNLLPKERQTLLFSATFSPEIKKLASTYLRNPQTIEVARSNAAASTVTQIVYDVAEGDKQAAVVKLIRDRSLKQVIVFCNSKIGASRLARQIERDGIIAAAIHGDRSQSERMQALDAFKRGEIEALVATDVAARGLDIAELPAVINFDLPFNAEDYVHRIGRTGRAGASGDALSLCSPNERKQLADIEKLIKRTLSLETLALDLPRHRHDDRGGRRERDRDERRGAPAGRRSAGGERTHHPRREAPIDDFFLKPYVPSPSANQPDEAKPVQPEKKAPKQPLAALLGGFGMPRKTSSS

SEQ ID NO: 29240 - protein, 596 aa, Burkholderia pseudomallei K96243
MSVKPTLSKPIGGQDASSPAVVMRRLWPYVKPLVWVLVAGVLAMAAVAATEAGIPALLKPLLDHGFGSKGDMTTKLYVPAAVVGLALARAIAQYASGYLLQYVSNRILLDLRIQMFERMIHTGVSFFQRETASTVINAVVFEVNQVLSVLMGVTITLVRDSLTVVFLLGYLFYLNWRLTLIVAILLPCIGWLVGKINRRLRRLNREHQTLTNQLAYIVEETVGGYKVVKVHNGEPYEIGRFNELSRKLRGYSMRMTVSGGLAQPLTQFLASIALAVVLTIAVVQSANDQTTVGGFVAFVTAMLLIISPLKHLMDVNQPLQRGMTAAELIFGLIDEPREPEGGGKPLARASGAIEFSHVSFSYGMSRDGRQTLDDVSFTVAPGEMVALAGPSGSGKTTLVNLLPRFFDPSSGSVRVDGVALPEYSLRDLRNQIAMVSQDVVLFNDTIAANVAYGQAPERDRVEAALRAANLWETVTAMPDGIDTLVGDNGMRLSGGQRQRLAIARAIYKDAPILILDEATSALDSESERHVQAALETLMKGRTTLVIAHRLSTIERADRILVLEGGKIVESGSHRELLEQGGLYAHLHRIQFQQDAG

SEQ ID NO: 29241 - protein, 587 aa, Burkholderia pseudomallei K96243
MNMPSAEFSTSESLSPQKTGSIGATVLMKALADENVEFIWGYPGGSVLYIYDELYKQDKIQHVLVRHEQAAVHAADAYSRSTGKVGVCLVTSGPGVTNAVTGIATAYMDSIPLVVISGQVPTAAIGQDAFQECDTVGITRPCVKHNFLVKDVRELAQTVKKAFYIARTGRPGPVLIDIPKDISKTPCEYEPVKNVSLRSYNPVTKGHSGQIRKAVSLLLSAKRPYIYTGGGIILADASRELNQFADLLGYPVTNTLMGLGGYRSSDRKFLGMLGMHGTYEANMAMQHCDVLIAIGARFDDRVIGDPAHFASRPRKIIHIDIDPSSISKRVKVDIPIVGDVKEVLKELIEQLQTAEHGPDADALAQWWKEIEGWRGTDCLKYDRASEIIKPQYVVEKLWELTDGNAFVCSDVGQHQMWAAQFYRFNKPRRWINSGGLGTMGFGLPAAMGVKMAHPDDDVVCITGEGSIQMCIQELSTCKQYDTPVKIISLNNRYLGMVRQWQQIEYSKRYSHSYMDALPDFVKLAQAYGHIGMRIEKSADVEPALKEALSLKDRTVFLDFQTDPTENVWPMVQAGKGITEMLLGSEDL

SEQ ID NO: 29242 - protein, 384 aa, Burkholderia pseudomallei K96243
MPTTPTLLSRLPEVGTTIFTVMSALAAEKGAVNLGQGFPDFDCDPRIVDAVAHAMRDGRNQYPPMAGVAPLREAIADKIERLYGRRYDAATEITVTAGATQALLTAILCAVHPGDEVIVIEPTYDSYLPSIELAGATPVFVTLNAPDYAIPFDKLAAAITPKTRAILINTPHNPTGTVWREADMRALEDIVRGTGLLIVSDEVYEHMVYDGARHESVARYPELAARSIIVSSFGKTFHVTGWKIGYVAAPAPLTAEFRKVHQFNVFTVNTPMQFGLADYLRDPEPYLTLPAFYQQKRDFFRAGLANTRFALLPCAGTYFQCVDYSAISDLPEAEFAKWLTTEIGVAAIPVSAFYHEPHESGVVRFCFAKREDTLATALERLARL

SEQ ID NO: 29243 - protein, 454 aa, Burkholderia pseudomallei K96243
MKNLQRHLSARHIRFLALGSAIGTGLFYGSASAIRLAGPAVILAYIVGGAAVYMVMRALGEMAVREPVPGSFGHYATENLGPFAGFVTGWTYTLEMVIVAIADITAFGIYMGFWFPHVPQWIWVLAIVAIICGLNLCHVKVFGELEFWLSIVKVGAIVAMIGGGAAILFTGMRLGSGGAPSLANLWSHGGFLPNGVGGLVASLSVVIFAYGGIEVIGMSAGEAKEPERAIPRAINAVPMRILLFYVLTMIVLMSIFPWTGVGANGSPFVQIFSALGVRSAAEILNLVVISAAISAINSDIFGAGRMMYAMALQGQAPRALAAMSARGVPWVTVLVMAGALLVGVVLNYLMPKDVFLMVAASATFATVWVWLMILLSQIAMRRRLGAAEVAALKFKVPFWPVGPALTIAFMAFVIAMLGYFDDTRVALFVGAAWLAILALVFYTRIRPRLAAVAR

SEQ ID NO: 29244 - protein, 605 aa, Burkholderia pseudomallei K96243
MYRYTEFDKAFVRNRAAQFRDQLERWRQGALSEDAFRPLRLQNGWYVQRHAPMLRVAVPYGELSSAQIRMLARIARDYDVPEPARYRAACDAQARLGTVRLPTRNAHFTTRTNVQFNWIPLEKAADVMDLLATVDMHGIQTSGNCIRNISCDERAGVAPDEIADPRPFAEVMRQWTTLHPEFAFLPRKFKIAITGAADDRAATDWHDVGLRLVRDAAGELGFRVSVGGGMGRTPMTATLVRAFVPWRHVMNYIEAIVRVYNRYGRRDNRYKARIKILVKAEGQRYIDDVDEEFRQIVEHDGGPHTIEQAEFDRVGASFVPPVPPPCAAGRHAKTDIDADMDAALARMRTLAGAQPAFARWLERNVAPHRDPARRIVTLSFKRRHQAPGDASPEQLDALAHLAERFSAGEARVTHAQNVVLPWVRAIDLHALWEAARDAGLASANVRLLTDMIACPGGDFCALANARSIPIADAIAERFDDLDELHDIGDVDLHVSGCINSCGHHHSGHIGILGVDKDGDEWYQVTLGGSDGTAANGPAQPGKVIGPSFSADEIVDVVDALVATYLRVRRTEAGRVERFIDAYRRVGPEPFKAAANAARHPETSVA

SEQ ID NO: 29245 - protein, 628 aa, Burkholderia pseudomallei K96243
MNNNMFSKAAVWLVIALVLFTVFKQFDKPRVQEGVSYSQFMDDAKNGKVKNVVVQGRNLTVTPADGQKYQIVSPGDIWMVGDLMKYGVQVSGKADDEPNALVSALYYLGPTLLIIVFWFYMMRQMQGGGKGGAFSFGKSRARLIDENNNAVNFSDVAGCDEAKEEVSELVDFLRDPQKFQKLGGRIPRGVLLVGPPGTGKTLLARAIAGEAKVPFFSISGSDFVEMFVGVGAARVRDMFEQAKKHAPCIVFIDEIDAVGRHRGAGMGGGNDEREQTLNQMLVEMDGFEANSGVIVIAATNRSDVLDKALLRPGRFDRQVYVGLPDIRGREQIMRVHLRKVPIANDVDAAVIARGTPGFSGADLANLVNEAALFAARRGKRIVEMQDFEDAKDKIFMGPERKSAVIREEAKRATAYHESGHAVIAKLLPKADPVHKVTIIPRGRALGVTWQLPEHDNETYSKDYLLDRLAILFGGRVAEELFLNLVSTGASDDFNKATQTARAMVARFGMTDALGPMVYVDDENDGGPFGRGFTRTISEATQQKVDAEIRRVLDEQYGLARRLLEENRDKVEAMTAALMEWETIDADQINDIMEGRPPRSPKSVPPAGDPSSGGSSGAEVKPGNATAPA

SEQ ID NO: 29246 - protein, 392 aa, Burkholderia pseudomallei K96243
MTEAVIVSTARTGLAKSWRGAFNMTHGATLGGHVVAAAVERAKLDPARVEDVLIGCANPEGATGANIARQIALRAGLPVGVPGMTVNRFCSSGLQTIALAAQRVIAGEGDVFVAGGVESISCVQNEMNRHMLREGWLDAHKPEIYWTMLQTAENVAKRYGISKARQDEYGVNSQLRATAAQAAGRFNAEIVPITVRAGVADKATGRLYTKEVTLAADEGIRPDTTLEGVAKIRAALPGGVITAGNASQFSDGAAACVVMNAKVAEREGLAPLGIFRGFAVAGCEPDEMGIGPVYAVPKLLKQAGLKVSDIDLWELNEAFAVQVLYCRDTLGIPDDRLNVNGGAIAVGHPYGVSGARLTGHALIEGKRRGAKYVVVTMCIGGGQGAAGLFEVV

SEQ ID NO: 29247 - protein, 412 aa, Burkholderia pseudomallei K96243
MKPIQKSNKLLNVCYDIRGPVLEHAKRLEDEGHRIIKLNIGNLAPFGFDAPDEIIQDMIRNLPASSGYSDSKGVFAARKAIMHYTQQKGVHGVGLDDIYIGNGASELIVMATQALLNDGDEVLLPAPDYPLWTAAVSLSGGTPVHYVCDESNRWMPDPDDIRRKITPNTKALVVINPNNPTGALYSDALLIELIAIAREHGLIIFADEVYDKIVYDGKSHTALASLAEDVITVTFNSLSKSYRSCGYRAGWMSVAGLTAENRRRAHDYLEGLGILSSMRLCANVPGQYAIQTALGGYQSINELIMPSGRLYKQRELAYDMLTSIPGVSCVKPEAALYMFPRLDPKLYPIENDQQFILELLLRERVLLVQGTGFNWPTPDHFRVVFLPNVDDLTDSIERIARFLDGYRKRNSV

SEQ ID NO: 29248 - protein, 876 aa, Burkholderia pseudomallei K96243
MVAIRKLEVSFMRIDKLTTKFQEALSDAQSLAAGRDNQYIEPVHVLAALVAQQDGSARSLLSRAGVHIQALQGALNEAISRLPQVTGTGGDIQVGRELAGLLNQADKEAQKLNDTFVASEMFLLAVADDKGEAGKLARQHGLTRRALESAIAAVRGGSQVHSQDAESQREALKKYTVDLTERARAGKLDPVIGRDDEIRRSIQILQRRTKNNPVLIGEPGVGKTAIVEGLAQRIVNGEVPETLKNKRVLSLDMAALLAGAKYRGEFEERLKAVLNDIAKDEGRTIVFIDEIHTMVGAGKAEGAMDAGNMLKPALSRGELHCIGATTLDEYRKYIEKDAALERRFQKVLVDEPSVEATIAILRGLQEKYELHHGVEITDPAIVAAAELSHRYITDRFLPDKAIDLIDEAASRIKMEIDSKPEEMDKLDRRLIQLKIEREAVKKEPDEASQKRLALIEEEIERLGREYADLDEIWTAEKAAVQGSAQLKEEIDKVRADIARLQREGKLEKVAELQYGKLPQLEARLKQVTQAEESEQHNPTRPRLLRTQVGAEEIAEVVSRATGIPVSRMMQGEREKLLHIEEKLHERVVGQNEAIDAVADAIRRSRAGLADPNRPYGSFLFLGPTGVGKTELCKALAGFLFDSEEHLIRIDMSEFMEKHSVARLIGAPPGYVGYEEGGYLTEAVRRKPYSVILLDEIEKAHPDVFNVLLQVLDDGRMTDGQGRTVDFKNTVIVMTSNLGSQLIQSMSGSPQEEIKDAVWVEVKQHFRPEFLNRIDDVVVFHSLDRGNIQAIAKIQLARLHDRLAKLDMALDVSEAALEQIGKVGYDPLFGARPLKRAIQQEIENPVAKLILAGRFGPKDVIPVDMQDGRFVFERVVH

SEQ ID NO: 29249 - protein, 393 aa, Burkholderia pseudomallei K96243
MTDVVIVSAARTAVGKFGGSLAKIAAPELGASVIRAVLERAGVKPEQVSEVILGQVLTAGSGQNPARQALIAAGLPNAVPGMTINKVCGSGLKAVMLAANAVVAGDAEIVVAGGQENMSAAPHVLPGSRDGFRMGDAKLVDSMIVDGLWDVYNKYHMGITAENVAKEYGITREAQDQFAALSQNKAEAAQKAGRFDDEIVPIEIPQRKGEPLRFATDEFVRHGVTAESLASLKPAFAKEGTVTAANASGINDGAAAVLVMSAKKAEALGLEPLARIKAYANAGVDPSVMGMGPVPASRRCLERAGWSVGDLDLMEINEAFAAQALAVHKQMGWDTSKVNVNGGAIAIGHPIGASGCRILVTLLHEMLKRDAKRGLASLCIGGGMGVALALERP

SEQ ID NO: 29250 - protein, 394 aa, Burkholderia pseudomallei K96243
MQREVVVVSGVRTAIGDFGGSLKDFAPTELGARVVREVLSRAQVSGDEVGHVVFGNVVHTEPKDMYLARVAAINGGIAQHAPALTVNRLCGSGLQAIVSATQNVLLGDADIAVAGGAENMSRAPYSVPAARFGQRMGDAKLVDMMIGALNDPFQSIHMGVTAENVAAKYGITRDAQDALALESHRRASHATKSGYFKDQILPIEIASRKGTVVFDADEHVRHDASLDDFTKLKPVFAKENGTVTAGNASGINDAAAAVVLMERGVADKRGAKPLARLVSYAHAGVDPAYMGIGPVPATKKALERAGITVADLDVIEANEAFAAQACAVSNALGLDPAKVNPNGSGISLGHPIGATGALITVKALYELQRIGGRYALVTMCIGGGQGIAAVFERL

SEQ ID NO: 29251 - protein, 325 aa, Burkholderia pseudomallei K96243
MKHRIVVYKPLPDDVLAALRARADVVLAEGADALARALPDADGALGASLRITPELLDRAPRLRAWSTISVGFDNFDVADLTRRGIVLAHTPDVLTEATADTVFALILASARRVVELAEYVKAGQWRQSIGEALYGTDVNGKTLGIVGLGRIGTALARRAALGFRMPVLYTSRSAHPQAEAQFGARRVELDELLATADFVCLQVPLSPQTRHLIGARELAKMKRDAILVNASRGPVVDEAALIDALRAGAIRAAGLDVFEHEPLAADSPLLSMRNVVALPHIGSATRETRHAMARCAAENVIAALDGTLARNIVNRDVLQRTPSTP

SEQ ID NO: 29252 - protein, 404 aa, Burkholderia pseudomallei K96243
MKPKHILLAYSGGLDTSTALHFLKRHFDCRVTAYCANLGQKEDWERMKRRAAIAGADELVIEDLRETFIGDFVFPALKANASYERDYLLGTPLARPAIVKGLIEYARKHDVDCLSHGCTQKGNDQVRFEMAAKILAPDLPTVAPWRIWSLQSREDLFAYCQQHGIPVESRPDNLLSHDENLVHITTEGDYLESVANAFDWRDANWITPPTQAPDAIETITLGFRRGVPVSVDGAALGPVELVERLNEAGARNGVGFQDIIENRINGLKVRGVFENPALTILHAAHRKLEKITLGRDVERLRNLVSDDYGDIVYRGLWFSDERLCLQALIDESQKYVSGDVKVQLYKGSCTPCAVESEQSLYSRELVTLHAGRAISGEDATGFLNTLGLRIGIEAARAGNTGAGA

SEQ ID NO: 29253 - protein, 482 aa, Burkholderia pseudomallei K96243
MNPSAAVFSSAAARAASACPGLVRIVAARDGGLCRIKLPGGALTAAQARAVAAVARAFGSGVIEATNRANLQVRGVKAGREASASRALIDAGLGPLMDGASAASLEACAAARDDVRNVMLSPTAGRDPDALVDSAALAARLLAMLQTEPRCAALSPKFSVLLDGGERLAALDHPHDIWLSALRDAHGAPVDTQFAIGLAGCPPVDGGQAAPGAPCAGALAAVAPEHAVECVRALVTSFVELAPAGATRMRELLATCPPDAFLSHVESKLSESKQPFALRRDAHLAGWRRARVDAALRLGILPERDPARCAVGAQPPLGRLDAAALAALAALADTHGDGTLRITPWQGVMLPAVARAAAPEALARLAALGFVCDAAAPLAHIVACAGSRGCARSPADTKAHALALAARLAAPVDVHVTGCARSCALPHAAAHTLVASAASRYDLYRRDGATGFGRAVARQLTIDQAADALARGARPSQDDLDA

SEQ ID NO: 29254 - protein, 271 aa, Burkholderia pseudomallei K96243
MKFKPFATWLLGLSLVAAHAAAHADRLDDIRKAGVLRVATFDSNPPFGFVDPRTNRIVGLDVDYAQALADRLGVKLKLQPTNPANRIPFLTSGKVDLVLANFTITDERAKQVDFSVPYFASGQQFLAKKGVLKSADQLNRLRIGADKGTTNEVTLREKYPQATIVAYDDTPFAFAALRAGNVQAITQDGPKLIGLLANVPDKQNYEVPAFSISNDYMGVGAPKGEPRLVAFVNETLTDLEASGRAGRIYDAWFGPNTKTPLARIFKIGDKR

SEQ ID NO: 29255 - protein, 569 aa, Burkholderia pseudomallei K96243
MSTERNDATAPSNFIRNIIDDDNRTGKWSGRVETRFPPEPNGYLHIGHAKSICLNFSVARDYGGVCHLRFDDTNPEKESVEYVNSIVDAVRWLGFDWQKAGVDHQYFASDYYDKLYEFAELLIQRGCAYVDSQSADEMRTNRGSLTEPGTPSPFRDRSPDENLALFRRMKAGEFAEGEHVLRAKIDMSSPNMNMRDPVIYRIRYAHHYRTGDKWCVYPMYDYTHCISDALEGITHSLCTLEFEDHRPLYDWVLNQLADAGVFARPLPQQIEFSRLNLTYAITSKRKLLQLVTEGHVDDWDDPRMPTIVGVRRRGFTPESIQLFCERIGVTKVDSWIDMSVFEGALRDDLDDKAPRTVAVLDPLKLVIDNYPQGQSEECTAPVHPHHPERGQRTFPISRELWIEREDFSEHPPKGYFRLFPGNKVRLRYGYVIECTGADKDEHGNVTAVHCNYYPDSKSGTEGANNYKVKGNIHWVSAAHACPAEVRIYDRLFKEPHPDAGGRNFLEALNPDSKKIVQAYLEPGARDALPEARYQFERHGYFVADRVDSKPGQPVFNRIVGLRDSWGKPA

SEQ ID NO: 29256 - protein, 295 aa, Burkholderia pseudomallei K96243
MDVGFCGPGLMGAPMIRHLLTAGHRVHVWNRTRAKADALAGCGAQVVDTPAELAARAQTVMLCVLDAQAVGDVVFGASGVLAGDAATRRVRRIVDHSSIAPAATRAYAARAAALGVSWIDAPVSGGVPGAEAGTLAVMAGGPQADVDAVRVLIGAYAARVTHLGDAGAGQTAKLCNQAIVTATVTAIAEAVGLAQASGIDAARLAEALAGGWADSVLLQTFVPRMTRAGHPPIGALKTFQKDVDAIADAARDAGAVMPVASTVQQVLRLGAAMGLAQADFAAFIDIVRPQAKRGA

SEQ ID NO: 29257 - protein, 516 aa, Burkholderia pseudomallei K96243
MTSSHSLSPLNAIADEALGLPAAAAQPAASEAGDACDAASDEPTFASLGLSPEIVSALQAAGYVKPTPVQQRAIPAGIAGRDLLVSSPTGSGKTAAFMLPAIERFAQLQKAQAQQPRAPREGQPGERRGRRPQPVARPGLLVLTPTRELAMQVTTAASTYGKHLRRLRTVSILGGVAYGQQLMLLAKNPEILVATPGRLLDHLERGRIDLSELKMLVLDEADRMLDMGFIDDIDTIVAATPATRQTMLFSATLDGKIGSLTNRLLKDPERIEITQKIESRSNIAQTVHYVDDRDHKDRLLDHLLRDVALDQAIIFTATKIDADQLAGRLADAGFQSAALHGDLPQGARNRTIRALRERRVRVLVATDVAARGIDIPGITHVFNYDLPKFAEDYVHRIGRTGRAGRSGTAVSLVHHAEQGALKRIERFVRAPLPVNVVEGFEPRKAPPPRNDRGNGRGRPGGNGNGGRRFGGKPGGGHGGGRSGGWSGKPGGGNREAYGARRGDGQRNGPRRGNSAA

SEQ ID NO: 29258 - protein, 416 aa, Burkholderia pseudomallei K96243
MALIVHKYGGTSMGSVERIKNVAKRVAKWHQAGHQMVVVPSAMSGETNRLLGLAKEISSQPSPRELDMIASTGEQVSVGLLSIALQDIGVEAVSYAGWQVPIKTDSAYTKARIHSIDDERVRRDLDAGKVVIITGFQGVDPDGHITTLGRGGSDTSAVAVAAALEADECLIYTDVDGVYTTDPRVVEEARRLDSVTFEEMLEMASLGSKVLQIRSVEFAGKYRVKTRVLSSLTDPQIPLDEEMRSGTLITFEEDETMEKAVISGIAFQRDEARIAVMGVPDKPGIAYQILGPVADANIDVDMIIQNQSVEGKTDFTFTVGRGDYQKAMDILTNQVKGHVNAEQVLGDPKVSKVSVVGVGMRSHVGVASTMFRTLSEEGINIQMISTSEIKISVLIDEKYMELAVRALHKAFELDQA

SEQ ID NO: 29259 - protein, 407 aa, Burkholderia pseudomallei K96243
MNNDIPHLPIYMDYSATTPVDPRVVDKMVPYLREQFGNPASRSHAYGWDAERAVEEAREQVAALVNADPREIIWTSGATESDNLAIKGAAHFYQGKGKHIVTVKTEHKAVLDTCRELEREGFEVTYLDVKDDGLVDLDVFKAALRPDTILVSVMHVNNEIGVIQDIATIGEICREKGIIFHVDAAQATGKVEIDLAKLKVDLMSFSAHKTYGPKGIGALYVRRKPRVRIEAQMHGGGHERGMRSGTLPTHQIVGMGEAFRIAREEMATENERIRMLRDKLLRGLSEIDETYVNGDLEHRIPHNLNISFNFVEGESLIMAIKDVAVSSGSACTSASLEPSYVLRALGRNDELAHSSIRFTVGRFTTEQEVDYVIDLLKSKIAKLRDLSPLWEMHQEGIDLSTIEWAAH

SEQ ID NO: 29260 - protein, 263 aa, Burkholderia pseudomallei K96243
MTNEGIAMNRSEPLLQVFDLSVEVAKRRVLQSVSLAVPAGALVVLMGANGSGKSTLGMTLAGHPAYRATHGHVRFGGQDLLAMSVQERARAGLFLSFQAPPDIPGVKNNLFVRTALNAVREARGDTALDALDFLGDARAAAAQVGLSDAMLNRSMNEGFSGGERKRNELLQLALLRPRLAMLDEIDSGMDVDGVRAAVALIGRLREQGTAFVIVSHYLQMIEALAPDTVLLLDRGRIAESGDLALARDIAAKGFARSDALAQA

SEQ ID NO: 29261 - protein, 469 aa, Burkholderia pseudomallei K96243
MSRLIIVSNRVAPISEGEPAAGGLAIGVYDALKETGGMWFGWSGEVIASGVPQIRIEEHGPVTFATIGLSRRDYDQYYRGFSNATLWPAFHYRADLIQFDRHEFEGYSRVNVWLAQQLVPLLRDDDVIWVHDYHLIPFARALRTAGVKNRIGFFLHIPFPAAQVLVNVPPHRELVEALCSFDLLGFQTDTDLRAFFEYVEYEAGGTVDRAAHPARVDAFGRTLRAAAYPIGVYPDEIAALAKAGENGRAVKSLAASLRGRQLVMSVDRLDYSKGLVERFRAFEKLLEHETSFRNRVSFLQIAPSTRADLRAYQDIRRQLEGESGRINGRFAELDWAPILYIHRQYERPVLAALYRLARVGYVTPLRDGMNLVAKEYVSAQDPDDPGVLVLSRFAGAACELTGALIVNPIDIGGMADALSRALSMPLAERRARHADMLARLRENNVSVWRDHFLRDLGRQRAASGAGRGR

SEQ ID NO: 29262 - protein, 299 aa, Burkholderia pseudomallei K96243
MNAPAPTGFRCGMIAIVGRPNVGKSTLMNALVGQKISITSRKAQTTRHRITGIHTLDDAQYIFVDTPGFQTRHSTALNRSLNRAVTSTLTSVDAILFVIEAGRFGPDDQKVLDLIPPGTPTLLVANKLDRVSDKDTLYPFFQKMGGLREFAEIVPLSAKHPEDIQRLMNTIKPYLPEGDAIYGEDDLTDRSSRFLAAEILREKVFRWTGDELPYTSTVVIDKFEEEGRLTRVFATILVERDSHKAMVIGKKGAKLKQISTEARQDMEKLFDGPVYLETFVKVRSGWADNEAGLRAYGYE

SEQ ID NO: 29263 - protein, 329 aa, Burkholderia pseudomallei K96243
MQKILVARPIFPDVIERLKQYFDVDWNDGDALAPDALKARLADKDGALTAGDMIDASVLAAAPRLRVVSNMAVGYNNFDIGAFDAAHVLGTNTPDVLTETTADFGWALMMAAARRITESEHWLRAGQWRKWSYDSFLGADIHGATLGVLGMGRIGQALARRARGFGMRVIYHNRSRVAPEIEAALNAEYVPKAALLAQADHVVLVLPYSAQSHHTIGAAELALMKPSATLTNIARGGIVDDAALADALREKRIAAAGLDVFEGEPSVHPALLDVPNVVLTPHIASASEGTRRAMANLAADNLIAALGAGPRAGRPPNPINPGVLGKARI

SEQ ID NO: 29264 - protein, 227 aa, Burkholderia pseudomallei K96243
MIRRPIIDPEVLPIETTGADLPVVRPSSMTPDGLRERFAEPPEWTQEPAEAQLAHGVDPRSAAVLVPLVVRERGLTVLLTQRADHLNDHAGQISFPGGRREPDDRDANATALREAREEIALAHERVELLGALPDYLTGTGFCVTPVVGLVHPPFTVQPDTLEVAEIFEVPLDFLMNPAHHQIRVLRWEGGERRFFAMPYPRGPVGGQYFIWGATAGMLRNLYRFLSA

SEQ ID NO: 29265 - protein, 67 aa, Burkholderia pseudomallei K96243
MDTGIVKWFNDAKGFGFITSDNGGEDLFAHFSEIRMEGFKTLKENQRVSFEVKTGPKGKQAANIQAL

SEQ ID NO: 29266 - protein, 416 aa, Burkholderia pseudomallei K96243
MRARGARPLFAFLPRFDSTMNTAADSLLRLASRVDAIEPFYVMEIVKEAAVLERAGRDIIHMSIGEPDFTAPEPVVDAAAAALRRGVTQYTSALGIAPLREAIAAHYARAHGLSIAPERIVVTAGASAALLLACLALVGRDDEVLMPDPSYPCNRHFVATAEGRAVLVPSGPETRFQLTADDVKTRWGERTRGVLLASPSNPTGTSLEPAELGRIIDAVRARGGFSIVDEIYQGLSYDGAPVSALSFGDDVVTVNSFSKYFNMTGWRLGWLVVPPALVGTFEKLAQNLFICPSALAQHAALACFEPDTLAIYEARRAEFRRRRDFIVPAIESLGFKVPVMPDGAFYVYAQCGGVAHPAAGDSAALVNAMLHDAGVVLVPGMDFGVHAPRDYIRLSYATAYSRLEEAVERLGKLFGR

SEQ ID NO: 29267 - protein, 334 aa, Burkholderia pseudomallei K96243
MRVILFSSRQYDHDSFDAANQSFGYRLHFQPSHLDAETAILARGYEVVCPFVNDTLDAAVLETLAAGGTRVIALRSAGFNHVDLAAAARLGLTVVRVPAYSPHAVAEHAVALILALNRRLPRAVARTREGDFSLNGLLGFDLFGKTVGVIGTGLIGSVFARIMTGFGMRVLAHSLPPHDDALIALGVRYVPLDALLAEADIVSLHCPLMPATHHMIDADALARMKPGAMLINTSRGGLVDTQALIDALKTGQLGHLGLDVYEEESGLFFEDHSDRPLQDDVLARLLTFPNVIVTSHQAFFTREALAEIAHTTLSNIRAWQDGAPQNVVDAGRPG

SEQ ID NO: 29268 - protein, 331 aa, Burkholderia pseudomallei K96243
MRRCAPQYSPPFSMAHDGSQMNHHNYLDSARQVFDIESRALASLSARVGDSFGDAVDAILRSSGRVVVCGMGKSGIIGRKIAATFASTGTPSFFMHPGEAYHGDLGMVTSADTFLAISYSGETDEVIKLIPFLKSNRNYLVALTGNARSTLAQAAHSHLDAGVEQEACPLQLAPTSSTTAALAMGDALAVTLMKARGFRPENFARFHPGGSLGRRLLSKVDDEMTVDGLPFVDERAPAIDVLQAMTRGRLGLAIVRRETGFGIVTDGDVRRAIEAYGDTLFRRAASDLMSADPAMVPLGTRVEDALLMMEARRINALLVFDGEDVVGVFKK

SEQ ID NO: 29269 - protein, 189 aa, Burkholderia pseudomallei K96243
MKNRALFLDRDGVINRDDGYVFEIEKFVFLDGIFELAGAAKALGYLSIVVTNQAGIGRGYYSEDDFFRLSDWMKGVFATEGAPIDGVYFCPTHPEHGIGRYKVESRFRKPNPGMILAAQHDFDLDLGASLLVGDKESDIQAGSTAGVGTTLLICDRDASRVATAASAVVRNPRDVIPFLTGPGPDAGSF

SEQ ID NO: 29270 - protein, 650 aa, Burkholderia pseudomallei K96243
MGKIIGIDLGTTNSCVAIMEGNQVKVIENSEGARTTPSIIAYMDDNEVLVGAPAKRQSVTNPKNTLFAVKRLIGRRFEEKEVQKDIGLMPYAIIKADNGDAWVEAHGEKLAPPQVSAEVLRKMKKTAEDYLGEPVTEAVITVPAYFNDSQRQATKDAGRIAGLEVKRIINEPTAAALAFGLDKAEKGDRKIAVYDLGGGTFDVSIIEIADVDGEMQFEVLSTNGDTFLGGEDFDQRIIDYIIGEFKKEQGVDLSKDVLALQRLKEAAEKAKIELSSSQQTEINLPYITADASGPKHLNLKVTRAKLEALVEDLVERTIEPCRTAIKDAGVKVSDIDDVILVGGQTRMPKVQEKVKEFFGKEPRRDVNPDEAVAVGAAIQGQVLSGDRKDVLLLDVTPLSLGIETLGGVMTKMINKNTTIPTKHAQVYSTADDNQGAVTIKVFQGEREMAAGNKLLGEFNLEGIPPAPRGVPQIEVTFDIDANGILHVGAKDKATGKENKITIKANSGLSEAEIEKMVKDAEANAAEDHKLRELAESRNQGDALVHSTKKALTEYGDKLEAGEKEKIEAALKELEDVLKNASSDKAAIDAKVEAVATASQKLGEKMYADMQAQQAGAAGAAGAAAEGASAQGGAQPADDVVDADFKEVKKD

SEQ ID NO: 29271 - protein, 402 aa, Burkholderia pseudomallei K96243
MTQMTAEQMARVKATAPVLAEHGATITKHFYQRMFGRHPELKNVFNQTHQKTGSQPETLAKAVYAYAANIDNLGALGGAVSRIAHKHASLNIRPEHYPIVGENLLASIVEVLGDAVDADTLEAWRIAYGQLAAILIGAEANLYENAAWSGFRPFKVAKKVRESDEITSFYLTPADGGAAPGFEPGQYISVKRFVGDMGVDQPRQYSLSDAPHGKWLRISVKREAGHSEAVPAGKVSTLMHDGVDVDSVVEVTAPMGDFTLNRHATTPVVLISGGVGITPMMSMASTLVAAGSEREVRFLHACRAANVHAFRDWLNDTTDAHPNVKRAVFYEVVGPNDRVGVDHDHEGRITPAALERHALVPDADYYICGPIAFMKQQRDALVALGVAPERVQTEIFGSGALE

SEQ ID NO: 29272 - protein, 379 aa, Burkholderia pseudomallei K96243
MHIGVPAETRANEARVAATPETVRKYAAAGHRVTVERGAGAGASFPDDAYAAAGAELADAAAAFGADIVLKVQAPTDAECGQLKRGSVLIGMLEPFNAEQAARLAAAGVTGFALEAAPRTTRAQSLDVLSSQANIAGYKAVLVAAALYPRFFPMLMTAAGTVKAARVLVLGAGVAGLQAIATAKRLGAVIEASDVRPAVKEQIESLGAKFLDVPYETQDERDAAQGVGGYARPMPASWLGRQAALVHERAKQADIVITTALIPGRPAPTLISVETVQSMKPGSVLVDLAAGRGPEFDGRKSGNCPLTVADQVIVHHGVTIAGHTNLAAMVPADASSLYARNLFDFLKLIVTKEGALNIDLSDDIVAATLLCRDGEVVRK

SEQ ID NO: 29273 - protein, 769 aa, Burkholderia pseudomallei K96243
MSTSSSSSSSKEKLREAALDYHEFPTPGKVAIAPTKQMINQRDLALAYSPGVAFACEEIVENPLNAARFTARSNLVGVVTNGTAVLGLGNIGPLASKPVMEGKAVLFKKFAGIDVFDIELNESDPHKLVDVIAALEPTFGGINLEDIKAPDCFIVERECRKRMKIPVFHDDQHGTAIVVAAAVTNGLKVVGKSIKEVKLVASGAGAAALACLDLLVDLGLPLEHITVTDLAGVVYKGRAELMDPDKERFARETDARTLSEVIDGADIFLGLSAAGVLKADMVKKMAERPLILALANPTPEILPEVALEARPDAVLATGRTDYPNQVNNVLCFPFIFRGALDVGATTITREMEIAAVNAIAELAQQEQSDIVATAYGIQDLSFGPEYLIPKPFDPRLIVKIAPAVAQAAMDGGVATRPIEDMEAYKIHLQQFVYHSGTTMKPVFQIARGAPAEKKRVVFAEGEEERVLRAVQIVVDEKLAKPILIGRPAVIEHRIQRYGLRLTPGVDFTIVNTEHDERYRDFWQTYFKMMARKGISEQLARVEMRRRTTLIGSMLVKKGEADGMICGTISTTHRHLHFIDQVIGKRAGCSVYGAMNALVLPGRQIFLVDTHVNVDPTPAQLAEITIMAAEEVRRFGIEPKVALLSHSNFGTSNAPSAQKMRDTLAILQERAPDLHVDGEMHGDVALDAALRKEILPESTLEGEANLLVLPNIDAANIAYNLLKTAAGNNIAIGPILLGAAQPVHVLTESATVRRIVNMTALLVADVNAVR

SEQ ID NO: 29274 - protein, 372 aa, Burkholderia pseudomallei K96243
MKFIDEARIEVIAGDGGDGSASMRREKFVPFGGPDGGDGGRGGSVYVIADRNINTLIDYRYAKKHMARNGENGRGSDCYGKGGDDITLRMPVGTVINDMDTGELIADLTEHDQKVLVAKGGAGGLGNLHFKSSTNRAPRQKTDGKPGERRMLKLELKVLADVGLLGMPNAGKSTFISSVSNAKPKIADYPFTTLAPNLGVVRVGPGKSFVIADIPGLIEGAAEGAGLGHQFLRHLQRTGLLLHLVDLAPFDERVDPVAEARAIVGELRKYDESLYEKPRWLVLNKLDMVPEDERRARVADFIERFGWTGPVFEISALTGQGCEGLVYAIHDYLVEHSDAHRAELAEDLASDVRFRDAPGAGGEPHERDAGAH

SEQ ID NO: 29275 - protein, 103 aa, Burkholderia pseudomallei K96243
MYAVIKTGGKQYKVAVGEKLKVEQIPADIDAEITLDQVLAVGEGESIQFGTPLVSGASVKATVVSHGRHAKVTIFKMRRRKHYQKHGGHRQNYTELRIDAINA

SEQ ID NO: 29276 - protein, 405 aa, Burkholderia pseudomallei K96243
MPEFDMTEAFLCDAIRTPIGRYGGALAPARADDLGAVPLKALVERNRDVDWAAVDDVIYGCANQAGEDNRNVARMSLLLAGLPHAVPGATINRLCGSGMDAIGLAARAIKAGEASLMIAGGVESMSRAPFVTGKATSAFSRQAEIFDTTIGWRFVNPLMKQRYGVDSMPETAENVATDYRVSRADQDAFALRSQQKAARAQADGTLAQEIAPVTIAQKKGEPLVVARDEHPRETTLEALAKLKGVVRPDGTVTAGNASGVNDGACALLVASEAAARRHGLVPRARVLGIATAGVEPRVMGIGPAPATQKLLARLGMTLDQFDVIELNEAFASQGLAVLRLLGVADDDARVNPNGGAIALGHPLGASGARLVTTATYQLHRTGGRFALCTMCIGVGQGIAIAIERV

SEQ ID NO: 29277 - protein, 467 aa, Burkholderia pseudomallei K96243
MEGSQTGLGTGLKQRHVTMLSIAGVIGAGLFVGSGHAIAEAGPAALIAYAIAGLLVVLVMRMLGEMAVAQPDSGSFSTYADRAIGHWAGFTIGWLYWWFWVLVIPIEATAAATILNAWFPGVATWIFALGITSVLTVTNLFSVKNYGEFEFWFALIKVVAIVVFLAIGGAAIVGLLPGSNVSGAARLVNAGGFMPNGVGAVLAAMLTTMFSFLGTEIVTIAAAESEHPERQIVRATNSVIWRISLFYLGSIFVVAALVPWNDALLPVHGSYQRAMELIGVPHAKGIIDVIVLVSVASCLNSALYTASRMIFSLSTRGDAPAFLRRTDASGTPRAAVLASTAFGFLTVIANYVMPEQVFGFLLATSGAIALLVYLVIAISQLRMRSTLDATGERLPLRMWCFPWLTWAVIVFICGVLVVMLLREDHRMEVGATAVLALAVVVASRMNRRARGGDEPTPAASRVSANLR

SEQ ID NO: 29278 - protein, 67 aa, Burkholderia pseudomallei K96243
MATGTVKWFNDAKGFGFITPEGGGEDLFAHFSEIRVDGFKTLQENQKVEFEVKTGPKGLQAANIKPL

SEQ ID NO: 29279 - protein, 889 aa, Burkholderia pseudomallei K96243
MSTPLKTLIAKLNPVCRKAAERAASHCFARGHYEVDLEHLFLALLDESTGDVPLVLRASGVDPHALRADLERELERLKTGNTRTPVFSVHLSELFEQAWLIASLDSQIGRIRSGHLLLALLTGPDLAQFAQRMSSQFARVRVDDLKHKFDEIAAGSSEAEPRHADADVAVPDGAAASGDAPRGPSKTPALDTYTTNLTQRAREGKIDPVIGRDAEIRQAIDILMRRRQNNPIMTGEAGVGKTAVVEGLALRIAADDVPPPLRGVALHVLDMGLLQAGASVKGEFENRLKSVIDEVKKSAHPIILFIDEAHTIIGAGGQAGQNDAANLLKPALARGELRTIAATTWSEYKKYFEKDAALARRFQVVKIEEPSEPLAAAMLRGMAALMERHFNVRVLDDAITEAVRLSHRYISGRQLPDKAISVLDTACAKVALAHSSTPAAIDDAKKRIERIDAEIAALEREAASGAAHDARLAELREARDADLKALAEDAARYEEERALVTEIGALRAELDAARESSADGKPVDVDATRAKLAERVDALRARQGNQPMVPLQVDGHVVAEIVASWTGIPLGRMVKDEIETVLNLRDLLGARVIGQDHALGAIAQRVRTATANLEDPNKPRGVFMFVGPSGVGKTETALALADVLYGGERKLITINMSEYQEAHSVSGLKGSPPGYVGYGEGGVLTEAVRRNPYSVVLLDEVEKAHPDVLEMFFQVFDKGAMDDAEGREIDFRNTLIILTSNVGSSAVMQACLNKAPQELPDAETLAETLRPQLYKTFKPAFLGRMKVIPYYPISDDVLAEIIELKLERIRRRIEANHKAAFEWDESLVDAVLARCTEVDSGARNVDHILNGTLLPEIAELVLSRIADGEAIVRIAARAAETGEFEYTVE

SEQ ID NO: 29280 - protein, 362 aa, Burkholderia pseudomallei K96243
MATPQFHPLRIRDVRPETADAVTVSFEVPPELRDAYRFTQGQFVTLKAHVDGEETRRSYSICVGTTDYDRDGELRIGIKRVRGGRFSNFAFDTLKPGHTIDVMTPDGRFFTHLNAGHGKQYVAFAGGSGITPVLAIVKTTLELEPRSTFTLIYGNRSVDSIMFVEELEDLKNRFMQRLALYHVLSDDVQDVELFNGVLDQAKCAAFLDSLVPAATIDEAFICGPAPMMDAAEAALAAAGVPRERVHVERFGTPLPQAGAPAVEITADTPAADLEIVLDGKKRKLRLPYEGASLLDVGLRAGLALPYACKGGVCCTCRAKVLEGEVRMEKNYTLEPQEIADGFVLTCQCHPVSEKIVVSYDER

SEQ ID NO: 29281 - protein, 756 aa, Burkholderia pseudomallei K96243
MDEQLKQSALAYHQNPKPGKISVTPTKPLSNQLDLSLAYSPGVAAACEAIHADPLDAQKYTSRGNLVGVVTNGTAVLGLGNIGPLAAKPVMEGKGCLFKKFAGIDVFDIELAESDPDKLVEAIAMLEPTLGGINLEDIKAPECFYIEQKLRERMKIPVFHDDQHGTAIIASAAILNGLKVVGKDLSSVKLVCSGAGAAAIACLDLLVKLGLSKSNVLVADSKGVIYEGRGNLDPSKQRYAATTGARTLADAIAGADVFLGCSSAGVLKQDMVKTMADRPLILALANPEPEIRPEDAKAVRPDAIVATGRSDYPNQVNNVLCFPFIFRGALDVGATTITEEMKLACVRAIAELAQETDQSEEVAKAYEGHSLEFGPEYLIPKPFDPRLIIKIAPAVAQAAMDSGVATRPIADMDAYREQLGTTVYRTGMVMRPVFATAKTKAARIVFAEGEDERVLRAAQFVLQERIAKPIIVGRPSVVEMRLKKIGSKLVGGVDFEIVNPEDDPRYQQCWQAYHEIGARDGVTPEVAKAALRKFNTLIGAMLVHLGDAHGMICGMIDTYHSHLKFIEQVLGRAKGAEHFAAMNLLMLPGRNLFMCDTYVNEQPSAEQLADMTIQAAAEIERFGITPKAALLSNSNFGSAPSASSRRMAEARKLIVERAPELEVDGEMHGDAALSEVVRKAAFPGTTLTGEANLLIMPNVEAANIAYNLLKMVGGEGVTVGPFLLGAAKPVHILTPAATVRRIINMTAVAAANVQVK

SEQ ID NO: 29282 - protein, 289 aa, Burkholderia pseudomallei K96243
MDIGFIGAGEMGSAIAGNLLKAGHRVRVWNRSAERVAPLVALGAQQVATVADAFAGDAVFSMLADDAAARDVFDAALLEQAPRGLIHVNMATISVALAEQLAHAHAQRAIHYVAAPVMGRPHVAAAARLTIIAAGPAEAIDRMQPAFDAIGQRTWRLGSLPQHANAVKIAANFTIASAIETMGEAGALLAAHGVAMNDYLDVITNSVFPGPVYQGYGAMIAESRYEPALFKARLGLKDVRLALEAGDALSVPLPVASVVRDSLIEAVAHGHGDKDFAVLGQVAARRAGR

SEQ ID NO: 29283 - protein, 468 aa, Burkholderia pseudomallei K96243
MQKGHSETDLHRGLGQRQMRLIALGAAIGVGLFLGSANAIKMAGPGIILSYIIGGAVIFVIMRALGEMAVHEPVAGSFSRYARNYLGPLAGYLTGWNYWFLWLVTCIAEITAVGIYMGIWFPDVPRWIWALAALATMGSVNLLTVKAYGEFEFWFALIKVVTIVVMIAVGIAMIAFGIGNHGVPMGISNLWAHGGFFPNGAQGVLMSMQMVMFAYLGVEMIGLTAGEAANPQKTIPGAINSVFWRILLFYGGALFVILSIYPWNEIGTQGSPFVMTFERLGIKTAAGIINFVVLTAALSSCNGGIFSTGRMLYNLAQQGHAPRTFGETTASGVPRRAIVVSMAALLVGVLLNYLVPEKVFVWVTSISTFGAIWTWGVILVTQMKFRASLAPAEERALRFRMPFWPYASWVALAFLVLVIGLMAYFPDTRIALYVGPAWLVLLVVLYFVLKLEPEGGKAAGLERRYGRG

SEQ ID NO: 29284 - protein, 469 aa, Burkholderia pseudomallei K96243
MQTESNGRPGAGGGAARPALQQTLGTWQLWGIAVGLVISGEYFGWSYGWASAGTLGFVVTALFVAAMYTTFIFSFTELTTSIPHAGGPFAYARRAFGPAGGYLAGVATLVEFVFAPPAIALAIGAYLHVQFPGLEPKHAAMGAYLVFMALNIVGVQIAATFELVVTLLAIFELLVFMGVVSPGFAWSNFVKGGWAGADHFSAGAFHGMFAAIPFAIWFFLAIEGVAMAAEEAKHPKRSIPIAYVAGILTLVALAIGVMVFAGGAGDWTKLANINDPLPQAMKYIVGANSGWMHMLVWLGLFGLVASFHGIILGYSRQIFALAREGYLPEWLAKVHPRFKTPYRAILAGGVVGIAAIYSDELIQFGGQTLTANIVTMSVFGAIVMYIVSMAALFKLRRMQPRMERPFRAPLYPFFPAFALVAALVCLGTMVYFNALVASIFVAFVALGYGYFLATRAQREAAPADALLEE

SEQ ID NO: 29285 - protein, 396 aa, Burkholderia pseudomallei K96243
MAARPFTSPGGSMQSAAAPRSKLPDVGTTIFTVIGQLAAEHEALNLSQGAPNFAPDPALVERVARAMRDGHNQYAPMAGIAALREALGVKTERLYGERYDPDSEVTIVASASEGLYAAISALVHPGDEVIYFEPSFDSYAPIVRLQGATPVAIRLSPERFRVNWDEVAAKITPRTRMLIVNTPHNPSATILGEADVARLAQLVAGTDIVVLSDEVYEHVVFDGARHHSMARDRALAERSVIVSSFGKSYHVTGWRVGYCLAPAELTRELRKVHQFMTFAADTPMQHAFAAALAEPASYLELGAFYERKRDLLVRELAGSRFELLPSEGSFFMLARFGHFSDESDADFVLRAIRDARVATIPLSAFYADGANTGCIRLSFSKDDATLVEGARRLCSL

SEQ ID NO: 29286 - protein, 170 aa, Burkholderia pseudomallei K96243
MSSRRIVVRRSGVHGKGVFAAVPIKAGERVVEYKGERISWKEALRRHPHDPDDPNHTFYFALEEGGVIDGKINGNSARWINHSCAPNCEAEEVGGRVYIHALRDIDEQEELFYDYGLVIDARLTKKLKREYACHCGAATCRGTLLATSEEDEGKKKKKAKKGGKDKKKKK

SEQ ID NO: 29287 - protein, 881 aa, Burkholderia pseudomallei K96243
MTVSRQALFGKLGYSLFRSIESATAFCKLRGNPYVELVHWLHQMLQAADGDMQRIARHCDIDLGELERDMVRALGELPAGASSISDFSHHIETAIERAWVLATLDFGDRRIRGAWLLAALLKTPELRRVLLSISSAFGRIRVDELDAMLPAWIDGSPEANETPYDDSDFGAAIPGEASSAMQQKGGGSPLEQFCLDLTARARAGQIDPVVGRELEIRTMIDVLLRRRQNNPLLTGEAGVGKTAVVEGLARAIAAGDVPPKLADARLLSLDVGALLAGASMKGEFEARLKGVLEAAAKATLPVILFVDEIHTLIGAGGQAGTGDAANLLKPALARGTLRTIGATTWAEYKRHIEKDPALTRRFQVLQVPEPDEAAAIDMVRGLTRTFSRHHGVVVLDEAIRAAVKLSHRYIPSRQLPDKAISLLDTACARVALSQHAPPRELQDVRRRLEAARVRLELLDGEQRIGLGDEAALAQSRAEIAALEVEEQSIDACWRQQIEAAQTLLSAREAAGDAAASAIDALRELEHALSNLQGDHAFVFPEVNEAIVAEIMSDWTGIPVGRMVTDEVSAVRALPDTLAARVIGQRDALHQIGDRVQTARAGLTDPKKPLGVFLLAGPSGVGKTETALALAEALYGGEQNLITINMSEYQEAHTVSGLKGAPPGYVGYGEGGVLTEAVRRRPYSVVLLDEIEKAHPDVHEMFFQVFDKGYMEDGDGRYIDFRNTTILLTSNAGSDLVSGLCMDEACAPDADGLCAALASELLKTFPAAFLGRVTLVPYRPLAQETLSRIVRLHLDRVVTRMAENQGVALRYSDNVVDYVVNRCLVQETGARLLIGFIEQHVLPLLAKLWLDSLASKHVLTRVDLDVADPAAAPTEAFALRAS

SEQ ID NO: 29288 - protein, 622 aa, Burkholderia pseudomallei K96243
MCGITGWIDFARDLRNEAPIVDTMTDTLARRGPDARGVWLDTHAALGHRRLSIIDPERGAQPMLTPERGPRGLPRAVISYAGETYNFRELRAELGALGHRFDTHCDTEVVLRAYLEWGAAFVDRLNGMYSIAIWDTARDELLLVRDRLGVKPLFYYPTADGVIFGSEPKAILAHPDVRARTSSEGLCDALLFLRTPGQVPFSGMREVKPGHVLRVRRGGLAEQRYWALEARPHTDDLPTTIATIRALLDDIVSRQMISDVPLCALLSGGVDSSTIAALAQKRRRASGGGALSTFCVDFTGHTRNFRADPIRPTADAPFALEVARHIGSDHHTIELDQAGLLDPQVREAVLRAWDLPFNFADLDVSLHRLFAEVRKHATVALSGEAADEIFGGYLWFSDPAARRAHTFPWLKLGAHRGLDPRALFHRSFIDALRLGEYEAQLYRAALAEVPRLDGENAEDRRTRELHYLTLTRWLPVLLDKKDRMGMASGLEGRVPFCDHRLVEYVFNIPWAMKTFSGQEKALLRAAAADLLPESVLNRKKAAYPSIQAPGYDRGLIERLNRAIAAGRAPLEPFIDAGALRGLTEKTAAGSLSEFERILLESSSRLNDWLDLYRVELDGVPAG

SEQ ID NO: 29289 - protein, 400 aa, Burkholderia pseudomallei K96243
MTEAFLCDAIRTPIGRYGGALAPVRADDLGAVPLKALVERNRDVDWAAVDDVIYGCANQAGEDNRNVARMSLLLAGLPHAVPGATINRLCGSGMDAIGLAARAIKAGEASLMIAGGVESMSRAPFVTGKATSAFSRQAEIFDTTIGWRFVNPLMKQRYGVDSMPETAENVATDYRVSRADQDAFALRSQQKAARAQADGTLAQEIAPVTIAQKQGEPLVVARDEHPRETTLEALAKLKGVVRPDGTVTAGNASGVNDGACALLVASEAAARRHGLVPRARVLGIATAGVEPRVMGIGPAPATQKLLARLGMTLDQFDVIELNEAFASQGLAVLRLLGVADDDARVNPNGGAIALGHPLGASGARLVTTATYQLHRTGGRFALCTMCIGVGQGIAIAIERV

SEQ ID NO: 29290 - protein, 541 aa, Burkholderia pseudomallei K96243
MPAQGNAQRTAPLARPAPTDAGHGKFKKQLSLTDLTFIGLGAIFGSGWLFAASHVSMIAGPAGILSWLLGGFAVLLLGIVYCELGAALPRAGGVVRYPVFSHGPLLGYLMGAITLIAFSSLIAIEVVAARQYAAAWFAGLTVEGSGNPTTLGWLVQAALLCFFFYLNYSSVKTFAKANNVISVFKFVVPLAVIVVLFAFFKPANLTLHGFAPFGMPGVEMAVSAGGIIFAYLGLTPIVSVASEVRDPQRTIPIALILSIVLSTLIYVLLQLAFLGGIPSAMLAGGWHDIGKAFSLPYRDIALALGVGWLAYMVVADAMISPSGCGNIYMNATPRVVYGWAKTGTFFKVFARVDEASGIPRAGLWLTFALALFWTLPFPSWEALINTVSAALVLSYAVAPVSVAALRRTAPGLPRPFRASAFALTGPASFVIAALIVYWSGWRTVSWLLGLQIAMFAVYLACRRRVPTAHLSLAEQVRSCAWLIAFYALMIVASYFGGFGGTGQLAHPYDTFAVAAVALVIYYWGAHTGVPSAKLQLDDDEN

SEQ ID NO: 29291 - protein, 671 aa, Burkholderia pseudomallei K96243
MLTNRLVRAYALYTIGFAAFVLLLWRIERATGPGVWIGYVFLFVPIAVYAVIGLLSRTSDLVEYYVAGRRVPSAFNGMATAADWLSAASFIGLAGSLYATGYDALAYLMGWTGGFCLVAFLLAPYVRKLARYTIPDFLGTRFSSTLVRALAAIAAILCSFVYLVAQIQGIGLIATRFIGVDFSIGIFCGLAGILVCSFLGGMRAVTWTQVAQYIILIIAFLLPVSLIAMKNGLGPVPQFNYGRLMSRVETLEGEMRDAPQERQVRETYRRQAGAIQARLDRLPASYDEARAKLVDQVAELRRHNGPLREINQRERALAEFPRDPAAARVVWEQARDELLARAAAPVPMHEPFPAASGDDRRPRGRNFLALLLCLSLGTASLPHILTRYNTTTSVAAARRSVGWTLFFIALFYLTVPVLAVLIKYEILTNLVGRPFADLPAWITQWHRFEPGLIGVADLLRDGIVHWSEIQMQPDIVVLAAPEIAGLPYVVSGLIAAGALAAALSTADGLLLTIANALSHDVYYHMVAPDASSQRRVTISKVLLLGVALFASYVASLNTGKILFLVGAAFSLAASSFFPVLVLGVFWKRTTTRGAVAGMMTGLGVCVYYIVSTYPFFTQITGFAGPGWLGIEPISSGVFGVPAGFATAIVVSLLDRRPDAYTNALVDYIRHP

SEQ ID NO: 29292 - protein, 320 aa, Burkholderia pseudomallei K96243
MNETLYGDGAIRRPSIYGSSVENTYAGVLSFMRRNYTRDLGGVDVAVCGVPLDLATTFRSGARLGPAAVRAASVQLAELRPYPWGFDPFDDLAVIDYGDCWFDAHNPLSIKPAIVEHARTILQSGAAMLTLGGDHYITYPLLIAHAQRHGKPLSLIHFDAHCDTWADDAPDSLNHGTMFYKAVNEGLIDPKTSVQVGIRTWNDDYLGIHVLDAAWVHEHGPRATAERIASIVGGRPAYLTFDIDCLDPAFAPGTGTPVAGGLSSAQALAIVRGLGGVNLIGADVVEVAPAYDQSEITAIAAAHVACDLLCLWRQRKTGAR

SEQ ID NO: 29293 - protein, 956 aa, Burkholderia pseudomallei K96243
MNRERIFNCLGRTTYAALVDATALGRSRRHAFIDLDHWALCLLQREQSDLARLFELFGSDAGEAKRRMEKALDGFDVSGDSLRDISSSLERSVGPAVIWSQIAARAGKVRSGHLLLAWLDEDLTRRWLQQRVPSGITSVALDDVVKRYEALAAGWPEADEAPAALDGAALGAQAGEAGADGTGDALAKWATCVTEQAARGELDPVVGRDDELRTVIDILSRRRQNNPILVGEAGVGKTAVVEALAQKIHAGAVPPGLVGAQVWALDLARMQAGAGVRGEFEQRLKSLIDAVIASPAPIILFCDETHTLIGAGGAAGTGDAANLIKPMLARGQLRMVAATTWSEYKQYIEPDAALVRRFQAVAVDEPSDDAAVDMLRTIAPRFAAHHGVRIVDSALRGAVELSRRYLPARQLPDKAISLLDTACARVAMSQSCAPAELERLQHQAFAIGQTLDWRASDRRMGVRTPGDEAELEGRQASLAQQAATLETVVDAQRDEVRAWLARLNDATPQAADGDGAAFAARIGANRWVRPWVDEHVVSEVLAEWTGVPVAQLAQDDAQRVVELEAALNAGIHGQTGAMRSIAQALQVSHSGLNDPRRPLGVMLLAGPTGTGKSQAAAKLAELLFGGERNLLQFNMNEFQEAHTVSTLKGAPPGYVGYGKGGRLTEAVRKKPYSVLLLDEFDRAHPDIHEVFYQVFDQGWMEDGEGRRISFRNCLILLTSNLGEAEIEAACKADPRISQAKLDKLVGERLQGRFSPALLARIQLVAFRTLDVDALTGIATQALDELGERLAQNDLQWRADEGVASWIAHAVSQHPANGRAVRDLLRQHVMPAVARGVLAARAEGRALKTVRLAANEKLSLVFDEDAWELSGTDAASLGEQAQAVAMAREAEAVAAAVAAREAHGAHGTNEADGGGGAPHAAKADAHVDSDDERPGGAPHPDETASANAGTTGEPSCV

SEQ ID NO: 29294 - protein, 381 aa, Burkholderia pseudomallei K96243
MMRDAANFEPADSRVTRPAFWQALPERWTSDVEETLVCCHVRQETHDVKSFFFRSPQGRAFSFEPGQFVTLELDIDGETINRCYTISSSPARPHTISITVKRVPGGKVSNWLHDNLQPGAPLRVLGPAGEFTCARHPARKYLFLSAGSGITPLMSMSRAHHDLAEDRDIVFVHSARTPDDIIFARELDLIASTHANFRTAFVCERLGARTNWHGVTGFLSLPLLKLVAPDFMEREIFTCGPAPYMKAVRELLAEAGFDRSRYHEESFSFETLAQREAPADAPAGEDAAARGAQVRQYTIAFAKSHREIACGADQHVLDAARRAGVRLPASCTQGMCGTCKVKLVSGQVDMKHNGGIRQREIDQGMVLLCCSKPLSDLVVDK

SEQ ID NO: 29295 - protein, 656 aa, Burkholderia pseudomallei K96243
MCGITGFVGPVACAPQTARATLARMTDSLAHRGPDDTGLWIDHDAGVALGHRRLSIVDLSEHGHQPMLSACGRYAMTFNGEIYNFRALRSELEREHRAPEWRGHSDSEVLLAAFCAWGVDRALQKAVGMFALALWNRESRVLTLARDRIGEKPLYYGRIGGSFVFGSELKALRRFPGFDAHPIDRDALCLYLRHASVPAPYTIYEGIRKLPPGTYAQFEDLAEAPAPRRYWSLERAIAAGRANPFDGDANAAVAQLDHVLRDAIAEQSVADVPLGAFLSGGVDSSVIVALMQTQTAQPVQTFTIGFHEAGYDEAGYAKAVARHLGTSHTELYVKPADVLATVPRMPCVYDEPFADSSQIPTLLVSELTRRHVKVSLSGDGGDELFGGYTRYFLTPRLWGRLRRVPAAVRMRIAAALHALRPDHADQIASLVQGAWSASAQRDASPRVGDRLHKLANVMTADSRASLYRLLMSSVHHPERFTLAGHEPQTLIDTPGAWPPGLSFAEQAMAVDTLTYLPTDILTKVDRAAMAVSLETRMPFLDYRVVEFAWRLPEALRIPDGQDKWLLRKLLYRYVPRPLIDRPKQGFCAPVGAWLRGELSDWAAELLRPARLRDEGYLDAARVERLWRQHQSGRMNWQHPLWTVLMFQAWLERQRAE

SEQ ID NO: 29296 - protein, 469 aa, Burkholderia pseudomallei K96243
MAIISESSSAAAAAAPGGARAPDTLARSLNVRDVVMITVSGVTPASSIFVIAPFAIQQAGSGAVMSFVLGGLLAFAFALCYAELSAAHRSAGGEYVMVKRVFGALPGYLTFVAVLAVNVFIPAVLASGAAPYLNAALGTQLGNQSVALAIVLASYALGILNIRTNAWITGAFLVIEILVLALIAYLGFSEPHRSPLALVHPVVANGAALVPATLAAIMPAVGTAIFCYNGFGAAVFLAEDLEGGNRDIAKAVICSLAVILVVELVPLTAIVLGAPSFVELAKSADPIGYVVRALSNPGVSRVVSGGIFLSVFNAIIAIVIMVGRFLYSSGRHALWSHACNGAFTRIHPRLESPWIATLTLAVPSTLLVFVSSLDALTAFTVDLLLLVYLAVGVAALASRVMRRDVDHHYRMPWWPLPPIVAIAGAGYTLYTTIAAATKPTDLYIIAGLAAVSLAAYARWARRSAAFREL

SEQ ID NO: 29297 - protein, 461 aa, Burkholderia pseudomallei K96243
MTSRDERLHRGLEERHINLMALGATIGVGLFLGSATAIRAAGPAILLTYILGGVAIFLIMRALGEMAIDNPVAGAFSRYARDYIGPLAGYLTGWTYWFMWIVTCMAEITAVGVYMHMWFPDVPNWIWTFAALIVMGAVNFIAVKLYGEFEFWFALIKIVTIVLMIAGGALMIVAGVGNGGVPTGVSNLWAHGGFLPNGWPGVVDALPIVMFAYLGVEMLGLTAGEARNPEKSLAKAVNSVFWRVVIFYVGALFVIMSVYPWNQIGTQGSPFVMTFSRLGIPAAAGIINFVVLTAALSSCNSGIFSTARMLFNLAEQGQAPERLASVNRRGVPVHGVLISVALLFVGVVLNYFAPQKVFVWLTSVSTFGAIWTWCVILIAQLRFRRRVSAERLARLPLRVPCYPLSSFVALAFLAFVVVLMAFSPDTRVALVIGPLWIAALTVYYYASQAGRRSPLGAPTDG

SEQ ID NO: 29298 - protein, 371 aa, Burkholderia pseudomallei K96243
MLIGVPKEIKVYEYRVGLTPAGARELALHGHQVLVQRGAGAAIGLQDDDYAAAGAMLANDAADVYARADMIVKVKEPQPAECAMLRRGQILFAYLHLAPDPGQAAALVKSRAVCIAYETVRAPGGGLPLLAPMSEVAGRMSIQVAAAHLESPGGGMGLLMAGVPGVPAAHVVVIGAGVVGTCALQMAAGLGARVTVLDTNVDRLRELDLVFGNRIATLYSNTHAIDGAVRGADVVIGAVLVPGASAPRLVTREMISKMRAGAVVVDVAIDQGGCIETSHPTTHAQPTYVVDGVVHYCVANMPGAVARTSTFALGNATLRHAIALANKGWKRALADDPYLRAGLNVCDGHVTHEAVARALGLAYVHADEMLD

SEQ ID NO: 29299 - protein, 360 aa, Burkholderia pseudomallei K96243
MNEGAKRMNTARIKAAAADMPERARLRIGFVALSDAAPLVAAQRLELGARYGLTLELCRQPSWASIRDKLLSGELDAAHALYGLVYGVQLGIGGPRADLAVPMVLNRNGQAITFSNRLADAYRASGELKAALATLGRRPVFAQTFPTGTHAMWLYHWLASHGVDPLHDVRSVVIPPPEMVDALAAGELDGLCVGEPWNAVAEARGAGRTVAATSEVWPDHPEKALACRREFVALYPNTARLLVRTLLDACEWLDDADHRMKAAAWLAEPDAIGVPIGQIAPRLLGDYGAGPFAQPPAPIKFYEHGTVNRPAASDGMWFLSQYRRWGMLSGDVDDAAIANGVAHTALYDEAVALGGARRGE

SEQ ID NO: 29300 - protein, 431 aa, Burkholderia pseudomallei K96243
MNAPAEPGATTVPHRAGSLTILQGAALYIGAVLGTGVIALPALAAEVAGPASLLAWAALVMLSIPLAATFAALGARYPDAGGVSTYVRKAFGPKAAAVVGWCFYFAVPAGAPAAAMFGGAYVAAVTGGAHATMIASAAVLIALVAAANAFGVTVSGRMQLVLSALLVALLVAAVLASAPHARAANLHPFAPHGWLAVGEAAALLVWSFAGWEAITHLAAEFRRPARDLPRSTGIAVAVVGLLYLSVAAASVLVLGPAAGESGAPLAALIARGIGGNAQLIATAAALLLTLGTMNAYFAGAAKLGAALGRDGALPRWFAQGSQTGGVPRRSLAVIAALAGCALVAAVATGMGPKPLVLATSGNFVMVYVLGAAAATRLLPRGGLAHRASIVALLSALLLLATTGWYLLWPLLLTASAIGYLFITGRRAAAKR

SEQ ID NO: 29301 - protein, 676 aa, Burkholderia pseudomallei K96243
MPPSRSTPRTTLKPPVVVPSLAVIGALLAVCALRPNEAGALFGAAQQWIVERFDWFYVLAITTFLIFLVLIAASRFGNIKLGPDDAEPEFSFVSWTAMLFAAGMGIGLMYFGVGEPIQHYLSPPTAAGGTPAAAREAMLMSFFHWGLHAWATYGVMGLVLAYFGFRYNLPLTLRSGLYPVLREGVNGWIGHTVDAFALVGTVAGIAVTLGYGVLQLSAGLHTIAGWQTDTDTFRIGLVAVVVALAGLSAASGLDKGVRRLSELNLMLAFALLAFVVVAGPTSFLLRAIGDNIGEYLSKLVSLSFRTYAYEAPNDKGWFGGWTLLYWAWWVSWSPFVGMFIARISRGRTIRQFVIGVLLVPTAFNLVWMTAFGNSAIWLDTHAAAGALAQTATNVDALLFRFFDYLPLTQLLSVAAIVLIAVFFVTSADSGAFVIDAIATRGAPQSPVWQRLFWAAVLGVTASVLLVAGGLKALQALTLVAALPVALVMLALCYGLWRGLKADHAHYSQDMAPATSFWTGQHWRHRLSQILRHTSDADAQQFIAQTVEPALRKVADELKAGGVDAHVARDDDDAVRLTVPAPAQRDFVYGARVSRKSAPAFRIREAAEPEPQREHVCEVLTFFADGRLGYDIEYLRGDEIIADVLRQYERYVSLAADTRTHLLNRAPEHAGPDGLSR

SEQ ID NO: 29302 - protein, 339 aa, Burkholderia pseudomallei K96243
MEHRIALQFEDGVTRFIACRDGETLADAAYRQQINLPLDCRDGACGTCRCRCESGDYALPASSYIEDALTANEAAQRYVLACQTRPRSDCVIDVPASSAACKTGAARHEGTLASVERLSASTIHFSIDVDEPAKLAFLAGQYVNVEIPGLGATRSYSFSSRPGDARVSFLVRNVPGGRMSRYLTDEAAPGQRIAFSGPHGSFYLRDAARPALFLAGGTGIAPFLSMLDVCASRDGAPPVRLVYGVTRDADLVALERLGDVERRLAGFAYRTCVADEASAHPRKGYVSAHVEPEWLNGGDVDIYLCGPAPMVDAVQAWLRERGVTPANLYFEKFSSSNAP

SEQ ID NO: 29303 - protein, 392 aa, Burkholderia pseudomallei K96243
MSEPLLLTFNAGSSTLKIGLYSVANGEPAPLGRGKIDFNRAPLQFEYANGGEAHAVPLAAPVTDDLHAVLDEALGWIDAHLSVHELVSVGHRVVHGGDTFDGPVRIDERTLDAIAALVPLAPLHQPQSVRLIRALRHVRPHLPQVASFDTAFHRTQSDLVRRFALPRALFDAGIKRYGFHGLSYRYVAGRLRERHPSIARGKVVAAHLGSGASLCALDAGVSRDTSMGFSTLDGIPMATRCGALDAGVVLHLQKTLGRTLDDVEQMLYHRSGLLGVSGVSGDARALLADPSAGARDALELFAFRIAGETARLAATLGGLDALVFTAGIGEHQPQTRAAVCERLRWLGVELDAHANARNAETVSRDGSRVAVLVVPTDEEQVIARDAASVLHA

SEQ ID NO: 29304 - protein, 888 aa, Burkholderia pseudomallei K96243
MSDIGRVTLFGKLNTFLYETLEQATGFCRLRGNPYVELAHWLNQMLRRPDSDVHRILRRFDIDAAAIDRGIVSALDRLPRGAGSVSDLSAHIDDAVERAWVYATLKYDAAQIRGAVLLLALVKTPQLRNVLYAIARDFERIVPDVLADELERIVAGSPEAPSPAARAAAGAIGDAGAAPSAAREGSALARYAIDLTARARAGEIDPVVGRDGEIRQIVDILLRRRQNNPLLVGEAGVGKTAVAEGFALRIVAGDVPPPLRDVELYLLDIGLLQAGASVKGEFESRLRGVIDEASSSERPVILFIDEVHTLVGAGGAAGTGDAANLLKPALARGVLRTIGATTWSEYKQYIEKDPALTRRFQLVQVREPEEGAALAMLRGLAAKLEAHHRVLVLDDALQAAVTLSHRYVPARQLPDKAISLLDTACARVAVSQHAVPAPIEDVRRRIDSLRVERELIARECALGAGDAQRLDAIDASIAGEQTTLDALDARWQAERDALGKIVDWRASLLADDSSRVLDEAARADVQAKLSAALRALAELQGETPLVLPAVDTHAVAAVVSDWTGIPLGRMVRDEMQSVLKLAETLAERVVGQPHAVELIAERIQTARARLDDPAKPHGVFLLCGPSGVGKTETALALAEMLYGGEHNAITINMSEFQEAHTVSTLKGAPPGYVGYGQGGVLTEAVRRRPYSVVLLDEIEKAHRDVHEIFFQVFDKGWMEDGEGRYIDFRNTVILLTSNVGSERVMQLCRDPQRLPDAQTLTDALRAPLREVFPAALLGRLTVVPYYPLTDEMLARIVALQLARIERRIEAHHGIALRCADSATALIAERCRTIESGGRMVDAILTHTVLPRISQEILRATIEGRALRAIDVSAEDGQFVYRFEEEGAT

SEQ ID NO: 29305 - protein, 373 aa, Burkholderia pseudomallei K96243
MTHIYLDYNASTPIDPAVADAMRPLLPEAFGNPSSGHWASVPAKVALDRARAQVATLIGAAPDEIVFTSGGSEANNLALKGTVLASSNAGGHVITQSTEHPAILKPLQFLERLGTEVTCVPVDGNGRVDPDAIRRAITPRTTLITVMHANNETGTIQPIEDIGTIAREHGIRFHTDAAQSIGKIPADVDALGVDLLSIAGHKLYAPKGIGALYVRKGVGLEPLIHGAGHENGRRAGTESALLAAGFGEACALARDLAAMDGIRALRDRLWHALQDRFDDRVRLNGHLEYRLPNTVNVSFVGRVGADVLAALDGVAASTGSACHAGRMTLSPVLAAMGIAEQVGMGAIRFSLGRHTTADEIDTVIAKLSAIARG

SEQ ID NO: 29306 - protein, 211 aa, Burkholderia pseudomallei K96243
MAVTDARARGAVLLDKDGTLLENVPYNVDPARMRLARGAARALATFGELGMPVAVVSNQPGVALGRFPETALGAARHRLAELFAQQGAMLAGFFYCPHHPAGTVVRYACDCACRKPQPGLLFRAAAQLGVSLDASWMIGDILDDVEAGRAAGCRTILVDCGNETEWRYGGLRTPDFIASRLDDAAWIVARECAATAAAPAAPGEAPQEGRR

SEQ ID NO: 29307 - protein, 295 aa, Burkholderia pseudomallei K96243
MKLGFVGLGVMGQPMALNLARAGTELVVWNRTRERCEPLRAAGAQVADSAADVYRRARIVILMMATDAAIDAVLDRGKPAFASNVAQHTIVQMGTVSAEYSRGLEADIRAAGGRYVEAPVSGSRQPAEAGRLVAMLAGEPAAVEEVRALLAPMCREIVATGQVPSGLLMKLAVNTFLIAMVTGLAEAAHAARGFGLDMKQFQAVLDAGPMASSVSRVKIDKLVNEDFEVQASIVDVFKNSRLATEAAHGAHLAAPLLEVCCELYRETEALGHGQADMAAVVHAIEARSVARYAGS

SEQ ID NO: 29308 - protein, 610 aa, Burkholderia pseudomallei K96243
MTERERAARGRNDARRGGGDSGGDDEAWRRWLPGIATLRTYRRAWLARDLYAGVALTAVLVPVGMSYAQAAGLPVIAGLNASIAALVGYAIFGPSRILVLGPDSALAALIAGAIAPLAHGEPAHAVALAAALALMSGGFCVLAGLLKLGFVTDLLSKPIQYGYLNGLALTLIASQLPSLLGTVPLGGTFVDQVASLAATVAQGRIDFASLALGGGCLAGIALLRRVAPAWPGMLIAVAGASIVAAWLGAAPDAGGAHAHVAYAHVANAHVALVGSLAGTLPPLGLPSISLADASRLIAGALAIAMVSVADISVLSHVFAQHDCSETDRNQELCALGAANLLAGMLRGCAVSSSASRTPVALAAGARTQLTSLVAAACIALLLVAPTLLARVPLAALAAVVVYSANALVDVRAIVRLYRVRRGECAVSVLCFAGVVLLGVVPGILLAVGLSLLSFVWRAWHPYDAVLGRVEGMHGYHDVSRHPGAALTRGLVAFRWDAPLFHANATIFRDHVRDAIAEADAPVRCVVIAAEPITDVDVTAADMLATLRDELAARRIALVFAEMKGPVKDRLRTYGLFEKIGADHFFPTVTDAIEHFTRMRKDVATARRARR

SEQ ID NO: 29309 - protein, 482 aa, Burkholderia mallei ATCC 23344
MNPSAAVFSSAAARAASACPGLVRIVAARDGGLCRIKLPGGALTAAQARAVAAVARAFGSGVIEATNRANLQVRGVKAGREASASRALIDAGLGPLMDGASAASLEACAAARDDVRNVMLSPTAGRDPDALVDSAALAARLLAMLQTEPRCAALSPKFSVLLDGGERLAALDHPHDIWLSALRDAHGAPADTQFAIGLAGCPPVDGGQAAPGAPCAGALAAVAPEHAVECVRALVTSFVELAPAGATRMRELLATCPPDAFLSHVESKLSESKQPFALRRDAHLAGWRRARVDAALRLGILPERDPARCAVGAQPPLGRLDAAALAALAALADTHGDGTLRITPWQGVMLPAVARAAAPEALARLAALGFVCDAAAPLAHIVACAGSRGCARSPADTKAHALALAARLAASVDVHVTGCARSCALPHAAAHTLVASAASRYDLYRRDGATGFGRAVARQLTIDQAADALARGARPSQDDLDA

SEQ ID NO: 29310 - protein, 394 aa, Burkholderia mallei ATCC 23344
MQREVVVVSGVRTAIGDFGGSLKDFAPTELGARVVREVLSRAQVSGDEVGHVVFGNVVHTEPKDMYLARVAAINGGVAQHAPALTVNRLCGSGLQAIVSAAQNVLLGDADIAVAGGAENMSRAPYSVPAARFGQRMGDAKLVDMMIGALNDPFQSIHMGVTAENVAAKYGITRDAQDALALESHRRASHATKSGYFKDQILPIEIASRKGTVVFDADEHVRHDASLDDFTKLKPVFAKENGTVTAGNASGINDAAAAVVLMERGVADKRGAKPLARLVSYAHAGVDPAYMGIGPVPATKKALERAGITVADLDVIEANEAFAAQACAVSNALGLDPAKVNPNGSGISLGHPIGATGALITVKALYELQRIGGRYALVTMCIGGGQGIAAVFERL

SEQ ID NO: 29311 - protein, 393 aa, Burkholderia mallei ATCC 23344
MTDVVIVSAARTAVGKSGGSLAKIAAPELGASVIRAVLERAGVKPEQVSEVILGQVLTAGSGQNPARQALIAAGLPNAVPGMTINKVCGSGLKAVMLAANAVVAGDAEIVVAGGQENMSAAPHVLPGSRDGFRMGDAKLVDSMIVDGLWDVYNKYHMGITAENVAKEYGITREAQDQFAALSQNKAEAAQKAGRFDDEIVPIEIPQRKGEPLRFATDEFVRHGVTAESLASLKPAFAKEGTVTAANASGINDGAAAVLVMSAKKAEALGLEPLARIKAYANAGVDPSVMGMGPVPASRRCLERAGWSVGDLDLMEINEAFAAQALAVHKQMGWDTSKVNVNGGAIAIGHPIGASGCRILVTLLHEMLKRDAKRGLASLCIGGGMGVALALERP

SEQ ID NO: 29312 - protein, 865 aa, Burkholderia mallei ATCC 23344
MRIDKLTTKFQEALSDAQSFAAGRDNQYIEPVHVLAALVAQQDGSARSLLSRAGVHIQALQGALNEAISRLPQVTGTGGDIQVGRELAGLLNQADKEAQKLNDTFVASEMFLLAVADDKGEAGKLARQHGLTRRALESAIAAVRGGSQVHSQDAESQREALKKYTVDLTERARAGKLDPVIGRDDEIRRSIQILQRRTKNNPVLIGEPGVGKTAIVEGLAQRIVNGEVPETLKNKRVLSLDMAALLAGAKYRGEFEERLKAVLNDIAKDEGRTIVFIDEIHTMVGAGKAEGAMDAGNMLKPALSRGELHCIGATTLDEYRKYIEKDAALERRFQKVLVDEPSVEATIAILRGLQEKYELHHGVEITDPAIVAAAELSHRYITDRFLPDKAIDLIDEAASRIKMEIDSKPEEMDKLDRRLIQLKIEREAVKKEPDEASQKRLALIEEEIERLGREYADLDEIWTAEKAAVQGSAQLKEEIDKVRADIARLQREGKLEKVAELQYGKLPQLEARLKQVTQAEESEQHNPTRPRLLRTQVGAEEIAEVVSRATGIPVSRMMQGEREKLLHIEEKLHERVVGQNEAIDAVADAIRRSRAGLADPNRPYGSFLFLGPTGVGKTELCKALAGFLFDSEEHLIRIDMSEFMEKHSVARLIGAPPGYVGYEEGGYLTEAVRRKPYSVILLDEIEKAHPDVFNVLLQVLDDGRMTDGQGRTVDFKNTVIVMTSNLGSQLIQSMSGSSQEEIKDAVWVEVKQHFRPEFLNRIDDVVVFHSLDRGNIQAIAKIQLARLHDRLAKLDMALDVSEAALEQIGKVGYDPLFGARPLKRAIQQEIENPVAKLILAGRFGPKDVIPVDMQDGRFVFERVVH

SEQ ID NO: 29313 - protein, 392 aa, Burkholderia mallei ATCC 23344
MTEAVIVSTARTGLAKSWRGAFNMTHGATLGGHVVAAAVERAKLDPARVEDVLIGCANPEGATGANIARQIALRAGLPVGVPGMTVNRFCSSGLQTIALAAQRVIAGEGDVFVAGGVESISCVQNEMNRHMLREGWLDAHKPEIYWTMLQTAENVAKRYGISKARQDEYGVNSQLRAAAAQAAGRFNAEIVPITVRAGVADKATGRLYTKEVTLAADEGIRPDTTLEGVAKIRAALPGGVITAGNASQFSDGAAACVVMNAKVAEREGLAPLGIFRGFAVAGCEPDEMGIGPVYAVPKLLKQAGLKVSDIDLWELNEAFAVQVLYCRDTLGIPDDRLNVNGGAIAVGHPYGVSGARLTGHALIEGKRRGAKYVVVTMCIGGGQGAAGLFEVV

SEQ ID NO: 29314 - protein, 407 aa, Burkholderia mallei ATCC 23344
MNNDIPHLPIYMDYSATTPVDPRVVDKMVPYLREQFGNPASRSHAYGWDAERAVEEAREQVAALVNADPREIIWTSGATESDNLAIKGAAHFYQGKGKHIVTVKTEHKAVLDTCRELEREGFEVTYLDVKDDGLVDLDVFKAALRPDTILVSVMHVNNEIGVIQDIATIGEICREKGIIFHVDAAQATGKVEIDLAKLKVDLMSFSAHKTYGPKGIGALYVRRKPRVRIEAQMHGGGHERGMRSGTLPTHQIVGMGEAFRIAREEMATENERIRMLRDKLLRGLSEIDETYVNGDLEHRIPHNLNISFNFVEGESLIMAIKDVAVSSGSACTSASLEPSYVLCALGRNDELAHSSIRFTVGRFTTEQEVDYVIDLLKSKIAKLRDLSPLWEMHQEGIDLSTIEWAAH

SEQ ID NO: 29315 - protein, 468 aa, Burkholderia mallei ATCC 23344
MQKGHSETDLHRGLGQRQMRLIALGAAIGVGLFLGSANAIKMAGPGIILSYIIGGAVIFVIMRALGEMAVHEPVAGSFSRYARNYLGPLAGYLTGWNYWFLWLVTCIAEITAVGIYMGIWFPDVPRWIWALAALATMGSVNLLTVKAYGEFEFWFALIKVVTIVVMIAVGIAMIAFGIGNHGVPMGISNLWAHGGFFPNGAQGVLMSMQMVMFAYLGVEMIGLTAGEAANPQKTIPGTINSVFWRILLFYGGALFVILSIYPWNEIGTQGSPFVMTFERLGIKTAAGIINFVVLTAALSSCNGGIFSTGRMLYNLAQQGHAPRTFGETTASGVPRRAILVSMAALLVGVLLNYLVPEKVFVWVTSISTFGAIWTWGVILVTQMKFRASLAPAEERALRFRMPFWPYASWVALAFLVLVIGLMAYFPDTRIALYVGPAWLVLLVVLYFVLKLEPEGGKATGLERRYGRG

SEQ ID NO: 29316 - protein, 384 aa, Burkholderia mallei ATCC 23344
MQSAAAPRSKLPDVGTTIFTVIGQLAAEHEALNLSQGAPNFAPDPALVERVARAMRDGHNQYAPMAGIAALREALGVKTERLYGERYDPDSEVTIVASASEGLYAAISALVHPGDEVIYFEPSFDSYAPIVRLQGATPVAIRLSPERFRVNWDEVAAKITPRTRMLIVNTPHNPSATILGEADVARLAQLVAGTDIVVLSDEVYEHVVFDGARHHSMARDRALAERSVIVSSFGKSYHVTGWRVGYCLAPAELTRELRKVHQFMTFAADTPMQHAFAAALAEPASYLELGAFYERKRDLLVRELAGSRFELLPSEGSFFMLARFGHFSDESDADFVLRAIRDARVATIPLSAFYADGANTGCIRLSFSKDDATLVEGARRLCSL

SEQ ID NO: 29317 - protein, 469 aa, Burkholderia mallei ATCC 23344
MQTESNGRPGAGGGAARPALQQTLGTWQLWGIAVGLVISGEYFGWSYGWASAGTLGFVVTALFVAAMYTTFIFSFTELTTSIPHAGGPFAYARRAFGPTGGYLAGVATLVEFVFAPPAIALAIGAYLHVQFPGLEPKHAAMGAYLVFMALNIVGVQIAATFELVVTLLAIFELLVFMGVVSPGFAWSNFVKGGWAGADHFSAGAFHGMFAAIPFAIWFFLAIEGVAMAAEEAKHPKRSIPIAYVAGILTLVALAIGVMVFAGGAGDWTKLANINDPLPQAMKYIVGANSGWMHMLVWLGLFGLVASFHGIILGYSRQIFALAREGYLPEWLAKVHPRFKTPYRAILAGGVVGIAAIYSDELIQFGGQTLTANIVTMSVFGAIVMYIVSMAALFKLRRVQPRMERPFRAPLYPFFPAFALVAALVCLGTMVYFNALVASIFVAFVALGYGYFLATRAQREAAPADALLEE

SEQ ID NO: 29318 - protein, 454 aa, Burkholderia mallei ATCC 23344
MKNLQRHLSARHIRFLALGSAIGTGLFYGSASAIRLAGPAVILAYIVGGAAVYMVMRALGEMAVREPVPGSFGHYATENLGPFAGFVTGWTYTLEMVIVAIADITAFGIYMGFWFPHVPQWIWVLAIVAIICGLNLCHVKVFGELEFWLSIVKVGAIVAMIGGGAAILFTGMRLGSGGAPSLANLWSHGGFLPNGVGGLVASLSVVIFAYGGIEVIGMSAGEAKEPERVIPRAINAVPMRILLFYVLTMIVLMSIFPWTGVGANGSPFVQIFSALGVRSAAEILNLVVISAAISAINSDIFGAGRMMYAMALQGQAPRALAAMSARGVPWVTVLVMAGALLVGVVLNYLMPKDVFLMVAASATFATVWVWLMILLSQVAMRRRLGAAEVAALKFKVPFWPVGPALTIAFMAFVIAMLGYFDDTRVALFVGAAWLAILALVFYTRIRPRLAAVAR

SEQ ID NO: 29319 - protein, 362 aa, Burkholderia mallei ATCC 23344
MATPQFHPLRIRDVRPETADAVTVSFEVPPELRDAYRFTQGQFVTLKAHVDGKETRRSYSICVGTTDYDRDGELRIGIKRVRGGRFSNFAFDTLKPGHTIDVMTPDGRFFTHLNAGHGKQYVAFAGGSGITPVLAIVKTTLELEPRSTFTLIYGNRSVDSIMFAEELEDLKNRFMQRLALYHVLSDDVQDVELFNGVLDQAKCAAFLDSLVPAATIDEAFICGPAPMMDAAEAALAAAGVPRERVHVERFGTPLPQAGAPAVEITADTPAADLEIVLDGKKRKLRLPYEGASLLDVGLRAGLALPYACKGGVCCTCRAKVLEGEVRMEKNYTLEPQEIADGFVLTCQCHPVSEKIVVSYDER

SEQ ID NO: 29320 - protein, 897 aa, Burkholderia mallei ATCC 23344
MSTPLKTLIAKLNPVCRKATERAASHCFARGHYEVDLEHLFLALLDESTGDVPLVLRASGVDPHALRADLERELERLKTGNTRTPVFSVHLSELFEQAWLIASLDSQIGRIRSGHLLLALLTGPDLAQFAQRMSSQFAQRMSSQFARVRVDDLKHKFDEIAAGSSEAEPRHADADVAVPDGAAASGDAPRGPSKTPALDTYTTNLTQRAREGKIDPVIGRDAEIRQAIDILMRRRQNNPIMTGEAGVGKTAVVEGLALRIAADDVPPPLRGVALHVLDMGLLQAGASVKGEFENRLKSVIDEVKKSAHPIILFIDEAHTIIGAGGQAGQNDAANLLKPALARGELRTIAATTWSEYKKYFEKDAALARRFQVVKIEEPSEPLAAAMLRGMAALMERHFNVRVLDDAITEAVRLSHRYISGRQLPDKAISVLDTACAKVALAHSSTPAAIDDAKKRIERIDAEIAALEREAASGAAHDARLAELREARDADLKALAEDAARYEEERALVTEIGALRAELDAARESSADGKPVDVDATRAKLAERVDALRARQGNQPMVPLQVDGHVVAEIVASWTGIPLGRMVKDEIETVLNLRDLLGARVIGQDHALGAIAQRVRTATANLEDPNKPRGVFMFVGPSGVGKTETALALADVLYGGERKLITINMSEYQEAHSVSGLKGSPPGYVGYGEGGVLTEAVRRNPYSVVLLDEVEKAHPDVLEMFFQVFDKGAMDDAEGREIDFRNTLIILTSNVGSSAVMQACLNKAPQELPDAETLAETLRPQLYKTFKPAFLGRMKVIPYYPISDDVLAEIIELKLERIRRRIEANHKAAFEWDESLVDAVLARCTEVDSGARNVDHILNGTLLPEIAELVLSRIADGEAIVRIAARAAETGEFEYTVE

SEQ ID NO: 29321 - protein, 567 aa, Burkholderia mallei ATCC 23344
MSISPDREQRATTGARLLVDALLANHVERVFCVPGESFLAVLDSLADETERIRTIVCRHEAAAANMAEAVGKLTGRPGIAFATRGPGATHASIGVHTAFQDSTPMILFIGQCAREHLDREAFQEIDYRRMFGQLAKWVAQIDDPRRIPEYLSHAFHVAMSGRPGPVVLALPEDVLSEPCAAQPVAPAARRVAAAPSAAQMSELRERLARAQRPLVLAGGSGWTPGACADLRTFVERWQLPIACAFRYQDTFDNAHPQYAGDVGLGVNPELARRIREADLLFALGPRLGEATTGGYTLIDIPRPKQVLIHVHQGADELGRVYAADLPIASGMPEIAAQLAALEPPASLAWAGSAADAHRAYLDWHAPRPMPGEVQLGDVMRQLRERLPHDAIVTNGAGNYAAWLHRHFAYRHFRSQLAPTSGAMGYGVPAALAAKSLYPQRTVVALAGDGCFMMAGNELATAIQYGLAIIVLVVNNGHFGTIRMHQERHYPGRVHGTGLTNPDFAAYARAFGAHGETVERTADFLPALERALASGAPALIEIRVPQDACTPAATLEQVREQGLRARRA

SEQ ID NO: 29322 - protein, 605 aa, Burkholderia mallei ATCC 23344
MYRYTEFDKAFVRNRAAQFRDQLERWRQGALSEDAFRPLRLQNGWYVQRHAPMLRVAVPYGELSSAQIRMLARIARDYDVPEPARYRAACDAQARLGTVRLPTRNAHFTTRTNVQFNWIPLEKAADVMDLLATVDMHGIQTSGNCIRNISCDERASVAPDEIADPRPFAEVMRQWTTLHPEFAFLPRKFKIAITGAADDRAATDWHDVGLRLVRDAAGELGFRVSVGGGMGRTPMTATLVRAFVPWRHVMNYIEAIVRVYNRYGRRDNRYKARIKILVKAEGQRYIDDVDEEFRQIVEHDGGPHTIEQAEFDRVCASFVPPVPPPCAAGRHAKTDIDADMDAALARMRTLAGAQPAFARWLERNVAPHRDPARRIVTLSFKRRHQAPGDASPEQLDALAHLAERFSAGEARVTHAQNVVLPWVRAIDLHALWEAARDAGLASANVRLLTDMIACPGGDFCALANARSIPIADAIAERFDDLDELHDIGDVDLHVSGCINSCGHHHSGHIGILGVDKDGDEWYQVTLGGSDGTAANGPAQPGKVIGPSFSADEIVDVVDALVATYLRVRRTEAGRVERFIDAYRRVGPEPFKAAANAARHPETSVA

SEQ ID NO: 29323 - protein, 510 aa, Burkholderia mallei ATCC 23344
MCGIGAIFSTQRASVDGIERSLSALMSKIAHRGDASRFNENLIRERFGLATNRLAIVERDHARQPVSDHERDLHVVLNGQIYNYKELRDELAARGHRFSHAGDAEVLLRAYLEYGPSFATKLDGMFSFVLFDNLNGKFLIGRDHVGIKPLYYAQRDGVWYVASELKALTHVNARIETLAPGTLFDGKETIRYVSYDASRPVSRDSFDEAKARVRTPLEESVRRRVDTDLPICVMFSGGIDSAIVLRLAHRYHPDVTAISFGLPGSNDIEIAHRYCAEHGIRHVIYTFTKQDLLENIDDAVYYGEFFEKIDAIDSAIAHFGYYIANKLGLKVALCGEGSDEIFGGYDLFKTHAQPGALSLYRLNNLHRTDLQRVDRASMRNTVEARVPFMDAELIDYVLSLDFSYKLHGGVEKHILREAFRDVLPGYIIDRPKIRMPDGSGVKNVIIDHIDSLGDAPPDDAARRLGEIGLSDRSALFFARKYLECNFPFPTQRFKQAGKDFSESGYFDFIS

SEQ ID NO: 29324 - protein, 199 aa, Burkholderia mallei ATCC 23344
MTPDGLRERFAEPPEWTQEPAEAQLAHGVDPRSAAVLVPLVVRERGLTVLLTQRADHLNDHAGQISFPGGRREPDDRDANATALREAREEIALAHERVELLGALPDYLTGTGFCVTPVVGLVHPPFTVQPDTLEVAEIFEVPLDFLMNPAHHQIRVLRWEGGERRFFAMPYPRGPVGGQYFIWGATAGMLRNLYRFLSA

SEQ ID NO: 29325 - protein, 467 aa, Burkholderia mallei ATCC 23344
MSLFRKKNVDRMIAGAQAAGLKKALGAVDLTFLGIGAIIGTGIFVLSGTGAVQAGPALMLSFVIAAIACGLAALSYAEFASTIPVAGSIYTYSYATLGELVAWIIGWDLMLEYGLAASAVSVGWSGYLQSLLQGFGVSLPTALTAAPGALPGVVTYFNLPAFVVMLVITTLLSIGIRESTRVNNIMVFIKVAVVLLVIAVGVFHVTPVNWKPFMPHGWNGVFGAAAVMFFAFIGFDAVSSAAEEVKNPKRDLPVGIIASLGVCAFLYVAVAAIATGIVPWAQYANVSHPISYALQVAGEKWVAGFIDLGAVIGMLTVILVMSYGQTRIIFAMSRDGLLPAALSRVHPRFATPFLTTWLVGLFFGLIAALIPLNVLAELINIGTLAAFSMVSIAVLVLRRTHPDLPRAFRCPGVPLVPILAVAACLFLMLNLQPVTWIAFLTWLVIGLFVYFAYSRSRSKLAHGAQQH

SEQ ID NO: 29326 - protein, 558 aa, Burkholderia mallei ATCC 23344
MDIKRTVLWVIFFMSAVMLFDNWQRSHGRPSMFFPNVTQTNTASNATNGNGASGASAAAAANALPAAATGAAPATTAPAAQAQLVRFSTDVYNGEIDTRGGTLAKLTLTKAGDGKQPDLSVTLFDHTANHTYLARTGLLGGDFPNHNDVYAQVAGPTSLAADQNTLKLSFESPVKGGVKVVKTYTFTRGSYVIGVDTKIENVGAAPVTPSVYMELVRDNSSVETPMFSHTFLGPAVYTDQKHFQKITFGDIDKNKADYVTSADNGWIAMVQHYFASAWIPQSGAKRDIYVEKIDPTLYRVGVKQPVEAIAPGQSADVSARLFAGPEEERMLEGIAPGLELVKDYGWVTIIAKPLFWLLEKIHGFVGNWGWAIVLLTLLIKAVFFPLSAASYKSMARMKEITPRMQALRERFKSDPQKMNAALMELYKTEKVNPFGGCLPVVIQIPVFISLYWVLLASVEMRGAPWVLWIHDLSQRDPYFILPVLMAVSMFVQTKLNPTPPDPVQAKMMMFMPIAFSVMFFFFPAGLVLYYVVNNVLSIAQQYYITRTLGGAAAKKKAS

SEQ ID NO: 29327 - protein, 399 aa, Burkholderia mallei ATCC 23344
MSKQLQDAYIVAASRTPIGKAPRGAFKNTRPDELLVHAIKSAIAQVPEFDTKLIEDAIVGCAIPEAEQGLNVARMGALLAGLPNTVGGVTVNRFCASGITALAMAADRIRVGESDALLAAGVESMSMVPMMGNKPSMSPHIFDRSEDFGIAYGMGLTAERVAEQWKVSREDQDAFSVESHRKAIAAQQAGEFKDEIAPYAIVERFPNLATGEIDTKTREIALDEGPRAETSLEGLAKLKTVFANKGSVTAGNSSQTSDGSGALLVVSEKVLKQFNLTPLARFVSFAVRGVPPEIMGIGPKEAIPAALKAAGLKQDDIDWIELNEAFAAQSLAVIRDLGLDPSKINPLGGAIALGHPLGATGAIRAATVVHGLRRRNLKYGMVTMCVGTGMGAAGIIERL

SEQ ID NO: 29328 - protein, 187 aa, Burkholderia mallei ATCC 23344
MPTSLSKKLVVLDRDGVINVDSDVFIKSPDEWIPLPGSLEAIARLNHAGYRVVVATNQSGIGRGLFDMATLNAMHLKMHRAAAAVGGRIDAVFFCPHTADDHCDCRKPKPGMMKLIAERFEIDPADTPVVGDSLRDLQAGEALGFRPHLVLTGKGKKALAAGGLPEGTRVHDDLRAFALDFLSEEHE

SEQ ID NO: 29329 - protein, 761 aa, Burkholderia mallei ATCC 23344
MSSARAVAVRSRLPEALAWLAFVALLVVPALAWPRGWMLGYLAQTAAMIVLALSYNLLLGTTGLLSFGHAAFAGLGAFVAAHSFNRYGLPLPLVPLAGGAAGAAFGALFGFVATRRAGTAFAMITLGIGELVAAAAWSVPEWFGGAGGVSIDRAAGPALAGWEFGKPMHAYALIAAWCVVAAVAMRVLVRTRLARLANAVRDNPARVAALGTDPCRVRFAMAIAAAFFAGVAGALTLIDVEVATAESVGMLRSGAVLFATVIGGTTAFFGPVVGAVLLTFFSVFVASVSRAWLLYLGLLFVAVVLAAPGGASGRWRAWRDARRHGGARFDARRALPGAGAALAGGVAIVFAAELAYALQFAQNDARRAVIGPWRFDAGAPLGWGIAALAAALGMGLAHAARRWGRGAPRTNGPAFADAIDTCGAACGSAELKARDAGDVDGSTNAASAANETNAVSIASTTSTTSTTSMTSMTSATSATSARRAARVSDNAPSPVFEVAAEPVGGGVHAASAPPALRMADVSKSFGATPVLVGIDLTIRPGERHALIGPNGAGKSTLFNLIAGALAPTRGRIALNGIELGRRRPHAVARLGLARSFQQTSVFARMSVYDNLRCAALHAPRARRRWRREPAAAAAIDRAADAALASIGLAAHRDALAGSLSYAQQRALDVGLALASGASVFLFDEPTAGMSREQARRTIELIRRATAGKTVLMIEHDMDAVFGFADRVSVLVRGELVATGSPAAIRANAAVRAAYFGEAFER

SEQ ID NO: 29330 - protein, 232 aa, Burkholderia mallei ATCC 23344
MTTQILIVDDDQELRDLLRDYLVRQGIEVSVLHDAASLEKRLERERPDLIVLDLMMPGVDGLTVLRQLRAAGDDIPVIMLTARADDVDRIVGLELGADDYLGKPFNPRELLARAQAVLRRRRASPSAAAPEQREPYAFGRFVLDFQARTLSSSEFALLKIFVNHALRTLTRERLLELLHGPEYDGTDRGIDVQVWRLRRILETDPSTPRFIQTVRGRGYVFVPNGEAHAQTH

SEQ ID NO: 29331 - protein, 458 aa, Burkholderia mallei ATCC 23344
MSRLIIVSNRVAPISEGEPAAGGLAIGVYDALKETGGMWFGWSGEVIASGGPQIRIEEHGPVTFATIGLSRRDYDQYYRGFSNATLWPAFHYRADLIQFDRHEFEGYSRVNVWLAQQLVPLLRDDDVIWVHDYHLIPFARALRTAGVKNRIGFFLHIPFPAAQVLVNVPPHRELVEALCSFDLLGFQTDTDLRAFFEYVEYEAGGTVDRAAHPARVDAFGRTLRAAAYPIGVYPDEIAALAKAGENGRAVKSLAASLRGRQLVMSVDRLDYSKGLVERFRAFEKLLEHETSFRNRVSFLQIAPSTRADLRAYQDIRRQLEGESGRINGRFAELDWAPILYIHRQYERPVLAALYRLARVGYVTPLRDGMNLVAKEYVSAQDPDDPGVLVLSRFAGAACELTGALIVNPIDIGGMADALSRALSMPLAERRARHADMLARLRENNVSVWRDHFLRDLGR

SEQ ID NO: 29332 - protein, 574 aa, Burkholderia mallei ATCC 23344
MRRLWPYVKPLVWVLVAGVLAMAAVAATEAGIPALLKPLLDHGFGSKGDMTTKLYVPAAVVGLALARAIAQYASGYLLQYVSNRILLDLRIQMFERMIHTGVSFFQRETASTVINAVVFEVNQVLSVLMGVTITLVRDSLTVVFLLGYLFYLNWRLTLIVAILLPCIGWLVGKINRRLRRLNREHQTLTNQLAYIVEETVGGYKVVKVHNGEPYEIGRFNELSRKLRGYSMRMTVSGGLAQPLTQFLASIALAVVLTIAVVQSANDQTTVGGFVAFVTAMLLIISPLKHLMDVNQPLQRGMTAAELIFGLIDEPREPEGGGKPLARASGAIEFSHVSFSYGMSRDGRQTLDDVSFTVAPGEMVALAGPSGSGKTTLVNLLPRFFDPSSGSVRVDGVALPEYSLRDLRNQIAMVSQDVVLFNDTIAANVAYGQAPERDRVEAALRAANLWETVTAMPDGIDTLVGDNGMRLSGGQRQRLAIARAIYKDAPILILDEATSALDSESERHVQAALETLMKGRTTLVIAHRLSTIERADRILVLEGGKIVESGSHRELLEQGGLYAHLHRIQFQQDAG

SEQ ID NO: 29333 - protein, 334 aa, Burkholderia mallei ATCC 23344
MRVILFSSRQYDHDSFDAANQSFGYRLHFQPSHLDAETAILARGYEVVCPFVNDTLDTAVLETLAAGGTRVIALRSAGFNHVDLAAAARLGLTVVRVPAYSPHAVAEHAVALILALNRRLPRAVARTREGDFSLNGLLGFDLFGKTVGVIGTGLIGSVFARIMTGFGMRVLAHSLPPHDDALIALGVRYVPLDALLAEADIVSLHCPLMPATHHMIDADALARMKPGAMLINTSRGGLVDTQALIDALKTGQLGHLGLDVYEEESGLFFEDHSDRPLQDDVLARLLTFPNVIVTSHQAFFTREALAEIAHTTLSNIRAWQDGAPQNVVDAGRPG

SEQ ID NO: 29334 - protein, 769 aa, Burkholderia mallei ATCC 23344
MSTSSSSSSSKEKLREAALDYHEFPTPGKVAIAPTKQMINQRDLALAYSPGVAFACEEIVENPLNAARFTARSNLVGVVTNGTAVLGLGNIGPLASKPVMEGKAVLFKKFAGIDVFDIELNESDPHKLVGVIAALEPTFGGINLEDIKAPDCFIVERECRKRMKIPVFHDDQHGTAIVVAAAVTNGLKVVGKSIKEVKLVASGAGAAALACLDLLVDLGLPLEHITVTDLAGVVYKGRAELMDPDKERFARETDARTLSEVIDGADIFLGLSAAGVLKADMVKKMAERPLILALANPTPEILPEVALEARPDAVLATGRTDYPNQVNNVLCFPFIFRGALDVGATTITREMEIAAVNAIAELAQQEQSDIVATAYGIQDLSFGPEYLIPKPFDPRLIVKIAPAVAQAAMDGGVATRPIEDMEAYKVHLQQFVYHSGTTMKPVFQIARGAPAEKKRVVFAEGEEERVLRAVQIVVDEKLAKPILIGRPAVIEHRIQRYGLRLTPGVDFTIVNTEHDERYRDFWQTYFKMMARKGISEQLARVEMRRRTTLIGSMLVKKGEADGMICGTISTTHRHLHFIDQVIGKRAGCSVYGAMNALVLPGRQIFLVDTHVNVDPTPAQLAEITIMAAEEVRRFGIEPKVALLSHSNFGTSNAPSAQKMRDTLAILRERAPDLHVDGEMHGDVALDAALRKEILPESTLEGEANLLVLPNIDAANIAYNLLKTAAGNNIAIGPILLGAAQPVHVLTESATVRRIVNMTALLVADVNAVR

SEQ ID NO: 29335 - protein, 189 aa, Burkholderia mallei ATCC 23344
MNRSEPLLQVFDLSVEVAKRRVLQSVSLAVPAGALVVLMGANGSGKSTLGMTLAGHPAYRATHGHVRFGGQDLLAMSVQERARAVSGGERKRNELLQLALLCPRLAMLDEIDSGMDVDGVRAAVALIGRLREQGTAFVIVSHYLQMIEALVPDTVLLLDRGRIAESGDLALARDIAAKGFARSDALAQA

SEQ ID NO: 29336 - protein, 402 aa, Burkholderia mallei ATCC 23344
MTQMTAEQMARVKATAPVLAEHGATITKHFYQRMFGRHPELKNVFNQTHQKTGSQPETLAKAVYAYAANIDNLGALGGAVSRIAHKHASLNIRPEHYPIVGENLLASIVEVLGDAVDADTLEAWRIAYGQLAAILIGAEANLYENAAWSGFRPFKVAKKVRESDEITSFYLTPADGGAAPGFEPGQYISVKRFVGDMGVDQPCQYSLSDAPHGKWLRISVKREAGHSEAVPAGKVSTLMHDGVDVDSVVEVTAPMGDFTLNRHAATPVVLISGGVGITPMMSMASTLVAAGSEREVRFLHACRAANVHAFRDWLNDTTDAHPNVKRAVFYEVVGPNDRVGVDHDHEGRITPAALERHALVPDADYYICGPIAFMKQQRDALVALGVAPERVQTEIFGSGALE

SEQ ID NO: 29337 - protein, 384 aa, Burkholderia mallei ATCC 23344
MPTTPTLLSRLPEVGTTIFTVMSALAAEKGAVNLGQGFPDFDCDPRIVDAVAHAMRDGRNQYPPMAGVAPLREAIADKIERLYGRRYDAATEITVTAGATQALLTAILCAVHPGDEVIVIEPTYDSYLPSIELAGATPVFVTLNAPDYAIPFDKLAAAITPKTRAILINTPHNPTGTVWREADMRALEDIVRGTGLLIVSDEVYEHMVYDGARHESVARYPELAARSIIVSSFGKTFHVTGWKIGYVAAPAPLTAEFRKVHQFNVFTVNTPMQFGLADYLRDPEPYLTLPAFYQQKRNFFRAGLANTRFALLPCAGTYFQCVDYSAISDLPEAEFAKWLTTEIGVAAIPVSAFYHEPHESGVVRFCFAKREDTLATALERLARL

SEQ ID NO: 29338 - protein, 587 aa, Burkholderia mallei ATCC 23344
MNMPSAEFSTSESLSPQKTGSIGATVLMKALADENVEFIWGYPGGSVLYIYDELYKQDKIQHVLVRHEQAAVHAADAYSRSTGKVGVCLVTSGPGVTNAVTGIATAYMDSIPLVVISGQVPTAAIGQDAFQECDTVGITRPCVKHNFLVKDVRELAQTVKKAFYIARTGRPGPVLIDIPKDISKTPCEYEPVKNVSLRSYNPVTKGHSGQIRKAVSLLLSAKRPYIYTGGGIILADASRELNQFADLLGYPVTNTLMGLGGYRSSDRKFLGMLGMHGTYEANMAMQHCDVLIAIGARFDDRVIGDPAHFASRPRKIIHIDIDPSSISKRVKVDIPIVGDVKEVLKELIEQLQTAEHGSDADALAQWWKEIEGWRGTDCLKYDRASEIIKPQYVVEKLWELTDGNAFVCSDVGQHQMWAAQFYRFNKPRRWINSGGLGTMGFGLPAAMGVKMAHPDDDVVCITGEGSIQMCIQELSTCKQYDTPVKIISLNNRYLGMVRQWQQIEYSKRYSHSYMDALPDFVKLAQAYGHIGMRIEKSADVEPALKEALSLKDRTVFLDFQTDPTENVWPMVQAGKGITEMLLGSEDL

SEQ ID NO: 29339 - protein, 397 aa, Burkholderia mallei ATCC 23344
MNTAADSLLRLASRVDAIEPFYVMEIVKEAAVLERAGRDIIHMSIGEPDFTAPEPVVDAAAAALRRGVTQYTSALGIAPLREAIAAHYARAHGLSIAPERIVVTAGASAALLLACLALVGRDDEVLMPDPSYPCNRHFVATAEGRAVLVPSGPETRFQLTADDVKTRWGERTRGVLLASPSNPTGTSLEPAELGRIIDAVRARGGFSIVDEIYQGLSYDGAPVSALSFGDDVVTVNSFSKYFNMTGWRLGWLVVPPALVGTFEKLAQNLFICPSALAQHAALACFEPDTLAIYEARRAEFRRRRDFIVPAIESLGFKVPVMPDGAFYVYAQCGGVAHPAAGDSAALVNAMLHDAGVVLVPGMDFGVHAPRDYIRLSYATAYSRLEEAVERLGKLFGR

SEQ ID NO: 29340 - protein, 277 aa, Actinobacillus pleuropneumoniae serovar 1 str. 4074
MSNKRAFLKWAGGKYRLTTEIRKHLPPKSAQGACFVEPFVGAGSVFLNTDYERYLLADINPDLINLFNIIKHDVEHYIKETKTLFLASEANTASFYYARRQEFNRSSDKFRRSVLFLYLNRFGFNGLCRYNQKHEYNVPFGAYKTHYFPENELRFFAEKAQKAEFICADFEQVFARLYQAPDNYIVYCDPPYAPLQQDTNFTHYAGGGFSLVQQEKLAQLARQAQTNNIPVLISNHDTAFTRQIYHGAKIKKIKVQRSIGQRADSRIKVDELFALFL

SEQ ID NO: 29341 - protein, 278 aa, Actinobacillus pleuropneumoniae serovar 1 str. 4074
MKLSTTLKTLLATAITAFALTACDNANNAQSSTAKDSVAQIKEKGVIRIGVFGDKPPFGYVDANGKSQGFDVEIAKEIANDLLGSSDKVEFVLTEAANRVEYLKSNKVDLILANFTKTPERAEVVDFAAPYMNVALGVVSPKGALISDLKQLEGKTLLVNKGTTADAYFTKNHPEINLLKFDQNTETFDALKDGRGVALAHDNALVWAWAKENPTFDVAIGSVGPAEQIAPAVQKGNQALLDVINKEIAEFKTNGKLKAAYEKTLVPVYGDKPELLAQ

SEQ ID NO: 29342 - protein, 316 aa, Actinobacillus pleuropneumoniae serovar 1 str. 4074
MPDIKLFAGNATPELAKRIAERLYTSLGDATVGRFSDGEIQVQINENVRGGDIFIVQSTCAPTNDNLMELIVMVDALRRASAGRITAVIPYFGYARQDRRVRSARVPITAKVVADFLSSVGVDRVLTCDLHAEQIQGFFDVPVDNVFGSPVLIDDILKKSDLVNPIVVSPDIGGVVRARAVAKLLNDTDMAIIDKRRPKANVSQVMHIIGDVTDRDCILVDDMIDTGGTLVKAAEALKERGARRVFAYATHAVFSGTAASNLANPALDEVVVTDTIPLSDEIKALNKVRVLTLSSMLAEAIRRISNEESISAMFDA

SEQ ID NO: 29343 - protein, 582 aa, Actinobacillus pleuropneumoniae serovar 1 str. 4074
MQEKDLSTFKTFKRLFPTIRPYKLGLIAGAIALVLNALVDSSLIYLLKPLLDDGFGKADNSFLKLMAVLVVVFILIRGITNYIASYSLAWVSGNVVMTLRRNIFQHLMYMPVSYFDKNPTGRLLSRVTYDTEMVATSSSHALVTIVREGAYLISLFVVMIYTSWQLSFVLFVMAPIIGVLIGIVSKRFRTLSRNIQSSMGELTVTTEQMLKGHKVVLSFGGQKVEKDRFDRVSNDMRRKGMKIVSADGISDGAVQLIASFALSVVLYVATFPEVMSENLTAGSFTVVFSSMMAMLRPLKSLTNVNSQFQRGMAACQTLFEFLDLETEKDSGKREVERAKGDVVFNHVSFSYDGKDERALSNISFNIPQGKTVALVGRSGSGKSTIANLLTRFYDINEGEILLDGVNIQDYTLANLRRQCSVVSQQVHLFNDSIANNIAYAATEKYSREQIVEAARAAHALGFVEKLEHGFDTVIGENGASLSGGQRQRLAIARALLRNSPVLVLDEATSALDTESERAIQSALAELQKDKTVLVIAHRLSTIEKADEILVVDHGEIIERGSHNELLVKNGAYKQLHSLQFGQ

SEQ ID NO: 29344 - protein, 288 aa, Actinobacillus pleuropneumoniae serovar 1 str. 4074
MTTAFTQIGWIGLGQMGVPMVNRLLANNIDVSVYNRNTAKSAEFAAKGAKVASSVEQLVSENQAVILMVSDYAAAADILNPDVCAKLQGKVIVNMSTVSPTENLKLKVLVEEHGGLFAEAPVSGSVVPATNGTLLILFGGQEAVLKPLQPVFDVLGQRTFHFGDVGKGSGAKLVLNSLLGVFGEAYAEAMLMGEQFGINLNDLAEAIGGSAMNSPMFQTKKPLLLAKEFPAAFMLKHASKDLNLACGELEKANLDLPAVKTVAEQYRNAVAADLGEQDVSGIYLQLAK

SEQ ID NO: 29345 - protein, 675 aa, Actinobacillus pleuropneumoniae serovar 1 str. 4074
MKLTAFLRDKSSFNPFVTSITLFIVILLVAFTLLLPGQTQTVLDWLKATIFQHFSWFYILVGSLFLFFLIFVSLSSFGNIKLGTNEEEPEFHFMSWMAMLFAAGMGVGLMFFGVAEPLSHYVSGISTGSTEQQAQQALLHTVFHWGMHAWAIYGVIALALAYFGFRYKLPLALRSCFYPLLKDRINGRLGDVIDIMALVATLFGIITTLGFGAAQLGSGLVALGWLNESGFGLKIGVIITVMTLAILSAISGVGKGVKILSETNLGLAGFLLLFVLISGPTLYLLSAFSENIGTYFSQLVQLSFKTYAYESKQTGWFNAWTILYWAWWCSWAPFVGLFIARISRGRTIREFVFGVLAIPSLFGILWFTVFGNSAIWLDNNVAQGMLSGLISTPETLLFKFLEYLPFSGLTSFIALVSIALFFITSADSGIYVLNNIASRDKSLASPRWQAMMWGILMSIVAITLLGSGGLATLQTMTLITALPFAMLMVVICVSLMKALAVDKKYFEAKFNPTTVLWSGENWKTRLNQMLNQTEDKDILKFLKHTALPAMRELRRELISEYDLNVDVITKFDEVEPAVEFVIHTESLQDFMYGIRSVGHQVSEQLINDEHLPHIQNETTYEPLSYFFDGRNGYDVQYMTHNEIIADILKHYERYLSLLRDVGQELMSHEPTELAE

SEQ ID NO: 29346 - protein, 391 aa, Actinobacillus pleuropneumoniae serovar 1 str. 4074
MKFIDEALIRVEAGDGGNGCVSFRREKYIPKGGPDGGDGGDGGDVYLIADENLNTLIDYRFEKRYAAGRGENGRSAGCTGHRGNDITLRVPVGTRAIDNDTQEVIGDLTKHGMKMLVAKGGYHGLGNTRFKSSVNRAPRQKTNGTPGEKRDLLLELMLLADVGMLGLPNAGKSTFIRAVSAAKPKVADYPFTTLVPSLGVARVGADRSFVVADIPGLIEGAADGAGLGIRFLKHLERCRVLIHLVDIMPIDESDPAQNISVIESELYQYSEKLSEKPTWLVFNKIDTIGEEEAQARAQEIAEQIGWEGDYYLISAATGQNVQNLTRDIMDFIEANPREVAEENTEADEVKFKWDDYHQQAMQNPIEEDWDNFDDDWSEEDEEGVEFVYTRS

SEQ ID NO: 29347 - protein, 363 aa, Actinobacillus pleuropneumoniae serovar 1 str. 4074
MTQPTLFIDRDGTLIDEPKTDFQIDSLEKLKLERNVIPALLKLKDHYRFVMVSNQDGLGTSSFPQETFDKPHNAMMELFRSQGIEFDEVLICPHKPEDNCDCRKPKTKLLQKYIDRELFDPATSFVIGDRATDVQLAENLGIRALQYHPEKLNWDLIAEKLLGEAVTNIGDRQPRYAEVVRKTKETDIKVQVWLDETGVNDIKTGVGFFDHMLDQIATHGGFRMNISCKGDLWIDEHHTVEDTALALGTALKQAIGDKRGIARFGFVLPMDECQAQCAMDLSGRPFIKFKAEFKRDKVGDFSTELTEHFFQSIAFTMLATLHIKAKGDNDHHKIESLFKVFGRTLRQAIRIEGNELPSSKGVL

SEQ ID NO: 29348 - protein, 712 aa, Actinobacillus pleuropneumoniae serovar 1 str. 4074
MSRTIILIPTTTGVGLTSVSLGLVHALEQKGSKVGFLKPIAQPISGEDTLDRSTSIIRSAQTTEVGEPFMLSEAEALIGQNQSDVLLEKVVERHQQLSKNNEIVVVEGLIPTRKNSYANSVNYDIAQALDAEIILVAAPGSDKPTQLKERVEAAASEFGGRHNPNLLGVIINKFNAPVDESGRTRPDLTEIFDSFQHSTQNIAEVEALFAKSPIKLLACVEWKSDLIATRAIDLAKHLRAAIINEGELQTRRIRGVTFCARSLPHMVDHFKAGSLLVTSADRPEVLVAASLAVMNGVEIGAILLTGGYKIETPIAKLCQQAFESGVPVFRVEGNTWQTALNLQSFSLEVPADDKERISSIKEYVASQFNHGFIDEISKAATRARRLSPAAFRYQLTEYARQAKKRIVLPEGDEPRTVKAAALCAERGIAECVLLANPTDVQRVAESQGVVLGKGITIINPEEVRENYVARLVELRKNKGMTEVVAREQLTDTVVLGTMMLEAGEVDGLVSGAVHTTANTIRPPMQIIKTAPGSSIVSSIFFMLLPDQVLVYGDCAVNPDPTAEQLAEIAIQSAESAKAFGIDPRVAMISYSTGTSGSGADVEKVKEATRIAQEKRPDLIIDGPLQYDAAVMEDVARSKAPNSPVAGKATVFVFPDLNTGNTTYKAVQRSADLVSIGPMLQGMRKPVNDLSRGALVDDIVYTIALTAIQATQG

SEQ ID NO: 29349 - protein, 402 aa, Actinobacillus pleuropneumoniae serovar 1 str. 4074
MSKNLILILNCGSSSLKFAVLDPKTGDEKLSGLAEAFNLEDARIKWKLHGEKGNADLGAGAAHSEALTFIANELLSEELKSSIGAIGHRIVHGGEQFTSSVVINDDVVKGIEHAIQFAPLHNPAHLIGIKEAFRIFPELKEKNVAVFDTAFHQTMPEEAFLYALPYKLYKEHGIRRYGAHGTSHLFITSQVAELAGKPVDQTNAIICHLGNGGSVSVVRNGKCIDTSMGLTPLEGLVMGTRSGDIDPAIVFYLYKNLGMSMEQIEDTLVKKSGLLGLTEVTSDCRYAEDNYEDASKPEAKRALDVYSYRLAKYIGAYMAILGDDHLDAIAFTGGIGENSGHVRELALNHLKLFGVKLDVERNLAARFGKSGVITADDSTFKAVVIPTNEELVIAQDTAKLAL

SEQ ID NO: 29350 - protein, 311 aa, Actinobacillus pleuropneumoniae serovar 1 str. 4074
MNYLASARETLSLYTQAIDSLHNRLSTEFNQAIEMILSCEGRLVVAGIGKSGLVGQKMVATFASTGTPSFFLHPTEAFHGDLGMLKPIDIVILISNSGETDDVNKLIPSLKGFGNKIIAMTGNSHSTLAQHADIILNIGVEKEACPNNLAPTTSTLVTMALGDALAIALIKARNFQAMDFARFHPGGSLGRKLLCTVKDVMIRSLPIVSPTAIFSECLNIMNEGRIGVALVMEHDCLLGIITDGDIRRLLADKGANSLLMTADQIMTKNPKTILESTFLAKAEEEMKSLHVHSLVVMNEENRVVGIFEFSN

SEQ ID NO: 29351 - protein, 212 aa, Pasteuria nishizawae str. North American
MQTRDPQQPGYVVPRVLRRSSIVCRRCYRLYHYGAWDLVGHKSESCWQSMMEVLRKDCLVIHLIDLLDISGSWIPNLAGMLGCHRLWLVGNKMDLLPTRTFPDRVKGFLYKEASSRGLKPESIHICSGRMGQGMGRLRKLLQEPANGKRICVVGTTNVGKSTWINCLLAPKSCLPLSVSAYPGTTLGNVRIPWGNGGSLYDTPGIVRSDRIQ

SEQ ID NO: 29352 - protein, 107 aa, Haemophilus influenzae R2846
METLDKIKKQISENPILIYMKGSPKFPSCGFSARASEALMNCKVPFGYVDILQHPDIRAELPTYANWPTFPQLWVEGELVGGCDIILEMYQAGELQTLLAEVAAKHA

SEQ ID NO: 29353 - protein, 311 aa, Haemophilus influenzae R2846
MNYLKIAQNSLSVESNALLQLSQRLGEDFNQVVDLILACKGRLVIGGIGKSGLIGKKMVATFASTGTPSFFLHPTEAFHGDLGMLKPIDIVMLISYSGETDDVNKLIPSLKNFGNKIIAVTSNKNSTLARHADYVLDITVEREVCPNNLAPTTSALVTLALGDALAVSLITARNFQPADFAKFHPGGSLGRRLLCKVKDQMQTRLPTILPTTNFTDCLTVMNEGRMGVALVMENEQLKGIITDGDIRRALTANGAETLNKTAKDFMTSSPKTIHQDEFLSKAEDFMKAKKIHSLVVVNDENHVVGLVEFSS

SEQ ID NO: 29354 - protein, 669 aa, Haemophilus influenzae R2846
MTKRTSFNPLVIGVTLFFVLLLIAMIFIAPEQTQALLNQAKSGIFANFSWFYVLTFSVFLGFLLILSVSSLGNIKLGQDEEEPEFSFLSWLAMLFAAGMGVGLMFFGVAEPLTHYLSDITAGSAEHKQQEALLHTLFHWGIHAWAVYGTIALALAYFGFRYKLPLALRSCFYPLLKDRINGKIGDAIDVMALLATLFGIITTLGFGSSQLGAGLEQIGWISQNSFALQVGVIVVVMCLAVFSAISGVGKGVKILSEINLTLAFCLLLFVLIAGPTLYLLSAFSDNMGNYFSNLVQLSFKTYAYEQEHTSWFSGWTVLYWAWWCSWAPFVGLFIARISKGRTIREFIFGVLVIPSLFGILWFTVFGNTAVWLNDGIAAGGLGEFISSPEILLFKFLNYLPLPTITGFVSLLVISLFFITSADSGIYVLNNIASRDKSLASPAWQAIMWGTLMSVVAIVLMQSGGLANLQTMTLIVALPFALLMLVMCFSLWKGLIADKKYFSTKVNPTSIFWSGDKWKSHLEQMMNQTQEKDILRFLKNTALPAMRELRQELTGKYNLSVEINTLFEQEEPALELVIHKESMRDFMYGIKSVGREVSEQLINDENLPHIQHSITYEPYTYFFDGRVGYDVQYMDQDELIADMLKQYERYLSLLDDVGQELMAHEQTELAE

SEQ ID NO: 29355 - protein, 302 aa, Haemophilus influenzae R2846
MTEQFDKTYCGFIAIVGRPNVGKSTLLNKILGQKISITSRKAQTTRHRIVGIKTEGAYQEIYVDTPGLHIEEKRAINRLMNRAASSAIGDVDLIIFVVDGTHWNADDEMVLNKLRNAKAPVVLAINKVDNIKNKDDLLPFITDLSGKFNFAHIVPISAQRGNNIHELEKIVRQSLREGVHHFPEDYVTDRSQRFMASEIIREKLMRFTGEELPYSVTVEIEQFKVNERGTYEINGLILVEREGQKKMVIGAGGQKIKTIGMEARADMERLFDNKVHLELWVKVKSGWADDERALRSLGYMDE

SEQ ID NO: 29356 - protein, 587 aa, Haemophilus influenzae R2846
MQEQKLQENDFSTLQTFKRLWPMIKPFKAGLIASGIALVFNALADSGLIYLLKPLLDDGFGKANHSFLKIMAFVVVGMIILRGVTNFISNYCLAWVSGKVVMTMRRRLFKHLMFMPVSFFDRNSTGKLLSRITYDSEMIASSSSGSLITIVREGAYIISLLAVMFYTSWELTLVLFVIGPIIAVLITIVSKIFRKLSKNLQDSMGELTATTEQMLKGHKVVISFGGQFVEEERFNKVSNNMRRKGMKMVTADSISDPVVQIIASFALVAVLFLATTPLIAEDNLSAGSFTVVFSSMLAMMRPLKSLTNVNSQFQRGMAACQTLFAILDLEPEKDNGTYKAEPAKGELEFKNVSFAYQGKEELALNNISFSVPAGKTVALVGRSGSGKSTIANLVTRFYDIEQGEILLDGVNIQDYRLSNLRENCAVVSQQVHLFNDTIANNIAYAAQDKYSREEIIAAAKAAYALEFIEKLPQGFDTVIGENGASLSGGQRQRLAIARALLRNSPVLILDEATSALDTESERAIQSALEELKKDRTVVVIAHRLSTIENADEILVIDHGEIRERGNHKTLLEQNGAYKQLHSMQFTG

SEQ ID NO: 29357 - protein, 815 aa, Haemophilus influenzae R2846
MRVLKFGGTSLANPERFSQAAKLIEQAHLEEQAAGVLSAPAKITNHLVALSEKAALNQSTDTHFNEAIEIFYNIINGLHAENNQFDLNGTKALIDAEFAQIKGLLEEIRQAGKVEDAVKATIDCRGEKLSIAMMKAWFEARGYSVHIVDPVKQLLAKGGYLESSVEIEESTKRVDAASIAKDKVVLMAGFTAGNEKGELVLLGRNGSDYSAACLAACLGASVCEIWTDVDGVYTCDPRLVPDARLLPTLSYREAMELSYFGAKVIHPRTIGPLLPQNIPCVIKNTGNPSAPGSIIDGNVKSESLQVKGITNLDNLAMFNVSGPGMQGMVGMASRVFSAMSGAGISVILITQSSSEYSISFCVPVKSAEVAKTVLETEFANELNEHQLESIEVIKDLSIISVVGDGMKQAKGIAARFFSALAQANISIVAIAQGSSERSISAVVPQNKAIEAVKATHQALFNNKKVVDMFLVGVGGVGGELIEQVKRQKEYLAKKNVEIRVCAIANSNRMLLDENGLNLEDWKNDLENATQPSDFDVLLSFIKLHHVVNPVFVDCTSAESVAGLYARALKEGFHVVTPNKKANTRELVYYNELRQNAQASQHKFLYETNVGAGLPVIENLQNLLAAGDELEYFEGILSGSLSFIFGKLEEGLSLSEVTALAREKGFTEPDPRDDLSGQDVARKLLILAREAGIELELSDVEVEGVLPKGFSDGKSADEFMAMLPQLDEEFKTRVATAKAEGKVLRYVGKISEGKCKVSIVAVDLNNPLYKVKDGENALAFYTRYYQPIPLLLRGYGAGNAVTAAGIFADILRTLQH

SEQ ID NO: 29358 - protein, 557 aa, Haemophilus influenzae R2846
MMSYTETSLGAENTRTHNFITQIIDEDLASGKHKSVHTRFPPEPNGYLHIGHAKSICLNFGLAKEYQGLCNLRFDDTNPVKEDVEYVDSIKADVEWLGFKWEGEPRYASDYFDALYGYAIELIKKGLAYVDELSPEEMREYRGTLTEPGKNSPYRDRTIEENLALFEKMKNGEFAEGKASLRAKIDMASPFMVMRDPVIYRIKFASHHQTGDKWCIYPMYDFTHCISDAIERITHSICTLEFQDNRRLYDWVLENISIERPLPHQYEFSRLNLEGTLTSKRKLLKLVNDEIVDGWNDPRMPTISGLRRRGYTPASLREFCRRIGVTKQDNVVEYSALEACIREDLNENAPRAMAVIDPVRVVIENFESEAVLTAPNHPNRPELGERQLPFTKELYIDRADFREEANKQYKRLVLGKEVRLRNAYVIKAERVEKNESGEITTIFCTYDPETLGKNPSDGRKVKGVIHWVSAVNNHPAEFRLYDRLFTVPNPGAEDDIESVLNPNSLVIKQGFVEQSLANAEAEKGYQFEREGYFCADSKDSRPEHLVFNLTVSLKEGF

SEQ ID NO: 29359 - protein, 756 aa, Haemophilus influenzae R2846
MSEQLRQAALDFHEFPIPGKIEVTPTKSLATQRDLALAYSPGVAEPCLEIEKDPAASYKYTARGNLVAVISNGTAVLGLGNIGALAGKPVMEGKGVLFKKFAGINVFDIEVNEHDPDKLVDIIASLEPTFGGVNLEDIKAPECFYIEQKLRERMNIPVFHDDQHGTAIISAAAIINSLRIVGKKIEDVRLVASGAGAASIACLNLLLSLGMKRENITVCDSKGVVYKGRDDKMDQTKKDYAIEDNGWRKLGDAIPNADIFLGCSAAGALTQDMVKSMAAHPIILALANPNPEITPPEAKAVRPDAIVCTGRSDYPNQVNNVLCFPFIFRGALDVGATTINEEMKRAAVYAIADLALEEQNEVVTSAYGGEGATFGGDYVIPRPFDPRLIVRIAPAVAKAAMESGVATRPIQNWDAYVEKLTQFVYKTSLFMRPIFSQAKSAKQRIILAEGEENKALHATQEVISMGLANPILIGRRSVIEEKIKKLGLRLTAGVDFEIVDNEDNPRYEECWKHYYELTKRKGITPAIAKRVVRSNTTVLASTLLSLGYADALVCGLFGSYGKHLASIRDIIGLKDGVKTAAALNSLVLPTGNVFLTDTHVNSNPTAEELAEITLMAAEEIHRFGIEPAVALLSHSNFGSSDSLGAPKMREVLQIVKEHNPHLMIDGEMRGDLAMNEAHRKELMPDSPLKGSANLLVFPDLSASRISYSLLRGTTTAITVGPILMGMNKSAHILNPGASVRRIINMIAYAAVKAQQE

SEQ ID NO: 29360 - protein, 635 aa, Haemophilus influenzae R2846
MGKIIGIDLGTTNSCVAVMDGDKARVIENAEGARTTPSIIAYTDNETLVGQPAKRQAITNPKNTLFAIKRLIGRRFESEEVQRDIKIMPFEITRADNGDAWVNVKGDKLAPPQISAEVLKKMKKTAEDFLGEAVTEAVITVPAYFNDAQRQATIDAGKIAGLDVKRIINEPTAAALAFGLGSSKENQVIAVYDLGGGTFDISIIEIDNFDGEQTFEVLATGGNTHLGGEDFDNRVIDYIIDEFKKEQNIDLRNDAMALQRVKEAAEKAKIELSSAQSTEVNLPYITADATGPKHLALNITRAKLEALVEDLVASSIESLKAVLKDAGKGVSEIHDIILVGGQTRMPLVQQKVAEFFGKEARKDVNPDEAVAIGAAVQGGVLKGDVKDVLLLDVTPLSLGIETMGGVMTTLIEKNTTIPTKKSQVFSTAEDNQSAVTIHVLQGERKRAADNKSLGQFNLEGINPAPRGMPQIEVTFDIDANGVINVSAKDKNTGKEQQIRIQASSGLSDEEIQQMVRDAEANADADRKFEEVVQARNQADGIAHATRKQIAEAGDALSVADKEKIETAVAELETAAKGEDKAEIEAKIEAVIKASEPLMQVAQAKAQQAGGEQPQQSSAKDDGVVDAEFEEVKDNK

SEQ ID NO: 29361 - protein, 564 aa, Haemophilus influenzae R2846
MSVQQLISRLTDIVGSRYIITDPTKTEAYRSGYRFGTGNALAVVRPATLLEFWNIVKVCVEHDIIVINQAANTGLTGGSTPDGNDYDRDIVVINTMRIDGIQLINNASQVICLPGSTLNELENQLKPFGREPHSVIGSSCIGASVIGGICNNSGGALVQRGPAYTEMALYAQLNEKGELELKNHLGIDLGETPEEILTNLQEKCYQVKDIRQDCGHGHDHYYCNYVRQVDEGSPARFNADPARHYEASGCAGKLAVFAVRLDTFPLEKETAVFYIGTNQTSVLSDIRRHMLVNFEVLPISGEYIHRDAFDIAAKYGKDTFWVIKKFGTHWLPKLFSLKSNVDRIGKKFFFLPQHLSDKFMQTVSKFIPEHLPQSLWDYRNKYEHHLIIKMGGKGIQEAREYLESYIADGSKGGYFECNAIETQAAMLHRFAVASAAIRYRAIHEKEVEEIVALDVALRRNDQDWFEVLPPEIDNRIISKLYYGHFMCHVFHQDYIVKKGYDYEELEYEMLKLLDKRGAQYPAEHNVGHLYEAKPTLRKFYKELDPTNSFNPGIGKTTRKKYWAE

SEQ ID NO: 29362 - protein, 635 aa, Haemophilus influenzae R2846
MVKNLVLWVVVAVIMMTAYQSFNSSSVENSTDYTTFVYDVSNGQVTAARFDANEITVTKTDGSKYSTVMPPLEDKKLLDDLLSKKVKVEGTPFERRGFLSQILISWFPMLFLVGVWVFFMRQMQGGGGKAMSFGKSRAKMLNQDQIKVTFADVAGCDEAKEEVSEIVDFLRDPNKFQNLGGKIPKGILMVGPPGTGKTLLARAIAGEAKVPFFTISGSDFVEMFVGVGASRVRDMFEQAKKNAPCLIFIDEIDAVGRQRGAGLGGGHDEREQTLNQMLVEMDGFSGNDGVIVIAATNRPDVLDPALTRPGRFDRQVVVGLPDVKGREQILKVHMRKVPVAQDVDAMTLARGTPGYSGADLANLVNEAALFAARVNKRMVTMLEFEKAKDKINMGPERRTMIMTDKQKESTAYHEAGHAIVGYLVPEHDPVHKVTIIPRGRALGVTFFLPEGDQISISRKQLESKLSTLYAGRLAEDLIYGEENISTGASNDIKVATNIARNMVTQWGFSDKLGPILYTEDEGEVFLGRSMAKAKHMSDETAHAIDEEVRAIVNRNYARARQILTDNMDILHAMKDALVKYETIEEEQIKQLMNREPVTPPSGWGEPKTQQAAYANSTTNDTKPESAVENTDDFNV

SEQ ID NO: 29363 - protein, 573 aa, Haemophilus influenzae R2846
MKKLSGAEMVVQSLRDEGVEYVFGYPGGAVLDIYDAIHTLGGIEHILVRHEQAAVHMADGYARSTGKVGCVLVTSGPGATNAITGILTAYTDSVPMVIISGQVMSNLIGSDAFQECDMLGISRPVVKHSFIVKKAEDIPSTLKKAFYIASTGRPGPVVVDIPKDTVNPNFKYPYEYPESVELRSYNPTVNGHKGQIKKALKALLVAKKPILFVGGGAITAECSKQLIQFAQRLNLPVTSSLMGLGAYPSTDKQFLGMLGMHGTLEANTAMHESDLILGIGVRFDDRTTNNLEKYCPNAKVIHIDIDPTSISKNVPVAIPIVGNAKNVLEEFLGLLNEEGLKSQTDLESWWQEINQWKAKKCLEFDRTSGVIKPQQVVEAVYRLTKGQAYVASDVGQHQMFAALHYPFDEPRHWINSGGAGTMGFGFPAALGVKLAHPEGTVVCVTGDGSIQMNIQELSTATQYGIPVVIICLNNHFLGMVKQWQDLIYSGRHSQTYMNSLPDFAKLAESYGHVGIKIATPDELESKLQEAFSIKNKLVFVDINVDESEHVYPMQIRGGAMNEMILSKPQEETN

SEQ ID NO: 29364 - protein, 404 aa, Haemophilus influenzae R2846
MKLPIYLDYAATCPVDERVAKKMMAFLTIDGTFGNPASRSHKFGWQAEEAVDIARNQIADLIGSDSREIVFTSGATESDNLAIKGAAHFYQTKGKHIITCKTEHKAVLDTCRQLEREGFEVTYLSPEADGLIDLEKFKAALRPDTILASIMHANNEIGVLQDIKAIGELCRANKTIFHVDATQSVGKVEINLEELAVDLMSMSSHKLYGPKGVGALYVRRKPRIRLEAIIHGGGHERGMRSGTLPVHQIVGMGEAYRIAKEEMASEMPRLKALRDRLYNGLKDIEETYVNGSMEHRLDSNLNISFNYVEGESLMMALRDIAVSSGSACTSASLEPSYVLRALGLNDELAHSSIRFTLGRYTTEEEIDYTINLMKGAVEKLRALSPLWDMFKEGIDLNTIEWSAH

SEQ ID NO: 29365 - protein, 410 aa, Haemophilus influenzae R2846
MTNKVSLDKSKIKFVLFEGVHQSALDTLHAAGYTNIDYYKKALDGDELKEAIKDAHFIGLRSRTHLTAEMIEAAPKLIAVGCFCIGTNQVDLNAAKVRGIPVFNAPFSNTRSVAELVLGEILLLMRNVPQANAEVHRGVWNKSATGSHEVRGKKLGIIGYGHIGSQLSIIAESLGMDVYFYDIENKLPLGNAKQLRGLQELLSSCDVVSLHVPELPSTKNLMNAERIAQLKQGAILINAARGTVVDIDALAQALKDGKLQGAAIDVFPVEPASINEEFISPLREFDNVILTPHIGGSTAEAQENIGFEVAGKFVKYSDNGSTLSSVNFPEVSLPEHEGTKRLLHIHENRPGILNKLNQIFVEANLNIAAQYLQTDPKIGYVVVDVETNDASPLLTKLKEIDGTIRARVLY

SEQ ID NO: 29366 - protein, 362 aa, Haemophilus influenzae R2846
MQPTLFIDRDGTLIDEPKTDFQIDSLEKLKLEPKVIPALLRLKAKYRFVIVSNQDGLGTDAFPQTNFDKPHNVMMALFESQGITFDEVLICPHKPEENCLCRKPKIKLLDHYIRKNLFDIDRSFVIGDRETDMQLAENLGIRAIQYDPQKMNWDLIAEKLLGETVTNCGKRPPRFAEVIRQTKETDIKVQVWLDEAGVNEIKTGVGFFDHMLDQIATHGGFRMNVQCKGDLWIDEHHTVEDTALALGQALKQAIGDKRGIARFGFVLPMDECKAECALDLSGRPWIKFNACFKRDKVGDFSTELTEHFFQSLAFSMLATLHLNVTGNNDHHKIESLFKAFGRTLRQAIRIEGNEMPSSKGVL

SEQ ID NO: 29367 - protein, 328 aa, Haemophilus influenzae R2846
MLHFAHIFQNKDHTMNTTKPFPLPTGYFGIPLGLAALSLAWFHLENLFPAARMVSDVLGIVASAVWILFILMYAYKLRYYFEEVRAEYHSPVRFSFIALIPITTMLVGDILYRWNPLIAEVLIWIGTIGQLLFSTLRVSELWQGGVFEQKSTRPPFYLPAVAANFTSASSLALLGYNDLGYLFFGAGMIAWIIFEPVLLQHLRISSLEPQFRATIGIVLAPSFVCVSAYLSLNHGEVDTLVKILWGYGFLQLFFLLRLFPWIVEKGLSIGLWGFSFGLASMANSATAFYHGNVLQGVSIFAFVFSNVMIGLLVLMTIIKLAKGQFFLK

SEQ ID NO: 29368 - protein, 330 aa, Haemophilus influenzae R2846
MKKTFILQQQEISFVKNTFTQNLIEQLGIIEVQGPILSQVGNGMQDNLSGIEKAVQVNVKCIPNAVFEVVHSLAKWKRHTLARFNFKEDEGLFVHMKALRPDEDSLDPTHSVYVDQWDWEKVIPEGRRNFAYLKETVNAIYRAIRLTELAVEARFDIPSILPKQITFVHSEDLVKRYPDLSSKERENAICKEYGAVFLIGIGGKLSDGKPHDGRAPDYDDWTTESENGYKGLNGDILVWNDQLGKAFELSSMGIRVDESALRLQVGLTGDEDRLKMDWHQDLLNGKLPLTIGGGIGQSRLAMLLLRKKHIGEVQSSVWPKEMLEEFSNIL

SEQ ID NO: 29369 - protein, 284 aa, Haemophilus influenzae R2866
MASENQKLSSVALTPVEATDYAENTATYKANKRPFLSFMSGISAGACIALAFVFYTTTQTASAGAPWGLTKLVGGLVFSLGVIMVVILGSELFTSSTLTLVARVGGRITTTQMIRNWIVVYLGNFVGSLFIAAVIWFSGQTMAANSQWGLTILATAQHKIHHTWFEAFNLGILCNIMVCVAVWMSYSGKTVTDKAFIMIMPIGLFVASGFEHCVANMFMIPMGIITAHFSTPEFWQQIGVDPMKYADLDLYHFIVKNLIPVTLGNIVGGAICIGVFQRYLTKTH

SEQ ID NO: 29370 - protein, 404 aa, Haemophilus influenzae R2866
MKLPIYLDYAATCPVDERVAKKMMAFLTIDGTFGNPASRSHKFGWQAEEAVDIARNQIADLIGADSREIVFTSGATESDNLAIKGAAHFYQTKGKHILTCKTEHKAVLDTCRQLEREGFEVTYLSPEADGLIDLEKFKAALRPDTILASIMHANNEIGVLQDIKAIGELCRANKTIFHVDATQSVGKVEINLEELAVDLMSMSSHKLYGPKGVGALYVRRKPRVRLEAIIHGGGHERGMRSGTLPVHQIVGMGEAYRIAKEEMASEMPRLKALRDRLYNGLKDIEETYVNGSMEHRLDSNLNISFNYVEGESLMMALRDIAVSSGSACTSASLEPSYVLRALGLNDELAHSSIRFTLGRYTTEEEIDYTINLMKGAVEKLRALSPLWDMFKEGIDLNTIEWSAH

SEQ ID NO: 29371 - protein, 410 aa, Haemophilus influenzae R2866
MTNKVSLDKSKIKFVLFEGVHQSALDTLHAAGYSNIDYYKKALDGDELKEAIKDAHFIGLRSRTHLTAEMIEAAPKLIAVGCFCIGTNQVDLNAAKVRGIPVFNAPFSNTRSVAELVLGEILLLMRNVPQANAEVHRGIWNKSATGSYEVRGKKLGIIGYGHIGSQLSIIAESLGMDVYFYDIENKLPLGNAKQLRSLEELLSSCDVVSLHVPELPSTKNLMNAARIAQLKQGAILINAARGTVVDIDALAQALKDGKLQGAAIDVFPVEPASINEEFVSPLREFDNVILTPHIGGSTAEAQENIGFEVAGKFVKYSDNGSTLSSVNFPEVSLPEHEGTKRLLHIHENRPGILNKLNQIFVEANLNIAAQYLQTDPKIGYVVVDVETNDASPLLTKLKEIDGTIRARVLY

SEQ ID NO: 29372 - protein, 362 aa, Haemophilus influenzae R2866
MQPTLFIDRDGTLIDEPKTDFQIDSLEKLKLEPKVIPALLRLKAKYRFVIVSNQDGLGTDAFPQTDFDKPHNVMMALFESQGITFDEVLICPHKPEENCLCRKPKIKLLDHYIRKNLFDIDRSFVIGDRETDMQLAENLGIRAIQYDPQKMNWDLIAEKLLGETVTNCGKRPPRFAEVIRQTKETDIKVQVWLDEAGVNEIKTGVGFFDHMLDQIATHGGFRMNVQCKGDLWIDEHHTVEDTALALGQALKQAIGDKRGIARFGFVLPMDECKAECALDLSGRPWIKFNACFKRDKVGDFSTELTEHFFQSLAFSMLATLHLNVTGNNDHHKIESLFKAFGRTLRQAIRIEGNEMPSSKGVL

SEQ ID NO: 29373 - protein, 328 aa, Haemophilus influenzae R2866
MLHFAHIFQNKDHTMNITKPFPLPTGYFGIPLGLAALSLAWFHLENLFPAARMVSDVLGIVASAVWILFILMYAYKLRYYFEEVRAEYHSPVRFSFIALIPITTMLVGDILYRWNPLIAEVLIWIGTIGQLLFSTLRVSELWQGGVFEQKSTHPSFYLPAVAANFTSASSLALLGYHDLGYLFFGAGMITWIFFEPVLLQHLRISSLEPQFRATIGIVLAPAFVCVSAYLSINHGEVDTLAKILWGYGFLQLFFLLRLFPWIVEKGLNIGLWAFSFGLASMANSATAFYHGNVLQGVSIFAFVFSNLMIGLLVLMTIYKLTKGQFFLK

SEQ ID NO: 29374 - protein, 330 aa, Haemophilus influenzae R2866
MKKTFILQQQEISFVKNTFTQNLIEQLGIIEVQGPILSQVGNGMQDNLSGIEKAVQVNVKCIPNAVFEVVHSLAKWKRHTLARFNFKEDEGLFVHMKALRPDEDSLDPTHSVYVDQWDWEKVIPEGRRNFAYLKETVNAIYRAIRLTELAVEARFDIPSILPKQITFVHSEDLVKRYPDLSSKERENAICKEYGAVFLIGIGGKLSDGKPHDGRAPDYDDWTTESENGYKGLNGDILVWNDQLGKAFELSSMGIRVDESALRLQVGLTGDEDHLKMDWHQDLLNGKLPLTIGGGIGQSRLAMLLLRKKHIGEVQSSVWPKEMLEEFSNIL

SEQ ID NO: 29375 - protein, 911 aa, Arabidopsis thaliana
MNPEKFTHKTNETIATAHELAVNAGHAQFTPLHLAGALISDPTGIFPQAISSAGGENAAQSAERVINQALKKLPSQSPPPDDIPASSSLIKVIRRAQAAQKSRGDTHLAVDQLIMGLLEDSQIRDLLNEVGVATARVKSEVEKLRGKEGKKVESASGDTNFQALKTYGRDLVEQAGKLDPVIGRDEEIRRVVRILSRRTKNNPVLIGEPGVGKTAVVEGLAQRIVKGDVPNSLTDVRLISLDMGALVAGAKYRGEFEERLKSVLKEVEDAEGKVILFIDEIHLVLGAGKTEGSMDAANLFKPMLARGQLRCIGATTLEEYRKYVEKDAAFERRFQQVYVAEPSVPDTISILRGLKEKYEGHHGVRIQDRALINAAQLSARYITGRHLPDKAIDLVDEACANVRVQLDSQPEEIDNLERKRMQLEIELHALEREKDKASKARLIEVRKELDDLRDKLQPLTMKYRKEKERIDEIRRLKQKREELMFSLQEAERRYDLARAADLRYGAIQEVESAIAQLEGTSSEENVMLTENVGPEHIAEVVSRWTGIPVTRLGQNEKERLIGLADRLHKRVVGQNQAVNAVSEAILRSRAGLGRAQQPTGSFLFLGPTGVGKTELAKALAEQLFDDENLLVRIDMSEYMEQHSVSRLIGAPPGYVGHEEGGQLTEAVRRRPYCVILFDEVEKAHVAVFNTLLQVLDDGRLTDGQGRTVDFRNSVIIMTSNLGAEHLLAGLTGKVTMEVARDCVMREVRKHFRPELLNRLDEIVVFDPLSHDQLRKVARLQMKDVAVRLAERGVALAVTDAALDYILAESYDPVYGARPIRRWMEKKVVTELSKMVVREEIDENSTVYIDAGAGDLVYRVESGGLVDASTGKKSDVLIHIANGPKRSDAAQAVKKMRIEEIEDDDNEEMIED

SEQ ID NO: 29376 - protein, 159 aa, Plantago major
MSDEEHQFEAQADAGASKTFPQQAGTIRKNGYINIKNRPCKVVEVSTSKTGKHGHAKCHFVAIDIFNGKKLEDIVPSSHNCDVPHVNRVDYQLIDISEDGFVSLLTDNGSTKDDLRLPTDDALATQIKEGFAEGKDLVVSVMSAMGEEQINAIKDVGPK

SEQ ID NO: 29377 - protein, 195 aa, Plantago major
VTTIFYLLCGCMGYAAFGDQAPGNLLTGFGFFDPYWLLDIANIAIVVHLVGAYQVYCQPLFAFIEKWSVRKWSRSDFVTAEYDIPIPLCGVYQLNLFRLVWRTIYVVFTTLIAMLLPFFNDVVGILGALGFWPLTVYFPVEMYIAQNKVRKWTSQWIGLQLLSIACLLVSVAAAVGSIAGVILDLRTFKPFKTVY

SEQ ID NO: 29378 - protein, 193 aa, Plantago major
VFYMLCGCMGYAAFGDLAPGNLLTGFGFYNPFWLLDIANAAIVIHLVGAYQVYCQPLFAFIEKYANAKWPDREFITNDIEIPIPGLQEPYRLNFFRLVWRTAFVILTTVISMLLPFFNDVVGILGAFGFWPLTVYFPVEMYIAQKKIPKWSTKWICLQMLSMACLVISIAAAAGSVAGVILDLKVYKPFKTSY

SEQ ID NO: 29379 - protein, 105 aa, Plantago major
MDKVMKIKSENGVVIFSKSSCCLSYAVQMLFQELRANAFIYEIDHSPDGKEVEKALMRLGSSGPIPAVFIGGKLVGSTNEVMSLHLSGSLIPLLKPTQANLSYKS

SEQ ID NO: 29380 - protein, 178 aa, Oryza sativa Japonica Group
MVTAARLLPLILFLTAVAVGCSAWEMNIRLPTERLAYGGGEAVVAPIIHALRPLLGSGRQLAARAGVACDSWRLGVEAHNVIDWRTVPAECEGYIGHYMLGEHYRRDFAVVVDEAVAYAETLKLAGNGKEIWVFDIDETSLSNLPYYAKHGFGATPYNATSFREYVAEGSAPALPETR

SEQ ID NO: 29381 - protein, 135 aa, Oryza sativa Japonica Group
MSGEWSVKLFDCFGDSGTCCLTCWCPCITFGRIAEIVDKGSTSCCMHGTLYVLLATIGCQWLYACTKRSSMRAQYNLQQSPCLDCCVHFFCDSCALCQEYKELEKRGFNMSKGWEGSNKMVGCVQGMKPPRKQRM

SEQ ID NO: 29382 - protein, 573 aa, Oryza sativa Japonica Group
MALSLSSSISSSVHVTNNLAHASPSPACCCPCSNPSYHQLGLDAISCCFVAGGGGAEAAAPFFGFGFGDVDGEFLVASPVAAVGDELACAVPLRRPQGSVSEEEVNAAAVAAAAAGGAESCSTVHSVLGSVEFGCGTSSGVTIAQASRMGRLAGEAPCGDAGGGGWIYGGSGIAPLHGAYYLSGFSSGAGAGFLSPFAASSVAAAAPAASELSLRLGATKCSSPSSMANASSEVSCSGLTHVSSGGGLGYHQAAAAGAGAALFHPTHGDDAAAAAAGELRQAYHSRAPPHFSQVVSRSAVLAHVAQELLNGFVACLLQDVAADAASGVDGGEASQALSSGFSARITTAPTEDASPGSGGARWAAEAQRLRKLLQLVDEKCNQCVEEMQSTAARFNSMVRSTGGGGGGLTAAFAGRAVAAAYRRVRRRVMGQLVAAATARSSSSAAAAALEEKERSWESSFIQKHWAMQQLRRGDQQSWRPQRGLPEKSVAVLKAWMFENFLRPYPKDSEKDMLAARSGLSRSQVSNWFINARVRLWKPMIEDMYEELKKTSGGSDGAAEIEHLSSKDVLSLES

SEQ ID NO: 29383 - protein, 930 aa, Oryza sativa Japonica Group
MERSLLPWLLLLLCFADGVFQSRAQPDSKGFISIDCGIQPNTSYVHNTTKISYVADDDFTDGGSNYNVSPEYIKPQLSQRYYNLRAFPDGARNCYTARSLAPGIKYLIRASFLYGNYDGLNKLPVFHLYIGVNFWTMVNITSLGLGGSRYEEAIVVVPDDFVQVCLINTGTGTPFISSLELRPLDKRLYPQVNATLGLLQLNRLNFGPTDNSLVRYPDDPHDRFWGNWDSYTSSLWKEISTASRVDNLDGDIFDAPTAVMQTAVTPRNASGNIYFFWEPWPQPNDPTPPYTVIFHFSELEILTNNASRQFYINLNGEPLIDTAYEPTYLTARYLYGLEPLERTSRYNITINATANSTLPPLINAAEIFSIISTAVIGTDSQDASSMMAIKDKYQVKKNWMGDPCMPKTFAWDKLTCSYPNSSGARIISLNLSSSGLSADISSAFGNLKALQYLDLSNNSLTGSIPDVLSQLPSLRVLDLTGNQLSGSIPSGILKRIQDGSLNVRYGNNPNLCINGNSCKAAKKKSKLAIYTVIPAVLVVLIASVTTLFCLLRRKKQGPMNNSLEQQNEMSTSTSHVLINSGYGDNVSLRLENRRFTYKELEKITNKFKRVLGRGGFGYVYHGFLEDGTEVAVKLRSESSSQGAKEFLIEAQILTRIHHKNLVSMISYCKDGIYMALVYEYMPEGTLEEHIVGENKKGKILNMEREAQYRIGICTRDVKATNILLNTRLEAKIADFGLSKASSYDNITHVSTNALVGTLGYVDPEYQMTMQATTKSDVYSFGVVLLELVTGKPAILHEPNPISVIHWTRQRLARGNIEDVVDTCMPSDYDVNGVWKAMDIAFTCTAQASTQRLTMTEVVMQLQECLELEDARCAIGDAHNEFYPDPRSDHNLSYNTYVSDRSNDVSQNSGVSMMEHNFGRVPTMASGPAAR

SEQ ID NO: 29384 - protein, 224 aa, Oryza sativa Japonica Group
MENRVGESSATAVDGGGGAKDSGSFECNICLELAQDPVVTLCGHLFCWPCLYEWLHVHAHSRECPVCKAGLEEEKLVPLYGRGKASTDPRSRSVAGVQIPSRPAGQRPATASQPDHHHDHLPHHDPWFMGGAGAPVAGGRWGNYTFSAAIGGLFPLLSFQVHGFPQAAAYGPAAGFPYGYGHSFHGWHGHGFPHQAPQGQHVDVFLKVLLVLVGVLVIASLIVF

SEQ ID NO: 29385 - protein, 349 aa, Oryza sativa Japonica Group
MAQLGWVAGPITLLLFAAITFYTCGLLSDCYRVGDPATGKRNYTYTDAVKSYLGGWHVWFCGFCQYVNMFGTGIGYTITASISAAAINKSNCYHWRGHGTDCSQNTSAYIIGFGVLQALFCQLPNFHQLWWLSIIAAVMSFSYAAIAVGLSLAQTIMDPLGRTTLTGTVVGVDVDATQKVWLTFQALGNVAFAYSYAIILIEIQDTLRSPPPENATMRRATAAGISTTTGFYLLCGCLGYSAFGNAAPGNILTGFGFYEPYWLVDVANACIVVHLVGGFQVFCQPLRRLHPGRPRLAQDLRALQDQVLIRPRRSALVYTLGLIPYGYGGIMIYYSRFGLSEVQLYLKIL

SEQ ID NO: 29386 - protein, 193 aa, Oryza sativa Japonica Group
MALLLAAFAAAATANSGAAPAASDFIRKSCRATQYPAVCVQSLASYGGAGAPPPRSPRELARAALSVSVDKARSASTYVGHICGPGGGRGGAGGAGPVRDCLENMADSVGHLRDAAQELGGNMGRAGSPGFKWHLSNVQTWCSAALTDENTCLDGLSRGVDAATRSAIRGKIVEVAQVTSNALALVNRVAPAN

SEQ ID NO: 29387 - protein, 289 aa, Oryza sativa Japonica Group
MSGADVDKVQNLIHCCLQLYMDKKEVVDALSREAKIEPSVTQHVWQKLEENNREFFKAYYLRLMLKNQITAFNKLLEDQLRIINKEYHPGPSSMPLPNGSNSNLLKQNPCFLSESTPMPAMPDDVMCNGNSSGIVDRTQSSDQLIYAGKDIQGLHSSMDASNLLPVQNANSVLFGVENGTTIKTESGYSSNGNFGFCGNAFLESCQSIGDASGGSFSSSELNGQPLDDSILDIESSSFGFLSQLPRNFFSDLPEDFSQSTEILDNYGKSPFLPSEQNNFSDSTGGEHTG

SEQ ID NO: 29388 - protein, 623 aa, Oryza sativa Japonica Group
MGQCYGKGASGRTADDEGGVVTEHQSPPPANGLPSTPPRQQAQAQAQQVGTPRRRGSKSGSTTPGHQTPGVAWPSPYPSGGASPLPAGVSPSPARSTPRRFFKRPFPPPSPAKHIKATLAKRLGGGKPKEGTIPEEGGVGAGGGGGGAADGAETERPLDKTFGFSKNFGAKYELGKEVGRGHFGHTCSAVVKKGEYKGQTVAVKIIAKAKMTTAISIEDVRREVKILRALSGHNNLVKFYDACEDGLNVYIVMELCEGGELLDRILARGGRYTEEDAKAIVVQILSVVAFCHLQGVVHRDLKPENFLFTTRDENAPMKLIDFGLSDFIRPDERLNDIVGSAYYVAPEVLHRSYSMEADIWSIGVITYILLCGSRPFWARTESGIFRSVLRADPNFDDSPWPTVSAEAKDFVKRFLNKDYRKRMTAVQALTHPWLRDEQRQIPLDILIFRLIKQYLRATPLKRLALKALSKALREDELLYLKLQFKLLEPRDGFVSLDNFRTALTRYLTDAMKESRVLEFLHALEPLAYRRMDFEEFCAAAISPYQLEALERWEEIAGTAFQQFEQEGNRVISVEELAQELNLAPTHYSIVQDWIRKSDGKLNFLGFTKFLHGVTIRGSNTRRH

SEQ ID NO: 29389 - protein, 783 aa, Oryza sativa Japonica Group
MDVMNEGKETSDNFCVDKLEKEDEVGSCPTRYCNDTSHSLGSASRKEVMPIIAEKQAFCATTVHDERSWAANAWRARLVKAISQKDSVLPKNADNIHSTSAFGSIGNTENMPGKLTSMLGNRNDSSQDQAMQEKHKDGLIVARCESVSAVNPVARCELASGVNPLARHESTSGCNPRKLEKGKEKLIYDMSNCVSNTNEGDDSNESIESCPSTKAPKRKHGQFSAAEMTSGNKRCRREDNESSCSGLFHKNDSSFFNWMSTLTNGVKVFDETTAVPLNQKFSAATGEEFPTNPVPLQNNCGVPLQSVGFNSLFQSLYSQNVMITSRNTCHQSESSYTANRLTLGFKSSKPVSMGRETLNVATETLAAGRIQMDSYGDRGAFQNQMGIFPLRAERNQNGFHGSSSNAASGHKDDFSESLWVSRLLPKTPMKVMDTTRCDEETDFCSANPKGLGDSSSPQDFNVEKELNNSQYFTSKGSDNETTSSKCAAPQDENKPSETMASIFAKRLDALRHANTSAVHVAITCDHGTPKGRNHKTSSFVVSYNSHDEQESGQKTHKSSGGEGRIVLWTGDKGKEQLSPGNDKELGEKVLSKHENQNCEGSSDGKVVPPKCNLETNTYIEEIDRKRLQNKEGAPNSMENQPDNKQMVPYGIVPNDVYDEASVVFGALQRLRLSRSDIIRWMRSPVMHTTLDGFFLRLRFGKWEEALGGTGYHVARINGVLDKNRLSVTIRNSTCQVDSRFVSNHDFHQDELKAWWSAAMKSGWKLPSQEELNTKLRERELLRF

SEQ ID NO: 29390 - protein, 624 aa, Methylococcus capsulatus str. Bath
MCGISGLVQLEGVADTSAMRRSVETMVKALAHRGPDDSGVAGDGSAVFGMARLAIRGCHDGRQPMVDAETGVMMVCNGEIDNHAELRGWLAERGRAVEHATDVAVIPGLYLELGDGFVERLVGAFALAVWDPRRGRLLLARDRAGERPLFYACRDGRVSFASQAAALVAGSPEPYPADEAAVQAFLKAGYFEAPASPFAGMRKVLPGERIAIDVKGVERSRYWRLNFTRGPARKNPLDEFDAVFREAVRRQSEVEVDFGAFLSGGVDSSLVTAVMRSVHPDRKLKAFGLRFSESSYDEGVFAERVAESLGVDYTPIWVRPEDFPETLADLVRQSGEPLADPAWVPTALLARRASDEVRVALVGEGADELFGGYPTYFGARLAERYSRLPGGLRALIRKAVEAWPVSDKKVTVSFLLKRFVQGDELDFLARHVLWTSSIPPALLRRLGVTPPETPHVAGPQETMLDRLQQHDLETSLAEGLLTKADRASMRSALELRAPFLDKDVIEFAATLPERERVQGLETKVFLKRVALRYLPKDIVYRKKRGLSVPLSAWLRGPLHDWAEARISSPRLEELGINRAAALELLREHERRSADHARALWTLIVVSEWLEWKAGMEAHPAAFTA

SEQ ID NO: 29391 - protein, 409 aa, Methylococcus capsulatus str. Bath
MALFVHKYGGTSVGSPERIKNVAKNVIRARSRGDDIIVVVSAMSGETNRLVALAHEMHERPSTREMDVLLATGEQVTIALLSMALEAAGCPACSYTGGQVRILTDDAHTKARILDIDTDRIRSDLAAGRVVVVAGFQGITEAGDITTLGRGGSDTTAVALAAALKADECLIYTDVDGVYTTDPRIEPKARRLDRITFEEMLEMASLGSKVLQIRSVEFAGKYNVPLRVLSSFAAGPGTLITYEEASVEKPLISGIAFNRDEAKLTVKGVPDKPGVAYQILGPVAHANIEVDMIVQNVAEDATTDFTFTVHRNDYRKALDILQATCTALGAREVTGDDKIVKVSLVGVGMRSHAGIAARMFEALAREGINIRMISTSEIKISIVVDEKYLELAVRTLHEAFNLDREPDAV

SEQ ID NO: 29392 - protein, 465 aa, Methylococcus capsulatus str. Bath
MRIFRTKAVSTDDCSGGSLKRCLGALDLTLLGIGAIIGTGIFVLTGIAAATQAGPAVVLSFVFAGLACAFAALAYAELAACVGGCGSAYGYSYAAFGELIAWIIGWDLILEYAISVAAVANGWSGYFANALTAVGLELPDYLTKAPEKGGIINLPASAIIILLMALLIAGVKESARLNTVMVSVKVLAIAVFVAVASAHVDPAHWDPFLPFGWFGHDAEGRPTGVLAGASIVFFAYVGFDAVSTAAEEARNPMRDVPIGIIGSLVFCTLIYIVVAGLLTGVVPYTELNVSSPVAHALQLLGIRWASGLVATGVIAGLTTVMLVLYYALTRIIFAMSRDGLLSPWFSAVNTRTQTPVRVIVLCGLFISLVAGFVPLGELAELVNIGTLFAFVLVCLGVIVLRVTRPELHRPFKTPVVPWFPILGALSCGALMAFLPALTWLRFVVWLLLGIGIYFAYSYRHSRLAD

SEQ ID NO: 29393 - protein, 110 aa, Methylococcus capsulatus str. Bath
MSTIEDTIRDQIAKHPVLLYMKGVPEMPQCGFSAKAVSCLQAAGVPFAYVNVLAAPSIRETLPSVSQWPTFPQLFVGGELVGGSDIVSELAASGELKTLLEAAAAGQAQG

SEQ ID NO: 29394 - protein, 403 aa, Methylococcus capsulatus str. Bath
MKLPVYLDYSATTPVDPRVAEKMIPFLTENFGNPASRSHTFGWTAEQAVENAREEVAKLVNADPREIVWTSGATESDNLAIKGAAEFYQTKGRHLITVKTEHKAVLDTMRELESSGFEVTYLEPMANGLLDLDAFRAAIRPDTVLASVMQVNNEIGVIQDIAAIGGICREHGVIFHVDAAQATGKVEIDLEQLPVDLMSFSAHKTYGPKGIGALYVRRKPRIRLKAQMHGGGHERGLRSGTLATHQIVGMGEAFRIAREEMAAENERIRRLRDRLLAGLADMEEVFINGDLEQRVPHNLNISFNYVEGESLMMAIKDLAVSSGSACTSASLEPSYVLRALGRSDELAHSSIRFTLGRYTTAEDVDFAISLIKDKVARLREISPLWEMYKDGIDLNTVQWAAAH

SEQ ID NO: 29395 - protein, 382 aa, Methylococcus capsulatus str. Bath
MSETSIYLDNNATTRPAPECVAAMMACLQMHYGNPSSKHRLGEAAKMEVIAARARLAALLGASPAEIVFTSGGTESIQQAIRGALALAADKRRVVTSAVEHPATLLLLEHLEAQGLEVIRLPVDRQGRLDLAMLDAALTPDTGLLSLMWANNETGVLFPIAEAAALAASRGVLFHCDAVQAVGKLPIDLRLVPLDFLSLSGHKLHGPKGIGALFVRKGRKLPPLLLGHQERGRRGSTENVVGIVGLGVAAELAAEHLASGIDAVARLRDRLESRLLAALPGASVNGAGAPRVAGTSSFNLGNVEAELVLDKLDRAGVCASAGAACSAGGTEPSHVLTAMGLGKEGALATLRFSLSRYTTVAEVDAVCGLLPGIVRSLLAEAA

SEQ ID NO: 29396 - protein, 859 aa, Methylococcus capsulatus str. Bath
MRMDKLTSKFQAALADAQSLALGRDHQFIEAVHVMSALLDQEGSTVRPLLIQAGADVPQLQQALGAALERLPVVEGVGGDVQISAELSRVLNLTDKLAQKRGDQFITSEMFVLAALESRGELAELLRKAGLTKEALEHAIQAMRGGQAADDPNVEDQRQALQKYTIDLTERAERGKLDPVIGRDDEIRRTIQVLQRRTKNNPVLIGEPGVGKTAIVEGLAQRIVNGEVPEGVKGKRLLALDMAGLIAGAKFRGEFEERLKGVLNDIAKQEGRVILFIDELHTMVGAGKAEGAMDAGNMLKPALARGELHCIGATTLDEYRKYIEKDAALERRFQKVLVDEPTVEDTIAILRGLKERYEVHHGVTITDPAIVAAATLSHRYITDRQLPDKAIDLVDEAASRIRMEIDSKPEEMDRLDRRLIQLRIEREALKKETDEASKKRLEALEGEIGKLEKEYADLEEIWKSEKARLSGAASIKEELEKARLDLDNAKRSGDLTRAGQIQYERIPALEKRLAVAEAGEDSEFRLLRNKVTDEEIAEVVSKWTGIPVAKMLEGEREKLLHMEENLSRRVVGQQEAITAVANAIRRSRAGLADPNRPNGSFLFLGPTGVGKTELCKALAEFLFDTDEAMVRIDMSEFMEKHSVARLIGAPPGYVGYEEGGYLTEAVRRKPYSVILLDEVEKAHPDVFNVLLQVLDDGRLTDGHGRTVDFRNAVVVMTSNLGSNRIQELAGEAHYAEMKAEVMEIVGQYFRPEFINRIDEAVVFHPLGREQIRAIARLQVRHLQERLEARELSLVVSDAALDLLGEAGFDPVYGARPLKRTIQQELENPLALDILAGRFAAGDVIGVDVENGKLQFSRMG

SEQ ID NO: 29397 - protein, 122 aa, Methylococcus capsulatus str. Bath
MTRPCILVVDDEPNGRRMLEILLSRLGCDVLSAGDGKSALKQIGESAIDLIITDINMPELDGLSLLAALKTMGITTPVILVTAYGTDESALTALNQGAFDYLVRPLCLDRVESVIRKALERH

SEQ ID NO: 29398 - protein, 545 aa, Methylococcus capsulatus str. Bath
MDNLRFVLFVFFIFLSFLLWEQWQIDYGPKPQAVAQTDGASRPAGDLPQRPSDDESDVTVHTEAPTQEGSRRIRVHTDVLSLEIDTRGGDLRQLDLLNYPVSKEQPDRPVRLLTDQGDIFVAQSGFIGAAQQVPNHHSLWQAEAGEYRLQDGQDILRVPLTWSDGQGVTVTKTYILRRGSYLIDMEQTIDNRSNTNWTGRQYMQLQRKEPTSAQEDSQFIRTYTGGVLHTEDKSYEKIAFKDMASGNLDAKSRQGWIAMIQHYFLAAWVPPAEDESTFYTKALADRVFVIGAYSPPAEVPAGSSQTLKARLFAGPKLQHVLEGIAPGLELTADFGILTVIAKPIYWLLETFHGFFNNWGWAIIFVTLVIKALFFKLSEASYRSMANMRKLQPKLVELKERYGEDRQRYNQAMMELYRKEKVNPLGGCLPILVQIPVFISLYWVLVESVDLRQAPFLLWLDDLSSKDPYFVLPLIMGVSMFIQQRLNPPPTDPIQARVMQFFPLVFTVFFLFFPSGLVLYWVVNNILSIIQQWYITRQIEKNTARA

SEQ ID NO: 29399 - protein, 373 aa, Methylococcus capsulatus str. Bath
MIYFDHNATTPLDGRVLEAMLPYLKSCHGNPSSLHRPGRIARDAVETARAQVAALVGATASQVVFTSGGSEANNLALKGLAWSLKPGHIRIGATEHPSVVESARLLAGHGWDCRTLTVDARGLIEDAALDAIAKNPPDIVSVMLANNETGVIQDVARIAALATGAWLHCDAVQAAGKIPLNFARTGVHLMSLSGHKIGGPKGAGALIADASVPLTPLIHGGGQEKGLRGGTENVAAIVGFGKAAELAASELQQRSRWLRRLRDRLEQGIEKLPGATVFARTAERLPNTLQFAVAGYDGETLVMLLDRHGIAVSSGSACAGGAREPSPVLLAMGVDPALATGAVRISLGKDNTEAEVERLLTALGRILETGQTY

SEQ ID NO: 29400 - protein, 414 aa, Methylococcus capsulatus str. Bath
MKTIKDRIAKWSAIGLLSAVAATAFYAPSASAHGEKSQAAFMRMRTIHWYDLSWSKEKVKINETVEIKGKFHVFEGWPETVDEPDVAFLNVGMPGPVFIRKESYIGGQLVPRSVRLEIGKTYDFRVVLKARRPGDWHVHTMMNVQGGGPIIGPGKWITVEGSMSEFRNPVTTLTGQTVDLENYNEGNTYFWHAFWFAIGVAWIGYWSRRPIFIPRLLMVDAGRADELVSATDRKVAMGFLAATILIVVMAMSSANSKYPITIPLQAGTMRGMKPLELPAPTVSVKVEDATYRVPGRAMRMKLTITNHGNSPIRLGEFYTASVRFLDSDVYKDTTGYPEDLLAEDGLSVSDNSPLAPGETRTVDVTASDAAWEVYRLSDIIYDPDSRFAGLLFFFDATGNRQVVQIDAPLIPSFM

SEQ ID NO: 29401 - protein, 512 aa, Methylococcus capsulatus str. Bath
MRIGIPKEIFPGERRVATTPEVAEKIMKLGFEVAVESGAGDAANFSDDAFREAGVAVVENAAELWAGSDIVLKVRAPSFAEIELMRQGGCLISFIWPAQNPELMDRLAATGGTVLAMDSVPRISRAQKLDALSSMANIAGYRAVIEAAHHFGRFFCGQVTAAGKVPPAKVFVIGAGVAGLAAIGAASGLGAIVRANDTRPEVKDQVKSMGAEFVEVEYQEEGTGVGGYAKVMSEGYQKAQAEMIARQAMDVDVIITTALIPGKPAPTLITAGMVKSMKPGSVIVDMAAEQGGNCELTVPGEVVVRHDVTIIGYTDLPSRLARQSSTLYATNLQRLLEELCPQKDGTIVVDMDDEVIRGATVIKDGTITWPPPPPKLSAAPPQMATAAPPVVVEKKPLLPAWARTGLGIAIGASIFYLIGANAPAAFIEHFTVFVLACFVGYMVIWNVTPALHTPLMSVTNAISSIIAIGALIQISSPGTLIMTLAGLAIALTAVNMAGGFWVTQRMLRMFRR

SEQ ID NO: 29402 - protein, 324 aa, Methylococcus capsulatus str. Bath
MTSITYGGNTYPLDKDQSVLDCLVGHGAPVPFSCRSGVCQTCLMRAVRGVPPEDSQRGLKDSLKLQNYFLACVCHPTNDLEAALPQEVVRSLPATVTALEPLNSEIMHVSLECHAPLEYRAGQFINLFREPTLGRSYSLASVPQHDEHLHLHVRRLPQGKVSGWIHEHLRIGQTVEIRGPSGDCFYVPGRPEQELVLIGTGSGLAPLYGILRDALQRGHSGPIRLFHGSRNRAGLYLTDRLRELAREYPNFDYVPCVSGEEPAPGLAAGRAHEIAFMEIPDFKDKRLFLCGHPEMVSAAKRRAFLAGAAMKDIYADPFNVNAAP

SEQ ID NO: 29403 - protein, 470 aa, Methylococcus capsulatus str. Bath
MKRAFQVWVVDDDRSIRWVLEKALQKASIQTRAFSTANSMMEALNRDRPDAVLTDIRMPGLDGIELLKQLQAKYPDLPVVIMTAHSDLESAVSAFSGGAFEYLPKPFDVDEAVDLVAKACAHSQRAATGEAADKGLPEKTPEIIGEAPAMQEVFRAIARLARSNITVLINGESGTGKELVARALHRHSPRADKPFIALNMAAIPRDLLESELFGHERGAFTGAQARRAGRFEQADGGTLFLDEIGDMPAELQTRLLRVLAEGEFFPVGAHAPVKVDVRIIAATHQNLEQLVAEGRFREDLFHRLNVIRIHIPPLRERRQDIVLLLKHFLKEASQELNVETKTLLPEVETYLCRLDWPGNVRQLENTCRWITVMAAGKDVHLDDLPPELLKARPEPVAVSSEWQDSFTQWIDARLRRGDRNVAKEAIDSAEGILISTALQFTRGRRQEAAKLLGYGRNTLTRKISELNIDV

SEQ ID NO: 29404 - protein, 393 aa, Methylococcus capsulatus str. Bath
MSIRLSDRVQSIKPSPTLAVTARAAAMRAAGKDIVGLGAGEPDFDTPDHIKQAAIQAIEKGFTKYTAVDGTPGLKQAIQAKFKRENGLDYALDQILVSCGGKQSFYNLAQALLNPGDEVVIPAPYWVSYPDMVLLAGAVPVIVEAGQQQAFKITPAQLEAALTARTRLFVINSPSNPTGMAYTAEELAGLGEVLRRFPEVVIATDDMYEHILWEGGFSNVLNVCPDLYERTVVLNGVSKAYSMTGWRIGYAAGPERLIEAMTNIQSQSTSNPTSISQVAAEAALNGEQGFIAGMVEAFKQRHDFVVGRLNAIPGVDCLKTHGTFYVLPNVEAAMARLHLADDVALSEYLIEQGGVAVVPGSAFGAPGHVRLSIATSMANLEKAMERLATTLSK

SEQ ID NO: 29405 - protein, 407 aa, Methylococcus capsulatus str. Bath
MLEIILGVFFFTAIVVALVFVILGAKSKLVAEGNVEVLINGERTIHVPIGSKLLTALADNNLFVSSACGGGGTCAQCRVQVLEGGGEILPTELSHITKREAAQGDRLSCQVTVKQNMKIHVHEEVFGVKKWECTVRSNRNVATFIKELVLELPAGENVDFRAGGYIQIECPPYDCKFSDFAIEPEYREDWDKYDLWKIESHVKAPAIRAYSMANYPEEKGIIMLNVRIATPPWGKEGTVPPGVMSSYIFNLKPGDKVTISGPFGEFFARDTDKEMVFIGGGAGMAPMRSHIFDQLLRLKSKRKMTFWYGARSLREAFYVEEFDRLQAENPNFKWFLGLSDPKPEDGWTGYTGFIHNILYEQYLKNHPAPEDCEYYMCGPPMMNSAVIQMLLDIGVDRENIMLDDFGG

SEQ ID NO: 29406 - protein, 126 aa, Methylococcus capsulatus str. Bath
MQTTMLKAKLHRARVTHSELEYEGSCAIDGSLLDCAGIREYEQIQIYNVNNGERFTTYAIRAADGSGTISVNGAAARLAAVGDIVIICAYVGLNQAELAAYRPNLVYVDENNQITRTSHAIPVQAA

SEQ ID NO: 29407 - protein, 548 aa, Methylococcus capsulatus str. Bath
MYQYDQYDQRLVDERVAQFRSQTRRFLQGELSEDQFRPLRLMNGLYLQRHAPMLRVAIPYGVLSSRQLHKLAEIARRYDKSVAHFTTRQNIQFNWPRLEDVPDILAELATVQMHAIQTSGNCIRNVTSDPLAGVCPDEIEDPRPYCEIIRQWSTLHPEFSYLPRKFKIAVSGARKDRAATQVHDIGLQMVENEAGETGFEVLVGGGLGRTPIIGQTIRPFLAKTDLLSYLEAILRVYNRFGRRDNKYKARIKILLKETGIEDFTRRVEAEWVQIRQQLVLDTGEIERVKRHFTAPEYKTVAGPGLDAQAAADPRFAVWLRNNTTPHKIPGYRAVFLSLKARGVPPGDIADTQLDAVADLAERYSFGEVRATHTQNLVFADVHQDDLHELWQRLDSIGLATPNIGKATDMICCPGLDYCSLANASSISVAEDIYSRIDDLDYLHDLGDLRINISGCMNGCAHQSVGHIGILGVDKKGEEWYQLTLGGSSSNDASLGERLGPAIDKAHVAEAVETILQTYIELRQDGESFLDTVRRLGINPFQERVYAHH

SEQ ID NO: 29408 - protein, 400 aa, Methylococcus capsulatus str. Bath
MNRRQHEAGQPIPAAEQGGCLADAIRPFHVMAILARARELESSGRSIVHLEIGEPDFPTPEPVAAAATRFLAGGQVRYTPAAGLPELRERIAAYYAERYGVAVAPQRIFLTPGASGALSLALAVALSPGRRVMLADPGYPCYSNFVRLYSGDPHAVPVGAEQDFQLNAALCRMHCGGDVPVAISASPSNPTGTVMRTGVLRELVEWFEAEGGILISDEIYHGLEYGGRAVSALEFGQHTFVVNSFSKYFGMTGWRLGWVVVPEAYAAAVERVAQNIFISAPTLSQYAALAAFSEESRAELERRRRAFEARRDFLWGELVKLGFGVPVAPSGAFYIYADCSAFAEDSAEFAARLLETAGVAVTPGKDFGAQSPERYLRFAYTADIPVLQEAVGRIRRFVTG

SEQ ID NO: 29409 - protein, 179 aa, Methylococcus capsulatus str. Bath
MRYVILDRDGVINEDSDHYIKSPEEWRPIPGSLDAIALLTRHGFRVVVLTNQSGIARRLFSPAALEAIHDKMRTLVREAGGEIFDIFLCPHGPEDVCGCRKPRPGLFYAFAEKYDAELAGTPAVGDSLRDIEAAAAAGAAPILVETGKGMRTLERNPELDVPTFPDLYAAAQHIVFSQT

SEQ ID NO: 29410 - protein, 289 aa, Methylococcus capsulatus str. Bath
MKTGFVGLGAMGLGMARNLRRAGLLAGVWNRTPEKARAFAAETGTPAWATLTEMAPACDVIVTCVSADADVLEVIAALTPGLRPGAVIVDCSTVGVATARRAAEVVRQAGGDFLDAPVSGGVEGARDGTLALMIGGRAETVEKVRPVLAAMGSRLMHMGDTGAGQATKAVNQVMCAGINQAVTEALAFGQALDLDLDKVIDVVSGGAAGNWFLDKRGKTMIRGSFQPGFKLSLHHKDLNICLEMAERLGIPLPLSTRSRDDYAELMARGYGDDDISGLFRLKSAARPKG

SEQ ID NO: 29411 - protein, 345 aa, Methylococcus capsulatus str. Bath
MKFVDEAEIRVDAGDGGNGCISFRREKYIPFGGPDGGDGGDGGSVYLVASDNLNTLADFRFHSHFRAQRGENGSGNNCTGKSGEDCFIHVPTGTIVTDADTGEHMGDLTRSGDRLLVARGGFHGIGNARFKSSTNRAPRRATPGTPGERRTLHLELKLIADVGLLGMPNAGKSSLIRAVSAARPKVADYPFTTLHPNLGVVRVGDQRSFVMADIPGLIEGAAEGAGLGVQFLKHLTRTRLLLHVVDIDPYETGINPVTAARKVIAELCKWGHGLEEKPRWLVLNKIDRLAPELLESRCREIIDGLHWTDPVYRISAIQGEGLDRLTRDVMRFLEQQERRSDAEQE

SEQ ID NO: 29412 - protein, 605 aa, Methylococcus capsulatus str. Bath
MCGIAGLVLKGRNVQADRLHPMIERLAHRGPDGQGVFTEGGFGLAHTRLSIIDLSGGRQPILADDGRLAVVANGEIYNHVELREALEREGRRFATHSDSETILHAYALDPEGFAGRLHGMFAFALYDGVRRRLVLGRDRLGIKPLFYAALPDRLVFASEMKAILPLLPNAPTIDAGAFSQFLHTHCSTGEETLFSGIRRLGPGEILEADAELNLRKRRYWTPLGVRSRALDFAEAEAEFEGMFEQVMKEHVRSDVPYGLFLSGGNDSAILLAMLSRLQAQPVRTFSIGYVDAAMKDELGDAERIAQVFGSRHTSIRLRREDLFRRIPHTVWAADDLMRDYASFPTSALSEAAAKELKVVFTGEGGDEVFGGYRRYRQPRLAWLARNLLAPGTGGFRTRSEWWRKRSQRLFGPALAAERKHFRAPYLKAWSEAPAVWSHLQHCQYTDLVTDLPDSLLVKVDRMMMGFGLEGRVPFLDHRVVEFGLGLPDALKTDGKRPKVFLRRWAERHVPKEHLYTKKRGFTVPVREWLGGELLDRLEGKLSGNAAVREWFDTRHFPALFQAQRKKGNASREIFCLMQFAIWHRLFIDQPGLKPSPDEDPLDWIS

SEQ ID NO: 29413 - protein, 641 aa, Methylococcus capsulatus str. Bath
MAKIIGIDLGTTNSCVAILEGGKPRVIENSEGARTTPSIVAFTADNEVLVGQSAKRQAITNPKNTLFAIKRLIGRRYKDDVVQKDIKMVPYTIVEAENGDAWVEVGGKKMAPPEISARVLMKLKKDAEAYLGEEVKEAVITVPAYFNDSQRQATKDAGRIAGLDVKRIINEPTAAALAYGMDKSRGDQKIAVYDLGGGTFDISIIEIAEVDGEHQFEVLSTNGDTFLGGEDFDLRIIEYIVDEFRKEQGIDLHNDPLALQRLKESAEKAKIELSSSQQTEINLPYITADATGPKHLNVKLTRAKLEALVEDLILRTRGPCETALKDAGLKSADIDEVILVGGQTRMPKVQEFVKEIFGREPRKDVNPDEAVAVGAAIQAGVLGGQVKDVLLLDVTPLSLGIETLGGVMTKLIEKNTTIPTKATQVFSTAEDNQTAVTIHVLQGEREMARDNKSLGRFDLSDIPMAPRGVPQIEVTFDIDANGILNVSAKDKATGKQQSIVIRASSGLSEDEIKRMVKDAELHAEEDRRMHELVSARNHADAVVHATNKTLAELGDKVSGEERAKIEAALNDLKDAMGGDNKDLIEQRTSALTELSGKLAERLYTQQGGTAGSETHSHEKAGGSGGDDVVDAEFEEVRDDKR

SEQ ID NO: 29414 - protein, 638 aa, Methylococcus capsulatus str. Bath
MNDMLKNILLWVVIAVVLMSVFNNFGSRKSVDSSMSYSQFIAAVNEGQVKSVTIDGQNVRGMLGTGEKFSTYNPEDPHLIDDLLKNHVEIKAQPPESQSLLMQIFISWFPMLLLVAVWIFFMRQMQGGAGGRGAMSFGKSKARLIEEDQVKVTFADVAGADEAKEDVAEMVDFLKDPSKFQKLGGKIPRGALMVGPPGTGKTLLARAIAGEARVPFFSISGSDFVEMFVGVGASRVRDMFEQAKKHAPCIIFIDEIDAVGRHRGAGLGGGHDEREQTLNQLLVEMDGFEGTEGIIVIAATNRPDVLDPALLRPGRFDRQIVVGLPDVRGREQILKVHMKRVPLADDVEAKYLARGTPGFSGADLANLVNEAALFAARKNKRVVEMEDFEKAKDKILMGVERKSMVMSDEEKKLTAYHEAGHAIVGLMVPEHDPVYKVSIMPRGRALGITMFLPERDTYSASKQKLESQISSLFGGRLAEEIVFGREHVTTGAQNDIERATNLARNMVTRWGLSERLGPLAYSEEEGEVFLGRSVTKHKSVSEETAHLIDEEIRSIIDRNYERAERILRENMDKMHLMAEALIKYETIDRLQIADIMEGRSPRVPQSWEDNTPPGSGESASKGGDQPVSGSFGKPAEQT

SEQ ID NO: 29415 - protein, 110 aa, Methylococcus capsulatus str. Bath
MDVIENIKRQIADNPVILYMKGTPDFPQCGFSGRAVQILDKCGVEYAFVNVFEAPEVRENLKLVSHWPTFPQLFVRGELVGGSDIMMELYESGELQKLLAGATKAGERQD

SEQ ID NO: 29416 - protein, 394 aa, Methylococcus capsulatus str. Bath
MGNPVAVVNAGSSTVKFSLLNGERRVFDALLDRLGSTSANGACASLRDAQGAPLFQGPIPADNHEDALIWLFDWLARAGDGCKPAAVGHRVVHGGDGLTRPVKVTGEIIEKIEALIPLAPLHQPHNLAPIRLLAAKFPDIPQVACFDTAFHASQSAVERRFALPREYEAAGIRRYGFHGLSYEYVAARLAEIDPCAADGRTIVCHLGNGASLCAMKNGRSVATTMSFTALDGIPMGTRCGAIDPGVLLHLMTRPGMDAATLSDLLYKRSGLLGLSGLSGDMRDLLASDRPEAAEAVEYFCYRIAREIGSLTAALGGLDALVFTAGIGEHAAPVRARICELSTWLGVAIDPAAYPILHTPDSRIHVLVVSTDEETMIARHVRRTLGLPQGSPRSL

SEQ ID NO: 29417 - protein, 433 aa, Methylococcus capsulatus str. Bath
MPLIFGVCCLVVAAAHMVPAARAAAGEFFNGLLGKRMTKSADVLFVLLGAIMVLAMHAGFAFLEVGTVRRKNQVNALVKILSDFAMSTIAYFFIGYELAYGVDFFDSALALTVDNGYGLVKFFFLLTFAAAIPAIVSGGIAERSKFNPQLAATFLLVGFVYPLFEGIAWNSNLGFQGWLQTRFGAQFHDFAGSVVVHAVGGWIGLAAVLLLGPRRGRYHRDGMIAAHPPSSIPFLALGAWILTVGWFGFNVMSAQNLNGISGLVAVNSLMAMVGGTLAALLAGRNDPGFVHNGPLAGLVAVCAGSDLMHPIGALAVGAVAGFLFVYLFTLTQNRWKIDDVLGVWPLHGLCGAWGGIAAGIFGQSALGGIGGISFMAQVLGTGLGVAIALAGGLAVYGAAKTLIGLRLTPEEEFDGADLTLHRISSSPEKEAGW

SEQ ID NO: 29418 - protein, 69 aa, Methylococcus capsulatus str. Bath
MSQVQQGTVKWFNETKGYGFIQRESGADLFVHFRSILGEGFKTLKEGQRVSFVEVQGAKGPQADQVSVI

SEQ ID NO: 29419 - protein, 323 aa, Methylococcus capsulatus str. Bath
MSKPKVLVTRRWPESCESRLRESFHVVFNADDHPMSRDELKAALRDYDAVLPTVTDAIDADVLSVEPLRCKILGNFGVGFNHIDLDTARQRGIAVTNTPDVLTDCTADIAMLLMLAVARRGGEGEREVRSGRWTGWRPTHMLGTKVTGKILGLVGFGRIARAMAKKAHFGFDMPVIFYDPFPPPQDLIDALGAEQCGTLEEVLERADFVALHCPGSKENRHLINADRLARMKPQSYLVNTARGDVVDNEALIQALRNRRIRGAGLDVYEGEPRLNPGFLELDNVVLFPHLGSATEETRIAMGMRVIDNITAFFEGRPPRDKVT

SEQ ID NO: 29420 - protein, 293 aa, Methylococcus capsulatus str. Bath
MKSGYVALVGRPNVGKSTLLNHLLGQKLSIVSRRPQTTRHRILGIKTDGRGQVIYVDTPGIHGGARRAMNRYLNRTAISSLLGVDVILWLVDRAGWLPDDELVMARIKEAKLPVILVINKVDRIEGKDTLLPFLAEANATGLFSEIVPISALKGINLAVLEERVLALLPEGEPIYPEDQISDRPERFFVAEIIREKLFNRLTQEVPHALTVQIEQYRESPTLVRIHAVIWVEREGQKAIVIGKGGEVLKRVGEASRRELERMLERRVYLELWTKVKHGWSDNERALQGLGYAE

SEQ ID NO: 29421 - protein, 408 aa, Methylococcus capsulatus str. Bath
MSSSNVKKVALAYSGGLDTSVILKWLQETYGCEVVTFTADLGQGEEVEPARAKAQAMGVKEIYIDDLREEFSRDFVFPMFRANAIYEGEYLLGTSIARPLIAKRLIEIANETGADAIAHGATGKGNDQVRFELGAYALRPDIRVIAPWREWELTSRETLLAYAESRGIPIEMKRGKTSPYSMDANLLHISYEGGILEDPWAEPEETMWRWSVSPENAPDRPTYVELTYEHGDIVAIDGERMTAAAVLARLNQLGGANGIGRLDIVENRYVGMKSRGCYETPGGTIMLKAHRAIESITLDREVAHLKDELMPRYASLIYNGYWWSPERRMLQQMIDASQATVNGVVRVKLYKGNVSVVGRKSESNSLFDMNIATFEDDRGAYDQKDAEGFIKLNALRLRIAGRKGASFA

SEQ ID NO: 29422 - protein, 311 aa, Methylococcus capsulatus str. Bath
MVFSGNANLPLAEGVVRKLNMRLGMATVGRFSDGEIAVEIEEHVRGREVFVIQPTSQPINENLMELLVMIDALRRSSASVITAVIPYFGYARQDRRIRSARVPITAKLVAKMICAAGADRVLTVDLHADQIQGFFDVPVDNVYASPILLGDVWRQKYPDLMVVSPDVGGVVRARALAKRLDDADLAIIDKRRPRANEAKVMNIIGDVRGRTCVMVDDLVDTAGTLCKAAGALKEHGAERVVAYCTHPVLSGPAVDNIEASMLDELVVTDTIPLQERASACNRIRQLTIAEMLAETIRRIAMGESVSSLYVD

SEQ ID NO: 29423 - protein, 348 aa, Methylococcus capsulatus str. Bath
MQRVHTITAVTEDGESLRFECRSDEDVITAALRQNIFLMSSCREGGCATCKALCSEGDYDLKGCSVQALPPEEEEEGLVLLCRTYPKTDLEIELPYTHCRISFGEVGSFEAEVVGLNWVSSNTVQFLLQKRPDECGNRGVKFEPGQFMDLTIPGTDVSRSYSPANLPNPEGRLEFLIRVLPEGRFSDYLRNDARVGQVLSVKGPLGVFGLKERGMAPRYFVAGGTGLAPVVSMVRQMQEWTAPNETRIYFGVNTEPELFYIDELKSLERSMRNLTVKACVWHPSGDWEGEQGSPIDALREDLESSDANPDIYLCGPPGMIDAACELVRSRGIPGEQVFFEKFLPSGAA

SEQ ID NO: 29424 - protein, 69 aa, Methylococcus capsulatus str. Bath
MSQQQQGTVKWFNESKGFGFIQRENGSDLFVHFRSIQGQGFKTLKEGQRVSFTEVAGQKGPQAENVVVL

SEQ ID NO: 29425 - protein, 453 aa, Methylococcus capsulatus str. Bath
MSSDSNSAGPAFADLGLAQPLLRAVSEAGYVHPTPIQAQAIPLLLAGGDLLAAAQTGTGKTAGFTLPILHRLLEKQAPRRPRRPRCLILAPTRELAAQVLESVEGYGKYVPLKATVMFGGVGLNPQVRALAAGVDILVATPGRLLDHCGQNTVDLSAVEIFVLDEADRMLDMGFIRDIRRILGLLPKQRQNMLFSATFSDEIRTLADGLLNNPGYVEVARRNAASDLVDQTVHLVAQEHKRDLLTHLIRRHDWRQVLVFTRTKHGANRLAEKLAEDGIPAAAIHGNKSQSARTRALADFKDGTVPVLVATDIAARGLDIDQLPHVVNFELPNVPEDYVHRIGRTGRAGRAGSAVSLVAKEELKLLGSIERLIKRPIQRGTVEGFNPPSRPRIERRDDRSRRPQEVRDGGGRQSPPGQPKARAGLGSRSAARHAQKPQQRQAGNRLRSQGGKRG

SEQ ID NO: 29426 - protein, 549 aa, Methylococcus capsulatus str. Bath
MGTVEPGAIGQHLLACLYQAGVGHIFGVPGDYVLGFYDLMAKGPVRHIGTTREDTAAFAADGYARCRGMGALAVTYGVGALNTVNAVAGAYAESSPVVVISGAPGVREQREDPLIHHRFGPFRFQREIFERITCAAVVLDDPVIAFRQVERALAAARQHCKPVYIEIPADRVMAPGYPIPQETPETPSSDDSALAEAVAEAAELLGRAVSPVILAGVELHRRGLQDALVGLVEQARLPVAATLTGKSVFAERHPAYLGVYEGAMSTENARYMVEQSDLLLMLGVTLNDVDTGIYTARLDPQRIVRAAQNEVVIRHHRYPRVLLADFVTALARSVKARGEAFPMPAGPEPWDFPAPDRPMTIARLVERLDRALTSDMIVVCDVGDCLFAATDLRVHERSEFLASAFYTSMGFAVPAALGAQIARPDHRALILVGDGAFQMTGTELSTHARLGLAPIVVVLDNRGYSTERFILDGAFNDIADWRFHRLGEVFGPLQGYDAPDEAAFENALSEALVNRNMPSLINVRLSPGDASIAMKRLAGHLQCRVKGEG

SEQ ID NO: 29427 - protein, 254 aa, Methylococcus capsulatus str. Bath
MNTLLRIENLHARVDGKAILKGIDLTVKPGEVHAIMGPNGSGKSTLSNVLAGRSGYEVTEGTVTYRGRNLLELPPEQRAREGVFLAFQYPVEIPGVSNIYLLKAAYNAIRRHRGLNEVDALDFLKLVKEKTRMVDLDEQFLYRGVNEGFSGGEKKRNEILQMAILEPTLCILDETDSGLDIDALKVVANGVNALRSPERAFILVTHYQRLLDYIKPDHVHVLAHGRIVRSGDASLAHELERKGYGWIEAAAAGA

SEQ ID NO: 29428 - protein, 330 aa, Methylococcus capsulatus str. Bath
MGNPQYPALDERTLCALAVNVINTEAAAISALADRIDSNFAAGCRLILGCHGRVVVTGMGKSGHIGGKIASTLASTGTPAFFVNPGEACHGDLGMITRNDVVLALSNSGETAELLTILPLIKRLGIPLIAMTGNRLSTLARQSSIHLDTGVQQEACPLGLAPTSSTTAALAMGDALAVALLEARGFTREDFAFSHPGGSLGRRLLTFVRDIMHTGDDTPVIGLEASVRDALLEMTAKKLGMTAIVDGAGTIQGVFTDGDLRRLLEKAQDIHATPITAVMTRSCVTVEGSLLAAEAVRIMEQKRINALPVVENGRLIGAINMHDLLRAGVL

SEQ ID NO: 29429 - protein, 473 aa, Methylococcus capsulatus str. Bath
MPSPDRGPQELRRVLGWTSAGAIMAGSVIGTAIFLVPSTIVRELDSVGWTFFVWVLGGLLSLGGALSYAELGAAFPEAGGEYAFLRRAYGPLWGFLFGWQQVVIGKTGSIATIATGFALFLGFFVDGLQREWLHLSWGEVGWGVTGLQFVAMTAVASFSLINCFGVGRGGAVQSFLTVLKVAAIVALAVLVLGAGGGSWDHFRQAPEHPAWTGWGAFAAALAAVLWAYDGWNNLTLVGSEIRDPDRTIPRVFLLGLLGVMGVYLLANLAYFYALPPEALKRSERVAQDVAQLVFGDFGGAAITAAAVVSTLAALNGSILSGARVSYAMARDGLFFSPLARLHPVHRTPVNALIVQASFASFLILLFGQDRAGFDRLFNYAVFGLWAFYGITALAVIVLRRTSPEVVRPYRVAGYPWVPLIFFAVAGLFCLGMIFQNPSETAIGLVFLLLGIPFYLYWCSGGKAEAHRKSSPGE

SEQ ID NO: 29430 - protein, 432 aa, Methylococcus capsulatus str. Bath
MDNAQETAVGNGIEKPRLTLGFIPLTDCAPLVIALEKGYFRRHGLDVTLSRQPSWAAIRDKVATGLLDGAHMLAPMPIATTLGLGGVRKATIAPMSLDLNGNAVTVSNALYRRLTAVAGVEPAQRPVSARCLRRLLDRDGEVLRFATVFPFSSHNYLLRHWLACAGVDPDRHVGMTVIPPPQMPRCLAAGEISGYCAGEPWNARAVAQGIGRVLITGHEIWNNSPEKVLGVNQDWAEHHPNTLRALLMALLEAAQWLDRPENRPEAAALLANPDYVGVPAEILQMSMTGSFQYAAGEPAVSLPDFNVFHRYAATFPWRSHALWFLTQMLRWGQIAEPLDLHAVAARVYRPDLYREAATALGLPCPSGDYKREGIHAAPWTLDTGTSSLVMGPDLFCDGIAFDPADPIAYLAGFGLHRLRVRLDDLRREGNPP

SEQ ID NO: 29431 - protein, 366 aa, Methylococcus capsulatus str. Bath
MKIGVPKEIKDLENRVAVTPQGVAALVNAGHEVLVEVAAGLGSGFADEEYMAAGARLVNAADAWAADLVVKVKEPVPSEYPYLKRQTVFTFFHLAGVDPGLTRALLDGGTTAVAYETLEDAQGRLPLLAPMSAVAGNMAAQVGAYYLARFNGGRGVQLGEVMGVRHGRVVVIGDGVVGSHAALTAWGMGANVQVMGLVPAKGDALCRRAPGLEFFLSDGARLAETLRDADLVVGAVLQPGARAEYIVTDAMVRSMPMGSVIVDVSIDQGGCVETSRPTTHSHPVYVEHGVIHYCVTNMPGAYPRTSTLALTEATLPYLLRLADEGEACLRADPGLAKAVNTCDGHITCRAAAEDLGLLDRYRPFPG

SEQ ID NO: 29432 - protein, 606 aa, Methylococcus capsulatus str. Bath
MCGIAGLFNCNLPADELRLDQAVAKLTHRGPDDRGIFLDGRFGMGHTRLSIIDLAGGHQPLFSEDRRLALIANGEIYNFIELRSELTAAGFRFQTQSDSEVILHAYLAFGEGFLERIQGMFAFALYDALEGRLILARDRLGIKPLFLARRPDGIAFASEIKALLPLLDQPREIDPQGLAQYFQNQFSTGATTVLRGVERVLPGEAVVVEAGKTTRRFRYWSPLAVRTEELDFDEAAARFDALMERVMVEHMRSDVPFGLFLSGGVDSSLLLALLTRYSGEPIRTFSVGFPGTSLTDELPLAEGLARRFRSRHREIRPGPQDILHSLPLTVWAADDLMRDNASLPTSLLARAAGEELKVVFSGEGGDEVFAGYGRYRTSPLERLFKSLLAPGSGGFRTRGSFRGRWPKTLFGPALLAAAQSARRPVQESWRETPREWSDLQRMQYVDLCHALPDNLLVKADRMLMAWGVEGRVPFLDHRVVEFGLSLPDRLKIEGRQGKLFLKRWGERLVPAEQLYARKRGFHVPLGEWLDEPFLERLNRILPEHPALTPWFKPAGIRALIARCRDERQGSAMLWAIIQFAIWHRLFISGNGERPEALTDPLEILQR

SEQ ID NO: 29433 - protein, 321 aa, Nicotiana tabacum
MASLKINAIVLFILVSLLIGSSSAQLSTGFYSKSCPKLYQTVKSAVQSAINKETRMGASLLRLFFHDCFVNGCDGSLLLDDTSSFTGEKRAAPNVNSARGFEVIDNIKSAVEKVCPGVVSCADILAVTARDSVVILGGPNWNVKLGRRDSRTASQSAANSGIPPATSNLNRLISSFSAVGLSTKDMVALSGAHTIGQARCTSFRARIYNETNNLDASFARTRQSNCPRSSGSGDNNLAPLDLQTPNKFDNNYFKNLVDKKGLLHSDQQLFNGGSADSIVTSYSNNPSSFSSDFVTAMIKMGDIRPLTGSNGEIRKNCRRLN

SEQ ID NO: 29434 - protein, 454 aa, Rhizophlyctis rosea
NDQGNRTTPSYVAFSDTERLIGDAAKNQVAMNPTNTVFDAKRLIGRRFADAEVQSDMKHWPFKVIDRNTKPYIQIEFKGETKTFTPEEISSMVLLKMKETAEAYLGSTVKDAVVTVPAYFNDSQRQATKDAGVIAGLNVLRIINEPTAAAIAYGLDKKATGERNVLIFDLGGGTFDVSLLTIEDGIFEVKATAGDTHLGGEDFDNRLVSHFCEEFKRKFKKDLSSNPRSLRRLRTACERAKRTLSSAAQTSIEIDSLYEGVDFYTSITRARFEELCADLFRSTLDPVEKVLRDAKMDKNSVHDIVLVGGSTRIPKVQKLVSDFFNGKEPNKSINPDEAVAYGAAVQAAILTGDTSEKTQDLLLLDVAPLSLGIETAGGVMTALIKRNTTVPTKKSETFSTYADNQPGVLIQVFEGERARTKDNNLLGKFELTGIPPAPRGVPQIEVTFDVDANG

SEQ ID NO: 29435 - protein, 474 aa, Chytriomyces confervae
NDQGNRTTPSYVGFTDSERLIGDAAKNQVAMNPINTVFDAKRLIGRRFADQEVQSDMKHWPFKVVDKGTKPMIEVEFKGETKTFSPEEISSMVLLKMKETAEAYLGTTVNNAVVTVPAYFNDSQRQATKDAGVISGLNVLRIINEPTAAAIAYGLDKKTAGEKNVLIFDLGGGTFDVSLLTIEDGIFEVKGTAGDTHLGGEDFDNRLVSHFVQEFKRKHKKDLSSNPRALRRLRTACERAKRTLSSAAQTTIEIDSLFDGVDFYTSITRARFEELCQDLFRATVDPVDKVLRDAKMDKSTVDEIVLVGGSTRIPKVQKLVSDFFNGKEPNKSINPDEAVAYGAAVQAAILSGDTSEKTQDLLLLDVAPLSLGIETAGGVMTALIKRNTTVPTKKSETFSTYADNQPGVLIQVYEGERTRTKDNNLLGKFELSGIPPAPRGVPQIDVTFDVDANGILNVSAVDKSTGKQNKITIT

SEQ ID NO: 29436 - protein, 404 aa, Nicotiana tabacum
MAPAAADSIKPRDVCIVGVARTPMGGFLGSLSSLSATKLGSIAIEGALKKANVDPSLVEEVFFGNVLSANLGQAPARQAALGAGIPNTVVCTAVNKVCASGLKATMLAAQSIQLGINDVVVAGGMESMSNVPKYIAEARKGSRLGHDSLVDGMLKDGLTDVYKDCGMGVCAEICAENHKITREEQDDYAVQSFERGIAAQEAGAFAWEIVPVEVPGGRGKPSIIVDKDDGLGKFDGAKLRKLRPSFKEKDGTVTAGNASSISDGAAALVLVSGEKAIKLGLNVIAKISGYADAAQAPELFTTAPALAIPKAIKSASLEASQIDYYEINEAFAVVSLANQKLLGLNPEKVNVHGGAVSLGHPLGCSGARILVTLLGVLRQKNGKYGAAGVCNGGGGASALVLELV

SEQ ID NO: 29437 - protein, 414 aa, Nicotiana tabacum
MAKMVNDSIKPRDVCIVGVARTPMGGFLGSLSSLSATELGSVAIRAALKRANVDPSLVQEVFFGNVLSANLGQAPARQAALGAGIPNSVICTTINKVCSSGLKATMIAAQTIQSGSNDIVVTGGMESMSNVPKYLAQARKGSRLGHDTIVDGMLKDGLWDAYNDFGMGVCAELCADQYKITRQQQDSYAIQSFERGIAAQRSGAFVWEIVPVEISGGSGRPSTYVDKDEGLIKFDASKLKKLRPSFKENGGSVTAGNASIISDGAAALVLVSGQKALELGLQVIGRIRGFADAAQAPELFTTAPALAIPKAIKNSGLESSQIDYYEINEAFSVVALANKRLLNLNSGKLNAHGGAVSLGHPLGCSGARILVSLLGVLKHKNGKFGVAGICNGGGGASALVVELMPIRMVARSSL

SEQ ID NO: 29438 - protein, 214 aa, Listeria welshimeri
VFWGAAEPLSHYAVQAPGGEVGTQAAMKDALRYSFFHWGISAWSIYAIVALALAYFKFRKNAPGLISATLYPILGKHSKGPLGQLIDIIAVFATVIGVATTLGLGAQQINGGLTYLFGVPNNFGIQFTIIVIVTILFMLSAMSGLDKGIQLLSNVNIYVAGVLLVLTLILGPTLFIMNNFTNSFGDYLQNIIQMSFQTAPDAPDARKWIDSWTI

SEQ ID NO: 29439 - protein, 419 aa, Mycoplasma hyopneumoniae 232
MRFVDYVSIEVVAGKGGDGIISFRREAHVDKGGPDGGDGGWGGSIYFVGDSGMNTLLPFYQTKKIFGYNGENGRPKRQTGANGKDIFIKVPLGTQVFLKKSLICDIILEKKYLIAKGGRGGLGNFHFRNSKNKAPRISENGELGQNFYLDLQLKVMADIGLVGKPNAGKSTLLSLISNSKPKIANYEFTTLVPQLGVVKIYENSFVTADLPGLIQGASSGKGMGIIFLKHIERCRAIVHVIDFGSDNKNPIKDFIEIKSELEKFNKKLLDLNQIVIANKCDLPNFQFNLANFKRKFPKIKIIKSSLISAKQNEINIIKEKMFGLLEEKQKKLEIQEINTSKIEFNLKAPFLIKSRNNGFFEITGELIQKIIQKIPLNSQENILRFNAKVKKIGLWDELIKKGIKPGDLVRIYEFEFHWN

SEQ ID NO: 29440 - protein, 293 aa, Mycoplasma hyopneumoniae 232
MDIKKTCFVAIVGLPNVGKSSLINSLVEFPVSIVSLKSQTTRDAINAIYNKDNLQILFVDTPGFHMRINNLSNSLNYAINSTLEGIDLVLFLHPVDKPVDQNTRFLAKKIAKNMNKIVLITKTDLENDKLNFKIQEKNFRELNFEKILPFSTNSEDLRINLLLEIEKFAYPSDHFYSNLDVTDQSSRFFAKEIIRKQILLNLEDEIPHQSAVLIDNFDESDNRFVKIEATIYVGKKSHLPIIIGKGGSVLGKIGTDARRELEEIFGKKVVLKNRVSIAKKWFNNPKMIKRFGY

SEQ ID NO: 29441 - protein, 692 aa, Mycoplasma hyopneumoniae 232
MKQKLENLEKYARNLTKLAKENKIEPVIGRDDEIRRIIKILSRKTKNNPVLVGEPGVGKTAIVEGMALKIIANQVPDNLKNKQIFELDLTLILAGASFKGEFEKRIKAILQEIEQNSDQVIIFIDEIHLLIGTGSSGTDSMDFANILKPIMARGQIKLIGATTNSEYRLYIEKDGALERRMQKVEILEPSVIDTINILRGIKERLENFHQVKIKDSALVFATKAANRYIFDRFLPDKAIDLVDEAAASLKVEINYQPEKLEKAKRELIYLKMEEINSQKQDNSELKSKIENLENEVKKLQDQWDQSKKSASEIASLSQELEKLKYQQNYLMEQGDYQKAAEIKYGKIPKISKKLGEIKARKQEISNVLDESQIAKVVSNWTKIPIEKLLESEIQKYLNLEKNLAKSLKGQNQAIKAVSDAILRFKAKINDESRPISSFFFMGPTGVGKTELARALALNLFNNKNQIIRLDMSEYMEKHSVSKLIGAPPGYIGFEQGGNLTNKVRLNPYSIILLDEIEKAHPEVINIFLQILDNGEIVDSKSQKVNFRNTIIIMTSNIGANKILEGKKMNEIEAKKELLRYLKPEFLNRIDEIIVFNPLNYDIIFEIIELELKDLQNRLKENNFEIEFEKSVKNWILEFGYDKNFGARPIKRFIKKEIENFVAKKIVAEEILKDKKYNLSFKNDKLYLNESEN

SEQ ID NO: 29442 - protein, 330 aa, Mycoplasma hyopneumoniae 232
MNIDAKKNIILFGMENSLDLAKKISKITGIPLSGIERIVYADGEVLLKSKETIRNSTVFVVANTSRPVNENIMELLIFIDSLKRGYAQEIIVILSYYGYARQDRKSSGRQPITAKLVANLLEKAGLTKLILVDIHNPSIQGFFDFSVDEIHGQYILANELVGKNKDYVVVSPDHGGAVRARILAEILGKQTNVAVIDKRRTGANKSEVLGLIGDVDGKDCIIIDDIIDTGGTIINAANVVREKGAKSVVLAATHGVFSYGFEKFQENPNIDKVIITDSIDNKKLAKKFPKLLITSLAEFLSKSILACIFSTSITSIYEETKQKLIKKNLN

SEQ ID NO: 29443 - protein, 402 aa, Mycoplasma hyopneumoniae 232
MKAKILVVNAGSSSIKWQIFQKENLELLGVGLIERIGLEDGLIKMSFGKKDYKYKDNFANHSQALAVQIAFWKENQLVENLEEFQLVGFRIVHGGASFKAPAKLDQMAISKIEAAAKFAPLHNPGALATIKAVKELIPNAKLAASFDTAFHGTIPKINYTYPIKAEIADKYGIRKYGFHGISHKFITTQVEKIYDSDKVNFVNMHIGNGISLCAIKNSQSLDTSMGMTPLAGVAMGTRSGDIDPSIIPYLANEASFSFSEIDHLLNKNSGLLGLSGVSSDLRDVISAKNSGNLEASFALEVYVQKIVDYLVNYINKVGKNIKALVFTGGVGENSAFIRSLVIEKVQIPGLNLVLDQEKNLKPIPEFGPIEKISAPESDLDIFVIKTNEELLIAKNTISVWEN

SEQ ID NO: 29444 - protein, 317 aa, Mycoplasma hyopneumoniae 232
MTYQEYLQARLEQQNETKSLRSVLIIDGADPRAIAAAKLLKEKNLVKPVLLVDEEIPNLDVDQHIVNFQEKMEFIKEFLKFRKGKETPESAEIQFQSNAFYGTMLLRKKKVDAVVGGLNYPTAEILRAAFKIIGPKPNIKTISSVMIMHKDQEKYLFSDISVNIAPNENQLVDIAKNALDFAIQLGFDPKPAFLSFSTKGSAKSPQSELVAKATQMFNATSPIEAYGEIQLDAALDIEVRRQKYEVNVGKNANILIFPNLDAGNIGYKIAQRLGNFGAIGPIITGINAPINDLSRGSTTQDVFNTVLISALQVEEGK

SEQ ID NO: 29445 - protein, 549 aa, Mycoplasma hyopneumoniae 232
MSKSELKPFVKWVGGKTQLINVILSLLPKNFNSYIEPFLGGGALFLKLQPENAIVNDINSELVNSWKQIKINLDTLTKQLEIYKSLHSKEFFYKLRSEIPENSIKKAARFIYLNKTCFNGLYRVNSKGEFNVPFNNAEIINSTIFDFKNLNNISSFLNENSIEIYNKNYLEILSLAKENDFVFIDPPYDSENDNSFTNYDRNGWKKQDTLELINTLKKLNAKKVKWMFTNHSTSLILNNLKEFSIFQIPVNRFINSNSQDRILATNEVIIINYKVDDSALINYEFEVFFKSLRNTSYILKDYVSWNKINKISLSLKDLEIFEKLKSDNIFDFNIKLRSVFKENVSTFQYLPLFLAKKVQKNSSFFYIDDAFNEKKFQWDNFNSLYEFLNLTGLVNQIFINPEIKSISNYLFGIEVGLSSNDKKNKSGKFMEFQVENLLKKYQITYKKQEKINELQKLFDFVFILNQKVFVAETNFFNSSGSKFNSEIERFKALAEKAKKFNFEFIWITDGTGLRLEKEKLRSFFHNHFLFNLFTFELFLKSEIAKQNKL

SEQ ID NO: 29446 - protein, 421 aa, Nocardia farcinica IFM 10152
MALVVQKYGGSSVASAERIRRVAERIVETKKQGHDVVVVCSAMGDTTDELLDLAEQVAPAPPAREMDMLLTAGERISNALVAMAIHSLGAQARSFTGSQAGVITTGAHGNAKIIDVTPSRLREALDEGTIVLVAGFQGVSQDSKDVTTLGRGGSDTTAVALAAALEADVCEIYTDVDGVFTADPRIVSDAQRLEQVSYEEMLEMAACGSKVLMLRCVEYARRYNVPVHVRSSYTDKPGTYVYGSMEDIPLEKAILTGVAHDRSEAKVTVVGLPDEPGYAAKVFRAVADAEINIDMVLQNISKVETGKTDITFTLPKTEGARAVEMLTKRQGEIGFSQVLYDDHIGKVSLVGAGMKSHPGVTATFCEALADAGINIDLISTSEIRISVLVKDTELDDAVQVLHRAFDLGGDEVAVVHAGTGR

SEQ ID NO: 29447 - protein, 415 aa, Nocardia farcinica IFM 10152
MTSADPGNALHRRLGLTDSVVIGLGSMVGAGIFAALAPAAAAAGSWLLLALGVAALLAYCNAMSSARLAARYPVSGGTYVYGRERLGPFWGYLAGWGFVVGKTASCAAMALTVGHYAWPEHARWVAVATVVAITAVNYTGVQKSALATRIIVGAVLTVLVVVVVVAFSGSHSAAAPMPGRIGPGDVLQAAGLLFFAFAGYARIATLGEEVREPHRTIPRAIRLALGLALAVYALVAVAALLTLGSQGLATAVDPLARVVAAAGAGWLTPLVRAGAVLAAAGSLLALILGVSRTTLAMARDGHLPSPLATVHPRFGVPHRAELAVGAVVAVVAATADLRSAIGFSSFTVLVYYLVANLSAGTLGAGEGRPARWIPVVGAAGCVIVGFALPIGSVLAGLAVLALGAGWYAVRSARLA

SEQ ID NO: 29448 - protein, 224 aa, Nocardia farcinica IFM 10152
MDEALARAGIFQGVEPTAVAALAKQLQPVDFPRGHVIFNEGEPGDRLYIITSGKVKIGRRSPDGRENLLTIMGPSDMFGELSIFDPGPRTSTATTVTEVRAVTMDRDALKSWIDQRPEIAEQLLRVLARRLRRTNNNLADLIFTDVPGRVAKALLQLAQRFGTQEAGALRVTHDLTQEEIAQLVGASRETVNKALADFAHRGWLRLEGKSVLISDSERLARRAR

SEQ ID NO: 29449 - protein, 239 aa, Nocardia farcinica IFM 10152
MTLEIPADTPAWLRRAVEPGALDPVDSLSKARAVRRLMTLTAEPRQAAVLVLFGGSPEPDPGAPGGLPADADVLLTQRAATMRQHRGQVAFPGGATDPGDRDPVDTALREATEETGLLRAGVQPVATLPKLFVPPSRFDVTPVVAYWREPSEVRVVDPAETERVVRVPMAELLDPANRFLVRSSFGYQSPAFQVDGMLVWGLTGGILAGLISGAGWEIEWDRTDVRDLEEALAAVGMSL

SEQ ID NO: 29450 - protein, 68 aa, Nocardia farcinica IFM 10152
MAQGTVKWFNAEKGFGFIAPEDGSADVFVHYSEIQGSGFRTLEENQKVEFEVGQGTKGPQATGVRALS

SEQ ID NO: 29451 - protein, 139 aa, Nocardia farcinica IFM 10152
MLRTMMKSKIHRATVTHADLHYVGSVTVDQDLLDAADLLEGEQVCIVDIDNGARLETYVIAGERGSGVIGINGAAAHLVHPGDLVILIAYGMMNEQEIAEYDPKVVFVDERNRPVELGSDPAHAPEGSGLTSPRSLTFA

SEQ ID NO: 29452 - protein, 396 aa, Nocardia farcinica IFM 10152
MSAPSARRPYAPLRDAYVVDAVRTPVGKRGGALAGVHPADLGAAALRGLFDRNSIDPINVDDVIVGCVDNVGPQAGNIGRTMWLAAGYPEEVPGVTVDRQCGSSQQAINFGAQAIMSGTAEVIVAGGVQNMSAIPISAAMLAGKEYGFDSPFVGAQGWDHRYGTEEVSQFRGAQLIAEKWNISRRDMEEWALRSHERARDAIKNGRFDNEIVPVGDFWIDQGPRETSLEKMASLPPLAEGSPLTAAVASQISDGASATLLASEWAVQEYGLKPRARIHHVSARGADPIFMLTAPIPATKWALEKTGLTIDDIDVVEINEAFAPVVLAWIKETGADPEKVNVNGGAIALGHPLGATGAKLFATLLNELERRNGRYGLLTICEGGGTANATIIERLDR

SEQ ID NO: 29453 - protein, 501 aa, Nocardia farcinica IFM 10152
MRTGANAPQGAGSGFVVVANRLPVDLERLPDGSTRWKRSPGGLVTALEPVLRNNKGAWVGWAGVPDVDVDPIIEDGLELHPVPLSAQEVADYYEGFSNGTLWPLYHDVIVRPTYDRAWWAAYVQVNRRFAEETAKVAAEGATVWVQDYQLQLVPKMLRMLRPDLTIGFFLHIPFPPVELFMQMPWRTEIIEGLLGADLIGFHLPGGAQNFLYLARRLAGQPTSRGTVGVRSKLGVVQVGFRTVRVGAFPISIASAELDEQSRRRSIRERAAKIRAELGNPKNILLGVDRLDYTKGIDIRLNALEELLVEGRFDPAETVMVQLATPSRERVESYIQMRGDIERQVGRINGEFARVGYPVVHYLHRPIPRDELLAFFVAADVMLVTPLRDGMNLVAKEYVACHSGLNGALVLSEFTGAAAELRQAYLCNPHDLDSVKDAIVSALEDDRETKRRRMRSLRRQVLAHDVDRWARAFLDALAQDQVAGSALITENDDYGDNDAPSR

SEQ ID NO: 29454 - protein, 392 aa, Nocardia farcinica IFM 10152
MPSRPATVERLRPFASTIFAEMTELAVRHEAVNLGQGFPDTDGPAGMLEVARRAIADGVNQYPPGRGMPVLRRAIAADRARRYGTEYDPDTEVLVTVGATEAISAALLGLVEPGQEVVLIEPYYDSYAAAVALAGAHRRTAHLVADGDRFVLDLDSLRAAVTPRTRMLVVNSPHNPTGTVLGRADLTAIAELACEHDLLVLTDEVYEHLVYDDNEHISLATLPGMAERTIVVSSAAKTFNVTGWKIGWVCAPAYLVDAVLAAKQFLTFVGGGPFQPAVAHALTEEQEWVARMRESLSDKRIRLSAALAETGFGVRASGGGYFVCADVTPLGTADGLAFCRALPGTLGVAAVPVSVFADDTAAWNHLVRFTFCKQDRTLDEGVRRLRAGARVG

SEQ ID NO: 29455 - protein, 486 aa, Nocardia farcinica IFM 10152
MDHSRAPLVEALEEYHRLGRYGFTPPGHRQGRGADERVLEVIGAYAFRADVLASAGLDDRLSRGGYLSDAEKLMADAVGADTAFFSTCGSSLSVKAAMMAVAGGQDGGLLVPRDSHKSIVAGLIFAGVQPRWITPRWDEQRHFSHPPSPEQVREAWERHPDAAGALIVSPSPYGTCADIEGIAKVCHERGKPLIVDEAWGAHLPFHPDLPTWAMDVGADLCVVSVHKMGAGFEQGSVFHLQGDLVDPARLSACADLLMTTSPNVLVYTALDGWRRQMVEHGRELLGEALRVARRARTELGQIPGVEVMEDELLGVEASHDLDRLQVLMDISGTGATGYEAADWLRENRRIDVGLSDHRRILATLSLADDDETITALVNAVAAWREQLAEPAPHHIRLPEPDELQLESVMLPRDAFFGRVETVPIEEAPGRICAEQITPYPPGIPAALPGELLNRPVVEYLRSAHEAGMNLPDAADSELKTLRVVAN

SEQ ID NO: 29456 - protein, 372 aa, Nocardia farcinica IFM 10152
METTQNVGDSSPRGARVGVVRETNAGERRVALVPKIIPALLKQGVEVVVESGAGHGALIPDQAYVEAGAVIGDPWSADVVVKVAPPSDAEVAKLSKGQTLIGFLAPRNAENQIQALKSAGVQAFAVEAIPRISRAQVMDALSSQANVAGYKAVLLAASESTRFFPMLTTAAGTVKPATVLVLGVGVAGLQALATAKRLGGRTTGYDVRPEVADQVRSVGAQWLDLGIDAAGEGGYARELTDEEKAKQQQALEDAIKGFDVVITTALVPGRPAPRLVTAAAVEGMKPGSVIVDLAGETGGNCELTEPGKTVVKHDVTIASPLNLPATMPEHASELYSKNIAALLELMLVDGALAPDFSDQVLADSCVTREVDA

SEQ ID NO: 29457 - protein, 299 aa, Nocardia farcinica IFM 10152
MSKKIGFLGLGHMGAPMAANLVKAGHDVLAYDPVPAAQEQARADGATVVATAAEAAAGREIVITMLPNGKLVLDVYAELLPAAAPGTLFIDCSTIDVADAKAAAERAVAAGHRALDAPVSGGVAGAAAGTLTFMVGGAADDFAAALPVLEVMGGKVVHCGGAGVGQAAKICNNMLLGISMIALSEALVLGEKLGLSHQSFFDVVSTASGQSWALTSYCPVPGPVPTSPANNDYQPGFATALMTKDLGLAANALRANGVDGQLGALAAEIYTRFNQTDADRDFSAIVTDVRNRSEQEGDQ

SEQ ID NO: 29458 - protein, 392 aa, Nocardia farcinica IFM 10152
MTTSVIVSGARTPVGRLLGGLKDFSGSDLGGFAIKAALEKGGVAPEQVEYVIMGQVLTAGAGQIPARQAAVAAGIPMDVPALTLNKVCLSGINAIALADQLIRAGEHEIVVAGGQESMSQAPHLLEKSREGFKYGDVTLRDHMAYDGLHDIFTDQAMGLLTEQGNDRQPISREDQDAFAAASHQRAAAAWKNGVFDDEVVPVAVPQRKGDPVLVTTDEGIRADTTVESLAKLRPAFREDGTITAGSASQISDGAAAVVVMSKAKAQALGLSWIAEIGAAGVVAGPDSTLQDQPANAIAKACAKQGISPADLDLVEINEAFAAVGIASTRKLGIDPAKVNVNGGAIAIGHPLGMSGARILLHLALELKRRGGGIGAAALCGGGGQGDALIVKV

SEQ ID NO: 29459 - protein, 235 aa, Nocardia farcinica IFM 10152
MRRPWRIEAVTPERGDATTLTLAPVGHPGIRFAPGQFGWLTVDRSPFAITAHPFSFSSSAEDHDRVAITIKALGDFTATVGDIAPGTRAYLDGPHGVFTPDRNEGPGFVLIAGGVGITPMVSILRTMADRGDRRPFLLLYAVRTVAEQTFDAEIDALSRRLDLTVVLVPQDPPPGWPGESGFVDAALLRRHLPDRHERRQYFICGPAPMVTAVEDALAALDVPAERVHTERFTFV

SEQ ID NO: 29460 - protein, 352 aa, Nocardia farcinica IFM 10152
MVDLINLVQTLTTPHPVDRYLELIRPTLTLRQMRAEITEVDRSVLGSVTLTLRAPRQWRGHAAGQYVQIGVVIDGVRHTRCYSPIDPEGARDRRIRLTIKAHPEGLVSQYLHAHAAPGMVVDLSPAEGVFRLPDERPERILLIGGGSGITPVLSMLRTLVEEGHPGQITFLYYARSPEEVPHRAELHALARRHPALRLELRYPERGDKHFDYDELERVAPWFADGHTFLCGPPPLMAAVRTVFEAERLDDRLHSEEFVLTTAPVDPDQAHGTVHFSASGVRADNSGASLLDQAEAAGLSPEYGCRMGICFSCTAVRRSGCTRNLRTGETDSDPDQPIQLCVSAPVGDVDIDI

SEQ ID NO: 29461 - protein, 485 aa, Nocardia farcinica IFM 10152
MSKFIDRVVLHVRAGKGGHGCASVHREKFKPLGGPDGGNGGNGGDVVLEVDPNVHTLLDFHFHPHAKAGNGKPGEGGNRDGKMGSDLLLKVPDGTVVLDRDGEVLVDLVGAGNRFVAARGGRGGLGNAALASKARKAPGFALLGEDGEERDLVLELKSVADVGLVGFPSAGKSSLVSVLSAAKPKIADYPFTTLVPNLGVVASGDTTFTIADVPGLIPGASQGRGLGLDFLRHLERCAVLAHVVDCATLEPGRDPISDVDALEAELAAYKPALAADAGLGDLADRPRVVILNKTDVPDAAELAEMVTPEFTARGWPVFQISAVSRAGLRPLTFALADLVREYREAHPKAAPKRPVIRPIAVDESGFTVHPDPDEPGGFIVRGARPERWVRQTQFDNDEAVGYLADRLARLGVEEELVRLGAEPGAPVTIGDVTFDWEPQISAGVDMVRTGRGTDVRLEQSDRVSAAERKHASRVRRGLVEDDEQR

SEQ ID NO: 29462 - protein, 572 aa, Nocardia farcinica IFM 10152
MTSSTDAGPTVQSKPTRARTGKPVRRKSEGQWALGYREPLNPNEQNKKDDNPLNVRARIENIYAVNGFDSIDKSDLRGRFRWWGLYTQREQGYDGTFTGDENIDLLEAKYFMMRVRCDGGALNVAQLRTLGGISTEFARDTADLSDRENLQYHWIEIENVPEIWRRLEEVGLQTTEACGDCPRVVLGSPLAGESLDEVIDPTPAIQEIVRRYIGDKRYSNLPRKFKTAISGQQDVVHEINDVAFVGVVHPEHGPGLDLWVGGGLSTNPMLAQRVGAWVPLDEVPDVWEAVVALYRDYGYRRLRTKARLKFLIKDWGVEKFREVLEEKYLKRKLIDGPAPEKPVRPIDHVGVQRLRNGLNAVGFSPIAGRVSGTVLTQVADAVERIGSDRIRFTPYQKLIVLDVADDKVEQLIAELEPLGLQARPSAWRRNLLACSGIEFCKLSFVETRKRSQVLAPELEQRLADINAELDVPITVNINGCPNSCGRSQIADIGFKGQLVDDGNGNQVEGFQVHLGGSLGLDSGFGRKLRQHKVTSAELGDYIERVVRNFVKNRDGGERFAQWAVRADEADLR

SEQ ID NO: 29463 - protein, 305 aa, Nocardia farcinica IFM 10152
MAERGAEAGFRSGFVCFVGRPNTGKSTLTNALVGAKIAITSSRPQTTRHTIRGIVHREHAQLILVDTPGLHRPRTLLGQRLNDLVRDTYSEVDVIAICIPADEKIGPGDRWIVQQVKQMAPKTTLLGVVTKIDKVGRQQVAEQLLAVSELLGPQAEVVPVSAVRGEQVEVLVDVIAAKMPEGPAFYPDGELTDEPEETLMAELIREAALEGVRDELPHSLAVVIEEVLPREENPDMLDVHALLYVERPSQKAIVIGKGGSRLKEVGTNARKQIEHILGVRIYLHLHVKVAKDWQRDPKQLGKLGF

SEQ ID NO: 29464 - protein, 371 aa, Nocardia farcinica IFM 10152
MRIGVPGEVKAQEFRVALTPAGAAELVRHGHEVLVERGAGAGSGFGDEAYRAAGARVVAEADEVWGEAELVLKVKEPIEPEYHRMRREQVLFAYLHLAASKECTEAILRSGITAIAYETVRAADGSLPLLAPMSEVAGKLAVQVGAYHLLAPLGGAGMLLGGVPGVRPAEVVVLGGGVAGGNAAAVAAGMGARVSVLDTDLVRLRALDARFQGRVSTIASNAAEVERAVLRADLVVGSVLVPGARAPKLVTQAMVAAMRPGSVLVDIAIDQGGCFEGSRPTTHANPTFYVANSLYYCVANMPGAVPHTATVALTNATLPYVLAIADLGWREACSARPDLAAGVTAEDGRLLSPQVAAAHGLGEARPMGLAG

SEQ ID NO: 29465 - protein, 647 aa, Nocardia farcinica IFM 10152
MCGLLGFLTADAATSEVVDQVYNALHCMRHRGPDERGTWHDDHLVFGFNRLSIIDIEHSHQPLRWGPPENPERYALTFNGEIYNYLELREELAAAHAAEFGDAPMFRTEGDSEAIVAAYHYWGAEAVAKLRGMFGFAIWDTQTRELFLARDPFGIKPLFLATGPGGTAFGSEKKSLLDLLPALRLSDDLDPRALEHYTVLQYVPEPETLHKGIRRLESGTYAVVRPGAAPQVTRYFTPRFPVRPFAPGSAQTRYNEIAAALEDSVAKHMRADVTVGSFLSGGIDSTAVAALAMRHNPNLITFTTGFEREGYSEVDVAAESAAAIGARHIVKVVSPAEFAAAIPEIVWYLDDPVADPALVPLYFVAKEARKHVKVVLSGEGADELFGGYTIYREPLSLKPFEYLPRGLRRLAGRLSERIPDGTRGKSLLHRGSLTLEERYYGNARSFNDAQLRAVLREFRPEWTHQDVTAPIYAQSRGWDPVARMQHLDLFTWLRGDILVKADKMTMANSLELRVPFLDTEVRRVAEQLPFDQKITKDTTKYALRQALEGIVPAHVLHRAKLGFPVPLRHWLRGTELYDWAHTQIAESQTDHLLDKAAITAMLVEHRAGRADHSRRLWTLLVFMVWHGIFVEDRIKPDIQEPVYPVTL

SEQ ID NO: 29466 - protein, 466 aa, Nocardia farcinica IFM 10152
MSTTTTPARAGLGDALRTWWDGLSRPAQWAVGVPAIIALALLPLFPPPVLDTPAYNFGLVMAEFAMFALIAIGLNVVVGQAGLLDLGYVGFYAIGAYTVGLLTSPNSPWNQTDGGWLDPQWAWLACLPIAVAVTALSGLILGSPTLRLRGDYLAIVTLGFGEIVRLLADNLHELTNGSLGLSEVAYPHVGESESKPNGVFSAGNTGDPASANLLDRASYGTYWYWLGLALVIVVLLIVGNLERSRVGRAWVAIREDEDAAEIMGVPTFKFKLWAFLIGAAVGGLSGAMYAGQVQFINPTGFNIINSMLFLCAVVIGGQGNKLGVIFGAFIIAYLPKRLTSVNLVDSESTGYVLLIVDVVLFVGLLVLWRYKGRDLGAWVRRGVIAGMVFTGVMAALLLGSVLLFRPGGAQSLGDLKYLYFGIALVVMMILRPQGLFPVRQKLLSYGRQVYQAVRRPTVGEPIGAGK

SEQ ID NO: 29467 - protein, 445 aa, Nocardia farcinica IFM 10152
MRRGIRPGMPMTLKRVVRTPLLYFFILGDVLGAGVYVLVGQIAAASGGAVWVPLLTALVLACLTAGSYAELATRFPRAGGSAHYVTLAFGPAAGSFIGFCMLAAGVVSVGALARGFASDYLAELVTLPTVVVVVVFLLALAALNLRGIKESLGANVAATAVELGGLLLVIGLGTWVLVRGDGDPGRLTQLGTAEQGVVGATLAGAVLAYYSFVGFETSVNLAEEVSDPRRTYPRALFGALLTAGAVYVAIGVVAAAAVPTDVLANSTGPLLEVVRVAGGVPERLFAVIALVAVANGALLTGIMASRLAYGMARDGLLPAALGRVLAVRRTPWVAILSTSAVSLVLALTGEVAALAATLVLLLLVVFGAVNIAVLILRREPATGDHFRVPTVVPWLGLASCLFLFTRIEAEVWVRGAVLLGLGLALGAVNAVRGRVRARREPEPVG

SEQ ID NO: 29468 - protein, 363 aa, Nocardia farcinica IFM 10152
MRKVVVVGAGIGGLATGIAFARQGWEVEILERAPRLTALGAGISLWSNALRALDALGIGDEVRARAREDVSAGIRDSRGRWLSRFDVAALRARYGLPVILHRADLLDILRAAVPDEAIRTGITVTEARPDGTVVHSAGESGGDVVVGADGINSVVRRAVAGEIAPVYAGYTAWRMILTPSAPTTDLGESWGRGERFGYAVLADGRVYCFAAATVPAGAPDAGLAELRRRFGHWHDPIPALLAAADPAAVLRHDIYRLPDLPTFVSGRVALLGDAAHAMTPDLGQGACQALEDAVTLATTADDLTAYDRARRPRTRRIAALSDRVGTAGQLSARPLVAARDTALRALPSSLQWRALAPILDWRC

SEQ ID NO: 29469 - protein, 400 aa, Nocardia farcinica IFM 10152
MSERVVLAYSGGLDTSVAISWIGKETGAEVVAVAIDLGQGGEDMNVVRQRALDCGAVESIVIDARDEFAEQYCLPTIQANALYMGQYPLVSAISRPLIVKHLVEAAKFHGADTVAHGCTGKGNDQVRFEVGIGALAPDLNVIAPVRDYAWTREKAIAFAEENKLPINVTKKSPFSIDQNVWGRAVETGFLEDLWNAPTKDVYDYTADPTVNFEAPDELIITFDKGVPVAIDGRPVSVLEAIVELNHRAGRQGVGRLDMVEDRLVGIKSREIYEAPGAITLITAHQALEHVTIERELGRYKRQVEQRWGELAYDGLWFSPLKRALDAFVQDTQQHVSGDIRMVLHGGSAVVNGRRSEQSLYDFNLATYDEGDTFDQSLAKGFVQIHGLSSKVAARRDLNQK

SEQ ID NO: 29470 - protein, 386 aa, Nocardia farcinica IFM 10152
MSGLSRRALLCGCAGLVAAGGVAGLTDLARAAGGDRVDTTGPLRIGYLPITDAAPLLVAHGAGTVAPGTVAAAKPVLFRSWAALAEAFLSRQVDVVHLLMPMAVQLRYGLGADVRVLGWNHTNGSALTVAPHITEPEQLAGTQVAIPFWWSIHNILIQRYLRAHGLRPVIRRAASRADRSVELIVMSPSDMVPALANGSIAGYTVADPFNAAAQVRGIGRIHRYLGDLWRDHACCALVVHQDLLDRRPEVAQALTDGIVAAQRRIDTDRAATAKLLAGTYLPQPLPAITTALTYPQPPPLRHPDWQPQRIGFQAFPFPSFTAALVAAMPDTVVDGDTRFLSRLDPDRVHGELVDDRFVRTTLARAGGPAAVGLPDSLTRTEEIDPS

SEQ ID NO: 29471 - protein, 407 aa, Nocardia farcinica IFM 10152
MMGEVFLVDGARTPQGRYGGALASVRPDDLAATVVAEAVRRAGVPADAVDEVVLGAANQAGEDNRNVARMAVLLAGLPDAVPGYTVNRLCASGLTAVATAANAIRGGEADIVVAGGVESMTRAPWVMAKPGTPWARPGEVADTALGWRFTNPAFTAADRAVPTDAGPRARKITLSMGETAEEVAALEGISRAESDAFALRSQQRAAAAVAAGRFRREIVAVRAGNTLVETDEVPRPDTTAEKLAALRPVFRPDGIVTAGSSSPLSDGAAALVLAGAEAVRRHGLTVRARIVASASAGVAPNVMGLGPVPATRKTLDRAGWSQADLGAVELNEAFAAQSLGVIRQLKLDEEIVNADGGAIALGHPLGCSGARILLTLVGRMEREGVRRGLATLCVGVGQGVAMAIEAA

SEQ ID NO: 29472 - protein, 365 aa, Nocardia farcinica IFM 10152
MSAPVQTARTRPARHRAFHDLRVADVERLCDDAVAVTLDVPAELAEEFAFRPGQSLTVRRVLDGVEHRRSYSICAPVGAPPRIGVRRVAGGAVSTWLVDQLRPGDRIEVQGPSGTFAADPDAGGRHLLIAAGSGITPMLSIAASVLAHPDSEVVLLYGNRRVRSVMFVDEIADLKDRYGDRIEVVHVLSREPRDVELFTGRLDAERLRAILSTVVPIGDIDHAWLCGPFGMVTDARAVLAEFGVAPERVHFELFFVEDAPPPQAEHREPGVEGPTSSVTVVLDGRSTTGLLPRDRSILDAAEQIRSDLPFACKGGVCGTCRAKITGGEADMRRNYALEDAEVADGFVLTCQTYPVSDSVVVDFDA

SEQ ID NO: 29473 - protein, 479 aa, Nocardia farcinica IFM 10152
MSVLDADKSRNQGSESHEESSDYLARRQLKRGSAGWLLLAGLGVSYVISGDYSGWNFGLEQGGFGGLAIAAVIIAGMYLAMVLGMAEMSSALPAAGGGYTFARRALGPWGGFATGTAILIEYAIAPAAIATFIGAYVESLGLFGIQEGWWVYLAVYAIFIGIHLSGVGEALKVMFVITAIALVGLIVFVVAAIGEFDPANLTDIPVSDAAGASSVLPHGYLGIWAAIPFAIWFFLAVEGVPLAAEETKNPERNVPRGIVAAMGVLLVTCALVLVLTTGAGGAEAMQSSGNPLVEALGDSGAAKVVNYIGLAGLIASFFSIIYAYSRQLFALSRAGYLPKSLSVTNSRKAPVLALIVPGAIGFGLTFTGQGSMLLNMAVFGAALSYVLMMTSHIVLRRREPGMARPYRTPGGIATTGFALVVAAFAVVATFLVDTAAALCCLAVFAAFLAYFGLYSRHRLVANSPDEEFAVLARAEEELE

SEQ ID NO: 29474 - protein, 342 aa, Nocardia farcinica IFM 10152
MAEFRVTVPTAGNPVTCRDDQTILDAFLRNGVWLPNSCNQGTCGTCKLRVVAGHVDHAGSPEYTLTAEERAQGLALGCQSRPRSDLVVEPLADTTDAVARFPLRDLTATVVSLDPIARDTRRLVLEVDGALDFLPGQYAQLHVPGTECWRPYSMANSPARPHRLEFHIRYSDGGVATGWIFHGLTVGDRVELRGPLGDFVLDDADHPLLLLAGGTGLAPLSAMLRAALERGHRSPIHLYHGVREEADLYDVEWLSELSRSHPDFHYTPCLSRGEWNGRTGYVGDAVLADFDNLRDYSGYLCGPPAMVEAAGRALKRRRMAPRRIFREKFTDAVTVGQELASA

SEQ ID NO: 29475 - protein, 192 aa, Nocardia farcinica IFM 10152
MDTIDDTVGAAAPCAVLFDRDDTLIVDVPYLADPAGVRPVPGAAEQLNRLRAAGIRVGVVSNQSGVAAGLISPAQLAAVNARVEELLGPFDTWQVCTHGRDDGCRCRKPEPGLVIDAAAALGTVPADCVLIGDIGSDVAAAVAAGARAVLVPTAKTRPEEIAYAREVALVAPDLADAVTLALSGTSRKDVLS

SEQ ID NO: 29476 - protein, 512 aa, Nocardia farcinica IFM 10152
MSATAQHRPIRGESLFDESFAFPAPLRTPAPAAPARVAVVGAGVGGLAAAYELQRRGLAVTVFERTARPGGRIRTWRFWDGTHGELGAMRIPGNHHCTLHYIREFALPTRPFVNANPDALYLLRDTRVRRADVARVVNGYRLAAGEQGDPLTLLDTLLRSAWEGLGEHRRKALLAGDVADPELERLAGTSLWQFARERLSAEAWDLVGHASGLLHYEHASLLEVLVDYFGLFNVDQVELVDGTDALVRAFVAALRPGTLRLATRVTAVRVDGDGVRVHGEQLGAPVEEDFDYLVCAVPAPGLDQIEISPGLPARQRQAIRGMNYASSTKTLLHLRDRPWEYRDGIYGGGSFTDLPIQQVWYPADNAVRVPGTDRLTARDRDRSHRPAVLTAAYLWENNARRFAALPEADRTRVVLSALDKLHPGIVASVDDVVHWTWDEQVGLGGGAFAYLAPGEHARYLAGIGAAHPAPAPRIFFAGEHLSVAHAWIQGALQSALDAVAQVLDRVSLARAA

SEQ ID NO: 29477 - protein, 318 aa, Nocardia farcinica IFM 10152
MPTMKVTVAQIVSETPSIRSLRLVREDGRPLGPYRAGAHIDVTGPTGILRQYSLCGPPSEAQSLTIAVKREPDSRGGSAALHEVCEGDIIEIGEPRNILAVDPDATRHVLVAAGIGVTPLLSMAYELHGNGAEFELRYFTRSRTETAFADLLENRAEFRDRVRLHTGLSRADQRSTLDDLAATLTPGTAVYTCGPAGFMDTVAEVVTPVVGAPNLHIEHFEAAAVDTSGDTAFTVELDTGESFEIPADRSILSVLEENGIEVFKSCEEGICGSCVSGVLEGEPEHRDNCLSVADKAAGDQIALCVSRARTPKLVIELF

SEQ ID NO: 29478 - protein, 512 aa, Nocardia farcinica IFM 10152
MNVVSAALFAALVAVTLAITAWAARQNKSAADHYVAGGALTGRQNGVAIAGDFISAASFLGVTGAIALTGFNGFYLAVFVPVAFVLALLLIAEPLRNLGRFTLADVLATRFPGKDVRSLMAISTVVISVVYLVSQLVGAALLVSLLFDLDYVVAVLVIGALTTAYTLVGGMLATSWIQIVKTGLLLVCAVALFLLVLVRFDFNPFGPFSVALAEFGQHFVAPRRGDGAASFDQLSQTVGLVLGVLGLPHVMIRFLTVPDAQQARTSAYTSLWIFFGFYLMIPVLGYGAAILVGPGAIAAENKGGNLAVAQLAETLGGGILLAFVAAVAFVTILAALSGLVIATSGAIAHDLYAQVLRNGAVSAAAQHRAARIATVATCLVGVGIAFAAQRQNVAFLASLGMSIAACANLPALLLTLYWRRMTARAVLAGIVTGLVLSTAVILLSPVVQGADSLLPFSNPALAVAPISFAVSILVALCTAPRGTAAAQAEREFLELRTRALTGRTPEEAAVAS

SEQ ID NO: 29479 - protein, 122 aa, Nocardia farcinica IFM 10152
MSPISPAAPTRRAHVPQRPARPARVADTPHRAGPRATAPEQQGGHRDSGPWRHGTVAWFDAEKGFGFITPDDRSPAVFVEFHAIEAVGYRTLVAGGPVVYRAEETKAGPEAVAVRPYRRGSC

SEQ ID NO: 29480 - protein, 621 aa, Nocardia farcinica IFM 10152
MSAAHQKEIPVTPAAPPSARPETPCPPPVSPPRTERLTGAQAVVRSLEELGVEVVFGIPGGAILPVYDPLLDSRRIRHVLVRHEQGAGHAATGYAQATGRVGVCLATSGPGATNLVTPLADAHADSVPVVAITGQVPLPMMGTDAFQEADITGIVAPITKHTALVTHAADIPRVLAEAFHLAASGRPGAVLVDIPKDVLRATTLFTWPPRLDLPGYRPVTEPNARQIRAALALIARAQAPVLYVGGGVIKANASRRLRAFAEATGIPVVTTLMARGAFPDSHRQHLGMPGMHGTVAAVGALQKSDLVIALGARFDDRVTGDPASFAPHAAVVHADIDPAEIGKIRHAEVPIVGDCDAVLAALLAALPDVPRPDLTAWWAELDRLRRTYPLGFDRPADGALAPQHVIRALGRAAGPEAVYCAGVGQHQMWAAQFLEFEKPRSWLNSGGMGTMGYAVPAALGAKLGRPEAEVWAIDGDGCFQMTNQELATAAIEGIPIKVAVIDNGHLGMIRQWQHLFYEERYSQSELATHSRRVPDFALLAEALGCVGLRCEREADVDAVIAAARAVRDRPVVIDFVVGADAQVWPMIEAGAGNDLIMAARDLRPLFDDSEDPGPPQAPARG

SEQ ID NO: 29481 - protein, 378 aa, Nocardia farcinica IFM 10152
MRHPLAERFDGATQILAELDARIPDTRDHLAETRATVDAYHPKRLQLVVAEIVDETTTTKTFRMQGLDQAVLPPFLAGQYVNVFVAGTSRPYAISSSPTQRGHYDLTVRRVPGGRISNLLIDTVVVGQVLTTTGPMGTFHHNPLFHGNDVVFLAGGSGVAPAMSMLREIADLGLDRSLHLIYGSRHASDVIFHAELDALAAAQPGIRVDHVIAEPDADWAGATGFLTADTIATLAGELDGRMVYVCGPQALYPYALDQLTALGHPRKRIRFEANGAPSDPTAQPHWPTGVDPTEEVAVTVRGTSFRTPRNRPLLDALEDNGIRPEAACRSGECSLCRVRIVKGEVHTAEEAKMRLSDARFGYTHSCVAYPISDVELEL

SEQ ID NO: 29482 - protein, 67 aa, Nocardia farcinica IFM 10152
MAQGSVKWFNGEKGFGFIAQDGGGPDVFVHYSAIGGSGFKTLDEGQRVEFEIGQGQKGPQAQDVRAI

SEQ ID NO: 29483 - protein, 392 aa, Nocardia farcinica IFM 10152
MSGAFVYDGVRTPFGRYGGGLAGTRPDDLAAHVLRALAARTGLDPDTVDEVVLGAANQAGEDNRNVARMAALLADWPTDVPATTVNRLCGSGMDAIIQASRTIETGDAELVVAGGVESMSRAPWVLPKPDKAFPAANATAHSTTLGWRLVNPAMPARWTVSLGESTEILAERYGIGRAEQDEFAARSHQLAARAWDSGFYDDHVVAVPGSELVRDESLRPATTVETLARLKPAFRPDGTVTAGNASPLNDGAAALLLGDESAAARLGREPLARVAGRGAAGVDPDVFGIGPVRAAEIALRRAGIDWGDLAAVELNEAFAAQSLACLADWPELDPAIVNVNGGAIALGHPLGASGGRVVTQLIHQLRRAGGRWGLAALCIGVGQGLAVVVEAV

SEQ ID NO: 29484 - protein, 258 aa, Nocardia farcinica IFM 10152
MTTLEIKDLHVEVANPDETGEPIKILKGVNLTVRSGETHAIMGPNGSGKSTLSYAIAGHPKYTVTSGSITLDGEDVLEMSVDERARAGLFLAMQYPVEVPGVSMSNFLRTAATAVRGEAPKLRHWVKEVKESMSELEIDPAFAERSVNEGFSGGEKKRHEILQLGLLKPKIAILDETDSGLDVDALRIVSEGVNRYRERENGGVLLITHYTRILRYIQPQFVHVFVGGRIVAEGGPELAEELDANGYVRFTQTATAGA

SEQ ID NO: 29485 - protein, 411 aa, Nocardia farcinica IFM 10152
MTIVSPSALGAPAELEAHHAEVVRATLPVIAAHIDDITALFYRKLFTAHPELLANLFNRGNQAQGAQQRALAASIATFAAHLVDPALPHPADLLARIGHKHASLGVVAEQYPIVHEHLFAAIVAVLDADTVTPEVAAAWDRVYWLMADALIGFEGELYRAAGVAPGDVFRETVVVDRVEDPSGVVTFVVESADPAAPLPDFLPGQYVSVGARLLDGARQLRQYSLVAAPGGGRLAFAVRRVEPTPEQPAGEVSTWLHTQVRPGDTLEITLPFGDLVVDTDAATPLVLISAGIGITPMIGILEHLAAATPNRRVLAVHADRTPDTHPLRAVQADLIAALPAATLELWYEHPTPGAHAGMPTLTDLTLPPDADIYLCGGPAFLQSARAQLAAIGIPTARIHFELFTPNDWLLD

SEQ ID NO: 29486 - protein, 277 aa, Nocardia farcinica IFM 10152
MRITRALRFGVGALALALAATACGGGDEGSALEHAQEGKLTIGIKYDQPGLGLRTKDGAYTGFDVAVAQYVAGKLGVQPDGITFKEAPSAQRETLIENGQVDFVVATYSITDKRKEKVDFAGPYYIAGQSLLVKADNTDITGVESLNGNKKLCSVKGSTPAQNVKDKYAQDVQLQEFDTYSLCVEALRNGSVDAVTTDDIILAGFAAQSPGQLKVVGQPFTTENYGIGLKKGDQETRDKINDAIEAMIADGSWAKALQENVGASGFTPSAPPQVDRY

SEQ ID NO: 29487 - protein, 360 aa, Nocardia farcinica IFM 10152
MTAETSVGLRAAGGPAAPDSRARVVRVVEVIDETADARSFVVEPRADHAAAFGYRPGQFLTVRVPDVGSGSGRCYSLASSPHSDTAMKFTVKRVEGGHGSNWLCDTVAAGDELEVLPPAGTFTPRSLDESVVLVAGGSGITPVIAIAKSILFGGAGEVVLIYANRDEASVIFAAELRALEARFGDRFTVIHVLESVQGYPSRRLLSTLLRPFLDRSVFLCGPAPLMDLTAQVCATLGFPEARVHSERFLSLQADPFAADTEPADGSDGGEVVCQVDVAIDGDERRVPWAAGRTLLDALLAAGVDAPYSCREGACSACVCTLKSGRVRLAHNEILTEDDLADGYILACQAEPVTDEIAIEY

SEQ ID NO: 29488 - protein, 532 aa, Nocardia farcinica IFM 10152
MSQAGRPVVLIADKLAQSTVDALGDGVEVRWVDGPDRPALLAAVPEADALLVRSATTVDAEVLEAGKNLKIVARAGVGLDNVDVPAATERGVMVVNAPTSNIHTAAEHAVTLLLAAARQIPAADATLREHTWQRSKFNGVEIYGKTVGVVGLGRIGQLFAARLAAFETKIIAYDPYVSPARAAQLGIELVTLDELLGRADLISVHLPKTPETKGLLSKEKLALTKKGVIIVNAARGGLIDEQALADAITSGHVRAAGIDVFETEPCTDSPLFELPQVVVTPHLGASTTEAQDRAGTDVAKSVLLALAGEFVPGAVNVTGGAVSDEVAPWLEIVRKQGALVGALSDELPVSVEVQVRGELAAEDVAVLELSALRGIFSALVEDQVTFVNAPALAKERGISVEVTTASESPSHRSVVDLRAVFGDGRTLNVAGTLTEPQQVQKIVNINGRNYDMRAEGLNLAVLNYDDRPGALGKIGTRLGEADIDILAAQLSQDIDKEGATVILRVNKPVPADVQTAIAEAVGAAKIALVDLF

SEQ ID NO: 29489 - protein, 68 aa, Nocardia farcinica IFM 10152
MVQGTVLWFDSKKGFGFIAQDGGGADVFVDYLELVGGGFRSLHEGQRVRFDLRQSKSGPEAVGVHVIG

SEQ ID NO: 29490 - protein, 68 aa, Nocardia farcinica IFM 10152
MAQGIVKWFNSEKGFGFIAQDGGGPDVFVHYSAVSGSGFRSLDEGQRVEFEIGQGQKGPQAQDVRVVA

SEQ ID NO: 29491 - protein, 647 aa, Nocardia farcinica IFM 10152
MSAPTARPGPSARRSAPSTNQQATPAAATTANRRQVPPERVTGAQSVVRSLEELGVDTVFGIPGGAILPVYDPLFDSTKVRHVLVRHEQGAGHAATGYAQATGKVGVCMATSGPGATNLVTPIADAQMDSVPIVAITGQVGRGLIGTDAFQEADISGITMPITKHNFLITDGIDIPRIIAEAFYLAASGRPGAVLVDIPKDVLQAQTTFSWPPEMRLPGYRPVTKPHGKQVREAARMILESKAPVLYVGGGVIKADASAELLELAELTGIPVVTTLMARGAFPDSHQLNMGMPGMHGTVGAVAALQKADLLITLGARFDDRVTGQLDSFAPGAKVIHADIDPAEIGKNRHADVPIVGDCREVIAELIETLKAEPTAGEAPLLNLTEWWTYLDGVRKQYPLGWTPPSDGSLSPEFVIEALGRLAGPDAIYCAGVGQHQMWAAQFIKYEKPRTWLNSGGLGTMGYAVPAAMGAKMGMPDREVWAVDGDGCFQMTNQELATCAVEGVPIKVALINNGNLGMVRQWQTLFYEERYSNTDLGTHTLRIPDFVKLAEALGCHGIRVEKEEDVEAAIREAQSINDRPVVIDFIVGKDAQVWPMVAAGTSNDEIMAARGIRPLFDEDEQAAEPAVIHEAMTHGDRAAEQNKGTEE

SEQ ID NO: 29492 - protein, 383 aa, Nocardia farcinica IFM 10152
MLPAAIEAMTAAMARPGNASSVHGSGRAARRMLEEARESIAANLGARPSEVVFTSGGTESDNLAVKGIYWARRDADPRRVRILTSAVEHHAVIDAVEWLEQHEGARVTWLPVDAQGLVSPRTLRAALDEHADEVALISIMWANNEVGTIEPIHELAAVAQEFGIPMHSDAIQAAAQLPIDFGASGLAAASFAGHKVGGPHGVGVLLLGRQVPCVPLLHGGGHERDLRSGTSDTPAAVGLAAALDVTVAELPAKTAELIALRDELIAGVLAAVPDAVLNGPAGQGRLPGNAHFTFAGCEGDSLLMLLDAAGIECSTGSACTAGVATPSHVLIAMGVQPWVARGSLRFSLGHTSTRADVRALLEVLPQVVERARAAGLAGAKGGV

SEQ ID NO: 29493 - protein, 432 aa, Nocardia farcinica IFM 10152
MTNWVNWAGDQHCAPARVAAPRNPDEVAELLADAAARGRTVRVAGAGHSFTDAVLTDGLLLDLSGMNRVLELDARTGLVRVEAGATLNAISTTAHAAGLAFPNLGDIDVQTIAGATATGTHGTGATLQNISAALHSIELVRADGTRVEVGAENDAEAWRAARVSIGALGVVTAVTLQLVPSFVLEGIERPVPVDEVLAELDSYVDGNEHFEFYMFGHSPLAMTKRNSRVDLPEQPRAKAVDWLADIVLSNYTFDALCRLGRAQPRTIPWIHRAAAYAGSYRRQVDRSYRVFASPRLIRFTEMEYAIPREHSAEAIRAIKEIAARFDTPMPIEVRWVAPDDALLSPAGDRATCYIAVHQYRGMAWEPFFRACEAVFDRYQGRPHWGKRHFQTADTLRERYPHWDRFAQVRKRFDPEGLFANEYLTRVLGPIPS

SEQ ID NO: 29494 - protein, 1148 aa, Nocardia farcinica IFM 10152
MTRKGTILSKITIEQEPGLTDTMLTAELDTTHTPPTFAELGVRDEIVRALAEIGIERTFAIQELTLPLALAGEDLIGQARTGMGKTFGFGVPLLHRIATADSGTTPLDGTPRALVIVPTRELCIQVTDDLVRAGKYLRNHKGALKVTAIYGGRPYDSQIAALREGVDVVVGTPGRLLDLAKQNHLILGKIGVLVLDEADEMLDLGFLPDIERILTMVPAKRQTMLFSATMPGPIITLARTFLTRPTHIRAEEPHDSAVHDRTAQFVYRAHALDKAELIARVLQAEGRGATMIFTRTKRTAQKVADDLAERGFAVGAVHGDLGQVQREKALDKFRKGVIDVLVATDVAARGIDIDDVTHVINYQCPEDEKTYVHRIGRTGRAGRTGVAVTLIDWDELNRWAAIDAALGLGIPEPVETYSRSPHLFSDLGIPEGVTGTVRRAAPARTADETVAERPARTPRKRNRRRTLRGKPIDATQNGGAPDGVSTNGAAENGEPQAETAAVADTAPTPSQNQEHGGGEGGSSSRRKRRRRRRGSSSEANAVVQQGDSTDDSTAGDTGRAPTETTPVTAADEAGTTATSAGLDAEPTVAEPTGATERPARRRTRKGTATADDSRPADSTEGAATDPTADATAAVAAATAEEATGAPAAPRRRTRTRAATVTAGTADATAPEAGTATTVDAGPIAAPAETGSVAAPADSGNGSASAGSAPAAGDIGTAPAAGDIGTAPAATEAAPRRRTRKAATAASADAASNDAGTSDAASATGSTGAAATSSEEAPAPRRRTREATSATPAADTTTGDAASAADPVHAGDAAAPSEEAPAPRRRTRKAATEDAVAATATADTGEAATSSEQAPAPRRRTRKATTATPAAATATDAVSATAPASTGEAAAPSEEAPAPRRRTRKATTAPADVTAAQAADTSTADLTAPTASTAADGGAASSAAAAPADTASADAAPAPRRRATRKSAAATAETGAATADPAAATADTPASGQAPADDATATTDAEPAPRRRTRKTATTTADTEATATTDADATRRRRTRKATTTTADTEATATTDAEPAPRRRTRKATTTTADTEATATTDADATPRRRTRKTADTEATESAEGAAPRRRTRTADDVESGAQPAPKRTRKKAAGEQQVEVTAGSSASA

SEQ ID NO: 29495 - protein, 378 aa, Nocardia farcinica IFM 10152
MVLKNVRDWLEAPAASVAERGGRLNVLRGAVARVTTPLLPDDYLHLANPLWSARELRGRIIDVRKETADSATIVIKPGWGFDFKYQPGQYIGIGLLVDGRWHWRSYSLTCPPDWSSPEHGGKKVISIAVKAMPEGFLSSHLVGGVAPGTIVRLQAPQGGFVMPSPPPPKVLFLTAGSGITPVMSMLRAMDRRGGMPDVVHLHSARTEQDVMFGAELRALHERRPGFTSHLHLTGEHGKFALADLDTKFPDWRERETWACGPAGLLDEIEQHWQAAGLSDRLHVERFEVERSAVGEGGTVTFGKTGRSIEVDGATSLLEAGEQVGVQMPFGCRMGICQTCVVTVASGHARDLRNGEERREGDKVQTCISAAAGDCTLDV

SEQ ID NO: 29496 - protein, 292 aa, Nocardia farcinica IFM 10152
MSDIRVGFIGLGNMGAPMAQRLLAWPGGLTVCDTRAEAVAPFTDAGAEAADSAAAVAERAEIVSVAVLDDAQVRAVVTGPDGVLSTARPGTVIAVHATIADSTAEDLAAVCAEREVALVDAPVSGGAPGANSGRLAVMVGGTETAFERVREPFGCFADLVVHAGPVGAGTRMKLARNLLHFVAFTAATEAQRLAEAAGLDITALGKVVRHSDAVTGGPGAIMLRERTGPIADGDFWSPILAHVRDLGEKDLGLALGLGERLGLDLPLARLALRDLGAGLGVGPGAVAEGRTP

SEQ ID NO: 29497 - protein, 602 aa, Nocardia farcinica IFM 10152
MSTNQVDSVPGDDDRDSGGAESGSGSAGPSFADLGIDDRILRAIADVGYESPSPIQAATIPPLLDGADVVGLAQTGTGKTAAFAIPILMGLEVTGRQPRALVLAPTRELAIQVAEAFGRYAAHMPGLHVLPIYGGQSYGVQLSGLRRGAHVVVGTPGRVIDHLEKGTLDLSQLQYLVLDEADEMLKMGFQEDVERILADTPREKQVALFSATMPAAIRKISKQYLREPVEITVKAKTQTNTNITQRWVQVSHQRKLDALTRVLEVEPFEAMIIFVRTKQGTEELAEKLRARGFSAAAINGDIAQNQRERTIGQLKSGALDILVATDVAARGLDVDRISHVVNYDIPHDTESYVHRIGRTGRAGRSGQALLFVAPRERHLLKAIERATRHPLEEMQLPSVEDVNAQRVSKFGDAITENLSSANLPLFRKLIEDYEREHNIPLVDIAAALAVGSYDGDNFFMEAEPEPERRERVPRERPARRFDEERGGGSHHRATGTELATYRISVGKRHRVVPGAIVGAIANEGGLRRSDFGHISIRPDHSLVELPAQLPAETLEALRRTRISGVLIQLQLDQGPPAQRAFSRGPRRDRDAGKRPERRKPRS

SEQ ID NO: 29498 - protein, 406 aa, Nocardia farcinica IFM 10152
MPEAVIVSTARSPIGRARKGSLVDMRPDDLASQIVRAALDKVPALDPTQIDDLILGCGSPAGEQGFNIARNVAVMLGYDTLPGTTVHRYCASSLQSTRMAFHAIKAGEGHAFISAGVETVSRYVHGSADSWPNTQNPIFADAQARTAKAAEGGAGIWHDPREDGLLPDVYIAMGQTAENVASFTGITREDQDRWGVRSQNRAEEAINNGFFEREITPVTLPDGTVVSKDDGPRAGVTYEAVSQLKPVFRPDGTVTAGNCCPLNDGAAALVIMSDVRAKELGLTPLARIVSTGVSGLSPEIMGLGPIESVKNALALANMSVDDIDLFEINEAFAVQVLGSARELKIDEDKLNVSGGAIALGHPFGMTGARITATLINNLQTYDKQFGVETMCVGGGQGMAMVLERLS

SEQ ID NO: 29499 - protein, 495 aa, Nocardia farcinica IFM 10152
MAISSPRRRSSLLRTKSVEQSIRDTDEPDSKLRKDLTAWDLTIFGVAVVVGAGIFTLTARTAGNVAGPSVSLAFVFAAIACGLTALCYAEFASTVPVAGSAYTFSYATFGELAAWIIGWDLFLEFALAVSVVSKGWSQYLGEVLNITPIVDLGGLDFDWGAVLLIAVLCVLLAMGTKLSSRVSAIAVAIKLAVIALVIAVGLAYFDTDNLSPYIPPSEAGQGGEGIHQSLFSYLTGAGNSTFGWYGLLAAASLVFFAFIGFDVVATTAEETKNPQRNVPRGILGSLAVVTVLYVAVSLVLTGMVSYTELSGENATLATAFGLHGVTWAEKIIAVGALAGLTTVVMVLYLGQTRVLFAMSRDGLLPRPLAHTGRHGTPVRLTIIVGVACAVLAGFVDMGALEEMVNIGTLFAFVLVAIGVIILRRTRPDLPRGFRVPLVPLVPILAVLACLWLMVNLTVETWIRFIIWMALGLIIYFAYSRRNSLLGKEEVSLRKE

SEQ ID NO: 29500 - protein, 326 aa, Nocardia farcinica IFM 10152
MTASWIENQKNLMLFSGRAHPELAEQVAKELDVHVTPQTARDFANGETFVRFEESVRGSDAFVLQSFPAPVNQHLMEQLIMIDALKRGSAKRITAVLPFYPYGRQDKKHRGREPISARLVADLLKTAGADRIITVDLHTDQIQGFFDGPVDHMHALFQLSEHVRSNYSMENITVVSPDAGRVKVAEKWANALEGAPVAFIHKTRDPLVPNQVKSHRPVGDVDGRTCILIDDMIDTGGTIAEAVRVLREAGAGDVVIAATHGVLSSPAAERLAACGAREVVVTNTLPITEDKKFPQLTVLSIAPLLARTIREVFENGSVTGLFNGNA

SEQ ID NO: 29501 - protein, 545 aa, Nocardia farcinica IFM 10152
MDTESTSSPRPDARLIGIGVAAVAAVLIWATVDQTGFGRASDTALQWVLDNFEWLFVIAADLFLVLCVVIAVKFGRIRLGADDEEPEFGNLAWIAMMFSAGMGIGLMFFGVGEPLQHFVSPPPSMDVAAKSTAAANVAMQFSLFHWTLTPWAIYGIVGLALAYATFRKRRGNRLSSAFVPLIGERRARGWIGQAVDLLAVFATVFGTATSLGLGALQVAKGLNLTLGTPDTVTVQLIIIIALGAAFVTSAFSGLHRGVKWLSTINVGLAALLMLFVFVLGPTVYILDTIPPAVGNYLANLLQLATRTSANADPEWMGAWTVFYWAWWLSWAPFVGTFLARISRGRTIREFLVGVLLVPSGVTVVWFCVMGGTAIRLTTTGVADLGAIAADAEASLFGMLEALPLGTITSWVSMILVMTYFVTSADSASLVMGSLTSRGSLHPPSWLVVLWGTLMSAVAAVLLLEGGLASLQAATILVALPFVLVMLALCWALWRELSKDPGAGLISRPPLHGLRDAVRAMVGEAIEERQPGRLSLRKARRAETPR

SEQ ID NO: 29502 - protein, 558 aa, Nocardia farcinica IFM 10152
MTETITVTEVSGVETATAGAALVDGLLDHGVDTVFGIPGVQTYELFEALGRAGDRIELISARHEQACAYMAMGYAQSTGRLGVCSVVPGPGILNAAAGLLTARGTNSPVLCLTGEIPTDFMGKGFGHLHEMPDQLTTLRSFVKSADNVLHPSEAKQVLARAIRAAREGRPGPAVVATPWNVLTQSAPVAPAVPLDIVQPAVDPSAVAAAAELIATARHPMILVGGGARGAVAEINALATLLQAPVVAHRSGKGIVDEAAPLGFTCAEGFARWLDCDLVLTIGTRAELLWFRWPKKPAAVPSINIDIDPTGHTRLQPTVAITAGAAAATAALLDALVAAGVHRPDRTAEFTELKAAIRVEIDAYLQPHRDYLAAIRRALPADGFFVEEVSQIGFASYFSFPVSAPRQFVTCGYQGNLGYGFPTALGVKAAHRDRAVVAVSGDGGFQFGIQELATAVQHRLGVAVVVFDNAAFGNVKADQERIYGRAVGSELRNPDFVAVARAYGAHGCRVDAPEDLERAVAAAVDRDLPSVIVVPMPLEPGVAPWRYLMPDLPPGSYAP

SEQ ID NO: 29503 - protein, 351 aa, Nocardia farcinica IFM 10152
MTTVEVPHGSRSAVLRVAAVIAETADSCSLVFDVPEDLTEKFAYRPGQFLTLRIPSDLTGSVARCYSLASSPYTDDKPKVTVKRTEGGYGSNWVCDNVKPGDQLEVLPPSGVFTPRDLDENLLLFGAGSGITPVMSILKSALARGTGKIVLVYANRDAETVIFADELRELAAKHPQRLTVIHWLEPLQGLPTADALASLTAPYASYEAFMCGPKPFMDLVHDALARLGVPRNRTHAEVFNSLAGDPFADQAPVEVSDEEAADAATVEVELDGEVHELSWPRKQTLVDIMLAKGIDVPYSCQEGECGSCACTVLEGEVAMENAEILDPEDIANGYILGCQARPVTDRLRIQF

SEQ ID NO: 29504 - protein, 323 aa, Nocardia farcinica IFM 10152
MRARRSLPAALLVALAALTGCADGPAPVARPPAGTYTETPLPAGATVLPPESPLPAQPEADCGDPTASLRPTGATTGPTLDAIRRRGRLLVGLDTGSNLFSFRDPITGAVVGFDADIAREIARDLLGSPDLIEFRSMGSADREQALQDRTVDLVAKTMTITCERRRKVAFSTVYLRADQRVLAMKDSGIRGLADLAGKRVCVVRGTTSLEHVRREQPAATVLTVPSWADCLVVLQQRQVDAVSTDDAILAGLAAQDPYTEVVGESISVEPYGIGIPREADDLVRFVNRTLERLRSDGTWTRLYRQWLSVLGPAPAPPAATYQD

SEQ ID NO: 29505 - protein, 402 aa, Nocardia farcinica IFM 10152
MTAASEHLVLVLNSGSSSIKYQLVDPETGEVSAAGLVERIGEDDSAIEHRCGARTIGHEGRIPDHRAGLERVFEMFAETGFDLAGAGLRAVGHRVVHGGEMFHEPTLVTDEVVAAIADFAELAPLHNPANVTGIENARRLLPGVPQVAVFDTAFFHGLPDAAKTYAIDAKIAAEYGIRRYGFHGISHEYVSGRVAEVLDLDPARLRQIVFHLGNGASASAVRGGSPIDTSMGLTPLEGLVMGTRGGDLDPGILGHLARAAGFDVDRIDKLLNREAGLKGMAGVNDFRELRRLIDEGDAAAKLAYDVYVHRLRRYLGAYLIALGGVDAITFTAGVGENSADVRADALAGLENFGIAVDPARNTAKDRGARVISPPAAPVTVLVVPTNEELAIARAADRLVAAG

SEQ ID NO: 29506 - protein, 695 aa, Nocardia farcinica IFM 10152
MVESAPSTVYIASPEGDTGKSTVALGVLQMLCATTARVGVFRPIARSTTEPDYILELLLEHSTADLDYAQSIGVTYEQVHADPDAAISEIVMRFHEVADACDAVVVIGSDYTDVASPSELRFNARIAVNLGAPVLLVVRGSGRTPVEVKQLVELCMSELHAEHAAAVAVIANRCDPDQLDDVCSVLGAFDVPSWALPEVPLLIAPTMAELCEAVGGEMYSGDPELLQREALKIMVGGMTAEHILERLVDGVVVIAPGDRSDVLLSVVNAHEAEGFPSLSGIIMNGGMRPHPAVARLMAGLKPRLPILTTDLGTYDTASAAYRTRGRMSAGNPRKVNTALALMEQHVDAPELLSRIRVRRSDVVTPQMFEYQLIERARADRKRIVLPEGDDDRILRAAGRVLQRKIADLVILGDETAIRARAAELGVDIAEAEVLDPRTSGHLESFAATYTELRKHKGMTLERARETVADISYFGTMMVYEGIADGMVSGAAHTTAHTIRPSFEIIKTVPGVQTVSSVFLMCLADRVLAYGDCAVVPDPTSEQLADIAISSARTAQRFGIDPRVAMLSYSTGESGSGADVEKVRVATDLVRERAPELLVEGPIQYDAAIEPTVADAKLPDSEVAGRATVFVFPDLNTGNNTYKAVQRSAGAIAIGPVLQGLRKPVNDLSRGALVADIVNTVAITAIQAQGIAEQEG

SEQ ID NO: 29507 - protein, 853 aa, Nocardia farcinica IFM 10152
MDSFNPTTKTQAALTAALQAASAAGNPEIRPAHLLVALLDQTDGIAAPLLKAVGVDPATVRREAQDLVDRLPRATGATTQPQLGREALAAITAAQRLATELGDEYVSTEHVLVGLADGDSDVTMLLKKYGATADALREAFTTVRGSARVTTPDPEATYQALEKYSTDLTEAARTGKLDPVIGRDTEIRRVVQVLSRRTKNNPVLIGEPGVGKTAIVEGLAQRIVAGDVPESLRGKKVISLDLGAMVAGAKYRGEFEERLKAVLEDIKNSAGQIITFIDELHTIVGAGATGESAMDAGNMIKPMLARGELRLVGATTLEEYRQHIEKDAALERRFQQVLVGEPSVEDTVGILRGIKERYEVHHGVRITDSALVAAAALSDRYITSRFLPDKAIDLVDESASRLRMEIDSRPVEIDEVERAVRRLEIEEVALSKETDEASKLRLEKLRQELADDREKLNQLMTRWQNEKSAIDQVRTLKEQLEALRGESERAERDGDLGKAAELRYGRIPSLEKQLAEAEKASGAAADGEVMLKEEVGPDDIAEVVSSWTGIPVGRLLEGETQKLLRMEDELGRRVVGQKEAVQAVSDAVRRARAGVADPNRPTGSFMFVGPTGVGKTELAKALADFLFDDERAMVRIDMSEYSEKHAVARLVGAPPGYVGYDQGGQLTEAVRRRPYTVVLFDEIEKAHPDVFDILLQVLDEGRLTDGQGRTVDFRNTILILTSNLGAGGDQEFVMNAVRAAFKPEFLNRLDDVVMFHALDEEQLEHIVDIQLEQLQKRLAQRRLTLDVTGSARFWLAVRGYDPVYGARPLRRLIQQAIGDTLAKELLAGTVTDGDTVKVGVSPDGDNLVVEPAS

SEQ ID NO: 29508 - protein, 385 aa, Nocardia farcinica IFM 10152
MDARSAALVRANLREVIDSPHGPERLISAFYGHLFAENPGLRDLFPPAMDMQPKRLTTAIQFVLDHLEDWDRAQNFLEQLARDHRKYGVEAAHYDLAGRALLDAFRTYNGPAWTRELEEGWRDVGILISASMAIGANSDTSQPYWEATVVGHRRVLDDLAIVRLQSDTPVPYQAGQYVPVAVPQRPKMWRYFSPAIPSNPYGEIEFHVRKVRGGWVSPAIVNETQVGDRWLIGGPLGGLHVDRNSGKDVLMIGAGTGIAPLRAQLIEMSQRGVNPRVHFFIGGRYPCDLYDVENMWQLSQSNPWLTIVPVCEQKTNPWWYPHPATDAPYGMHRTLIGNLGAVVASFGAWEDRQIQIAGSAPMIADTRRALIAVGTPEHIITSDPI

SEQ ID NO: 29509 - protein, 390 aa, Nocardia farcinica IFM 10152
MDSRSVALIRTTFKAVAADDAGPDELARTFYAILFTDHPQIRDFFPAAMDVQRDRLVKAISYALDRLEEPDKLLPFLAQLGRDHRKYGVRREHYAAVADSLKAAVRRCAGTEMWTDEVDRAWDEGLALISDAMIGAAEKETSPSAWTGRVVETRQVLRNLTIVRLQLDQPMEYAAGQYMSVQIPSRPRMWRYLSPAVPANPQGEIEFHVRSILGGWVSPAVVSQTRVGDQWLIGSPLGGLGVPRNAKRKMLMIGCGTGIAPLRAQLLEMAQRRSNPKVHLFVGGHHPCDLYDLEMLSTLAVTNKWLTVTPVTEHEENPWWFYRAPDEPEPVFPALEPRLTGQLGKVVAEAGPWADRDVQIAGSPSMVQTTKFRLMAAGIPAKNIRHDPLF

SEQ ID NO: 29510 - protein, 615 aa, Nocardia farcinica IFM 10152
MARAVGIDLGTTNSVVAVLEGGEPVVVANSEGSRTTPSIVAFAKNGEVLVGQPAKNQAVTNVDRTIRSVKRHIGTDWTVEIDGKKYTPQEISARTLMKLKRDAEAYLGEEITDAVITVPAYFEDAQRQATKEAGQIAGLNVLRIVNEPTAAALAYGLDKGDKEQTILVFDLGGGTFDVSLLEIGEGVVEVRATSGDNHLGGDDWDQRIVNWLVDKFKASSGIDLTKDKMAMQRLREAAEKAKIELSSSQSTSINLPYITVDADKNPLFLDEQLSRAEFQKITSDLLDRTRAPFQQVIKDAGISVSDIDHVVLVGGSTRMPAVSDLVRELTGGKEPNKGVNPDEVVAVGAALQAGVLKGEVKDVLLLDVTPLSLGIETKGGVMTKLIERNTTIPTKRSETFTTADDNQPSVQIQVFQGEREIAAHNKLLGSFELTGIPPAPRGVPQIEVTFDIDANGIVHVTAKDKGTGKENTIKIQDGSGLSKEEIDRMIKDAEQHAAEDKARREEAETRNQAETLVHQTEKFIKDNEDKVPADVKSKVEAAIAEANEALAGTDIAAVKAAVEKLATESQALGQAIYEAQGADAAASSNGAASSANDDQVVDAEVVDEPVDTEKK

SEQ ID NO: 29511 - protein, 417 aa, Nocardia farcinica IFM 10152
MGHVSPHLPHRPPRVLEQSTKLQNVVYEIRGPVHAHAARLEAEGHRILKLNIGNPAPFGFEAPDVIMRDIIAALPYAQGYSESKGILSARRAIVTRYELVPGFPEFDVDDVYLGNGVSELITLTMQALLDNGDEVLIPAPDYPLWTAMTSLAGGTPVHYLCDESNGWQPDIADIEAKITDKTKALLVINPNNPTGAVYSAEVLQQIVDLARKHQLLLLADEIYDKILYDDAKHISLATLAPDLLCLTFNGLSKAYRVAGYRSGWMVITGPKEHATGFLEGIDLLATSRLCPNVPAQHAIQVALGGHQSIEDLILPGGRLLEQRDVAWERLNMIPGVSCVKPKGALYAFPRLDPEVYEIHDDSKLILDLLLQEKILMVQGTGFNWPAHDHLRIVTLPWARDLAVAIERFGNFLASYRQ

SEQ ID NO: 29512 - protein, 389 aa, Nocardia farcinica IFM 10152
MRDAVIVEAVRTPIGKGKPNGALHQVHAVDLLAHSLREVVRRSGIDPVLIDDVIGGVVTQVGEQGANITRRAALAAGYPESVPATTVDRQCGSSQQAIHFAAQGVLAGAYDVVVAAGVESMGRIPMGANIAGSADLGGVAFTERYPEGLVPQGISAELIAARWGLTRTQLDEFALSSHDKAARATKNGQFAAELAPLAGLETDEGIRVGSTLETLAGLRPAYYDPAMAERFPQIGWQITAASASQVSDGSAAVLIMTGERAAQLGLTPLARLHSFAVAGDDPLLMLTAVIPATRKVLQRAGLQLADIDLVEINEAFSPVVLAWAQETGADLSKVNVNGGAIALGHPLGASGARLTTTLVHAMRERGARYGLQTMCEAGGLANAMILERL

SEQ ID NO: 29513 - protein, 625 aa, Nocardia farcinica IFM 10152
MSIESVAWSQMYRQANAPEEQRPFRAATAGRILRFAAPHRRRIGVFLLFSVVAAVLAVATPVLAGRVVDGIVGASPPRTVVLLAAAIGLLAVADAGLGLVIRWLSARIGEGLILDLRRAVFDHVQRMPVAFFTRTRTGALVSRLNNDVIGAQRAFSDTLSGVVTNLVTLALTLAVMVSISWQITLLALLLLPVFVLPARRMGNRLAAMQREAARLNAAMSTQMTERFSAPGATLVKLFGRPEQESDEFAVRARRVRDIGVRTAMLQTVFVTSLTLVSALAVALVYGLGGWYALVGRLDAGAVVALSLLLTRLYTPLTALASARMEIMAALVSFERVFEVLDLKPLIEDAPGAVPVPDGPVDLELDGVRFGYPSADKVSLASLEEVATLDTRGGVEVLHDISLRAEPGQMVALVGSSGAGKSTIAQLVSRLYDVDSGAVRLNGVDVREISARSLRETVGLVTQDGHLFHDTIRANLLLARPEADEAQLWDALRRARLADLVESLADGLDTVVGERGYRLSGGERQRLTIARLLLKQPRLVILDEATASLDSTSEAAVQEALTEALDGRTALVIAHRLSTIRAADKIVVLEHGRIVEQGTHTELLAADGRYAQLYRTQFADPVELAA

SEQ ID NO: 29514 - protein, 359 aa, Nocardia farcinica IFM 10152
MLDFIYWPVSWILWFWHRVFGFAFGADNGLTWALAVVFLVFTLRIVLYKPFVKQVRTTKQMQELQPQIKELQKKYKNDRQKMALEMQKLQKEHGFNPLMGCLPVLAQVPVFLGLFHVLRSFNRTGHGFGQLGLTPEQNANTANYVFNAADVQSFLSARIFGAPISAFITTPQAEFLAFEDYGGIPSRLSIALVAIPLMVIAGLATHFNARASVARQTPEAAANPQAALMNKLALWVFPLGVLVGGPFLPIAILLYWVSNNIWTYGQQHLVFGRMAKEEEAKKQAKLEQRAQNAPKPGAKPVNTKKKPATAASAESADDTGQPTEPSTNGTPKPAKAGQRKSGGQKRNPNRGRPNQKRRR

SEQ ID NO: 29515 - protein, 857 aa, Photobacterium profundum
MRLDRFTSKFQMAIFDGQSLALGRDHQYIEPAHLMVALLNQDGSTIRPLLTMLNVDISQLRSRLGELLDHLPKVTGIGGEVQLSNDMGLLLNMCDKLAQKRKDKFISSELFILAAVDDKGSLGKLLKELGLTAAKIEQAINQVRGGQKVDDQNAEENRQALEKFTIDLTERAEQGKLDPVIGRDDEIRRTIQVLQRRTKNNPVIIGQPGVGKTAIVEGLAQRIVNGEVPEGLRHKRVLSLDMGSLIAGAKYRGEFEERLKSVLNELSQEEGSVILFIDELHTMVGAGKGEGSMDAGNMLKPALARGELHCVGATTLDEYRQYIEKDAALERRFQKVLVDEPTVEDTIAILRGLKERYELHHHVEITDPAIVAAARLSHRYVSDRQLPDKAIDLIDEAASSIRMQIDSKPESLDRLERRIIQLKIEQQALSKESDAASQKRLNDICEELDVKEREYAELEEVWNAEKAALSGTQHIKSELEQARMNMEVARRAGDLNRMSELQYGKIPELEKQLDLAAQAEMQEMSLLKNKVTDAEIAEVLSKQTGIPVAKMLEGERDKLLRMEDELHQRVIGQNEAVEAVANAIRRSRAGLSDPNRPIGSFLFLGPTGVGKTELCKTLANFMFDSEDNMVRIDMSEFMEKHSVARLVGAPPGYVGYEEGGYLTEAVRRRPYSVILLDEVEKAHPDVFNILLQVLDDGRLTDGQGRTVDFRNTVIIMTSNLGSDRIQENFGNLNYEGIKNMVLEVVSQYFRPEFINRVDETVVFHPLGQENIKHIASIQIERLVNRLKEKDYELTVQESALDFVAKAGFDPVYGARPLKRAIQQYIENPLAQEILSGKLETGKPIDLLIEDEHLVTKQ

SEQ ID NO: 29516 - protein, 881 aa, Pirellula sp.
MAFRIDKLTTQAQNVVAEAQAQATSAGNAEIDPLHVLSAAVNQRDGITTPLLEKINVDVPKLKSLLTSELEKLPHASGMGQARVSAKLQAALEASATSAESLKDEYVSTEHLLVGLARTDNKAKNLLSLLGVSDNDLLTAMSQIRGSARVTDPNAESTYQALEKFGIDLTQLAQSGKLDPVIGRDNEIRRVIQVLSRRTKNNPVLIGQPGVGKTAIAEGLALRIFEGDVPQSLKGKKVVSLDMGALVAGAKFRGDFEERLKSVLREVKDSDGKVILFIDELHLVVGAGNAEGSADAANLLKPELARGALRCIGATTLDEYRQHIEKDAALERRFQPVFVGEPNVEDTVAILRGLKPRYESHHGVRITDSALVAAANLSDRYIADRFLPDKAIDLIDEAASRLAMEKESVPEPIDRLQRRLRQLELVHRQLVDEQEASAVDKRVEVEEEMESAKAELASLKEQWETEKMGLDDVQSVRQEVDQLQHRFAQLDADAKEKQLRGESPEDAYSEMLQVQSRLRELQARIDEAEKHDDSADQTKEEPGDEKRRLLRKEVTEEEIAEVVSTWTGVPVTRMMETERAKLLVMEERLHQRVVGQDEAVTAVSDAVRRSRSGLQDPNRPIGSFLFLGPTGVGKTELCKALAEVMFDDESAMVRIDMSEFMERHSVSRLIGAPPGYVGYEEGGKLTEAVRRRPYAVILLDEMEKAHPDVFNVLLQVLDDGRLTDGQGRTVNFTNTVVVMTSNVGSQVIQRVTEEGGGEDEMRQAVEDALKARFLPEFLNRIDDTVIFHPLQQTQIRRIVQLQLEELRSRLAANGLSFEITDAAIDQIAEVGYDPAYGARPLKRVIQREVQNPLASAILKNSYAEGTTIKIDHDGDQFVFSG

SEQ ID NO: 29517 - protein, 729 aa, Propionibacterium freudenreichii subsp. shermanii
MDTEKLTTMSRDAVTAAVRLALTKGNPTAEPVHLLHAMLMVPESSVAPLLKAVGADAARVDGAASAAIDKLPSSSGSSVAQPQLSGALARVLADAETRADKLGDQFVSTEHLLIALAEVDSDAKNILASNGVTTAALEKAFNDSRGDKRITSAESEGGESALDKYSIDLTQRAKDGKLDPVIGRDSEIRRVAQVLSRRTKNNPVLIGEAGVGKTAVVEGLAQRIVKGDVPDSLKGRRLVSLDLASMVAGAKYRGEFEERLKAVLNEIKSAEGQIITFIDELHTVVGAGASEGSMDASNMLKPLLARGELRLIGATTLDEYREHIEKDPALERRFQQVYVGEPSVEDTVAILRGLRERYEAHHKVRITDSALVAAAQLSHRYITGRQLPDKAIDLVDEAASRLRMEIDSSPEEIDTLRRQVDRLTMEQFAVEKEEDPGSKARLARINSDLADAKEQLRGLEARWAAEKEGLNKVGELKTRIDALRTEADKHTRDGDLAKASEILYGEIPELNKQLDEASAAEEDSQGKSMVSEEVTSDDIAEVVSAWTGVPVGKMLEGESEKLLDMENRIGKRLVGQQAAVKAVSDAVRRSRAGISDPNRPTGSFMFLGPTGVGKTELAKALADFLFDDETAMVRIDMSEYMEKHSVSRLVGAPPGYVGYEEGGQLTEAVRRRPYSVVLLDEIEKVHPDVFNFLLQVLDDGRLTDGQGRTVDFRNVILIMTSNLGSQFMV

SEQ ID NO: 29518 - protein, 857 aa, Fusobacterium nucleatum subsp. nucleatum
MNPNQFTENTISAINLAVDISKGNMQQSIKPEALALGLLMQNNGLIPRVIEKMGLNLQYIISELEKEMNNYPKVEVKVSNENISLDQKTNSILNRAEKIMNEMEDSFLSVEHIFKAMIEEMPIFKRFGISLEKYMEVLMNIRGNRKVDNQNPEATYEVLEKYAKDLVELAREGKIDPIIGRDSEIRRAIQIISRRTKNDPILIGEPGVGKTAIVEGLAQRILNGDVPESLKNKKIFSLDMGALVAGAKYKGEFEERMKGVLKEVEESNGNIILFIDEIHTIVGAGKGEGSLDAGNMLKPMLARGELRVIGATTIDEYRKYIEKDPALERRFQTILVNEPNVDDTISILRGLKDKFETYHGVRITDTAIVEAATLSQRYISDRKLPDKAIDLIDEAAAMIRTEIDSMPEELDQLTRKALQLEIEIKALEKETDDASKERLKVIEKELAELNEEKKVLTSKWELEKEDISKIKNIKREIENVKLEMEKAEREYDLTKLSELKYGKLATLEKELQEQQNKVDKDGKENSLLKQEVTADEIADIVSRWTGIPVSKLTETKKEKMLHLEDHIKERVKGQDEAIKSVADTMLRSVAGLKDPNRPMGSFIFLGPTGVGKTYLAKTLAYNLFDSEDNVVRIDMSEYMDKFSVTRLIGAPPGYVGYEEGGQLTEAIRTKPYSVILFDEIEKAHPDVFNVLLQVLDDGRLTDGQGRIVDFKNTLIIMTSNIGSHFILEDPNLSEDTREKVADELKARFKPEFLNRIDEIITFKALDLPAIKEIVKLSLKDLENKLKPKHITLEFSDKMVDYLANNAYDPHYGARPLRRYIQREIETSLAKKILANEVHEKSNVLIDLDNNHIVFKEV

SEQ ID NO: 29519 - protein, 852 aa, Deinococcus radiodurans
MNPERFTEASAVAINAAQQLAQENHNQNLTHFHVLRTLLDNDTASRALTLAGGDLNTARAALDAEIAKLPKVQGSDGQLYLDPALNRAFQKADTLAAQLGDSFVAADTLLLALRGEYRGRGLPDEVSLNRAVTEQRKGKTVTNKTSEQQFDALNKYGTDLTQRARDGKFDPVIGRDEEIRRVMQILLRRSKNNPVLIGEPGVGKTAIAEGLAMRIVKGDVPEGLRDKKIVSLEMGSLLAGAKFRGEFEERLKGVIDEVVKSAGEIILFVDEIHTIVGAGKTEGSPDAGNMLKPALARGELHLIGATTLDEYREIEKDAALERRFQPVFVDEPSVEDTISILRGIKERYQVHHNVEITDPALVAAATLSNRYITDRQLPDKAIDLIDESAARLRMALESSPERIDQLSRRKLQLEIEREALKREKDVDSQNRLLDIENQLKTLTDELNEVRSRWEAERGEVAALREKREKLDAVRTQIEKARRDYDLEEAARLEYGELPALEKDVQDLEKKLKSAEFAHMEVTEEDIAAVVSRWTGIPVSKLMEGEREKLLHLEEQLHGRVIGQDRAIVSVSDAIRRARAGLNDPNRPLGSFMFLGPSGVGKTELAKALAEFLFDSSDAMVRIDMSEYMEKHTVARLIGAPPGYVGFEEGGQLTEAVRRRPYAVILFDEIEKAHPDVFNVLLQVLDDGRLTDGQGRTVDFRNTLIIMTSNIGSPLILEMQQRGEDAETIKSAVMDELRGEFRPEFLNRVDDIIVFDALTAKDLQSIVDIQLGGLRRRLAERRITLHLTEDAKDKLAELGYDPAYGARPLRRTISQYIETPLAREILGGQIQDGSVLNVDYGDGGFTFNSGSLN

SEQ ID NO: 29520 - protein, 857 aa, Streptomyces albus G
MDAELTNRSRDALNAATTRAVSAGNPDLTPAHLLLALLEGQDNENLVDLLAAVERRPGGGSARAPSASLGSLPGVTGSTVAPPQPNRDLLAVIADAGRRAKDLGDEFLSTEHLLIGIRPTARPPRCSPGRAPTPEKLLEAFQNTRGGRRVTTPRPEGQYKALEKFGTDFTAAARERKLDPVIGRDQEIRRVVQVLSRRTKNNPVLIGEPGVGKTAVVEGLAQRIVKGDVPESLKDKRLVSLDLGAMVAGAKYRGEFEERLKTVLSEIKESDGQIVTFIDELHTVVGAGAADSAMDAGNMLKPMLARGELRMVGATTLDEYRERIEKDPALERRFQQVLVAEPSVEDSIAILRGLKGRYEAHHKVQIADSALVAAATLSDRYITSRFLPDKAIDLVDEAASRLRMEIDSSPLEIDELQRSVDRLKMEELALDRETDPASRQRLEKLRRDLADRERSCAAHRPWEKEKQSLNRVGELKERLDELRGQAERAQQHGDFDTASKLLYGEIPTLERDLRWRPAEEEAAKDTMVKEEVGPDDIADVVGSWTGIPAGRLLEGETQKLLRMEAELGRRLIGQSEAVQAVSDAVRTRAGIADPDRPTGSFLFLGPTGVGKTELAKALADFLFDDERAMIRIDMSEYGEKHSVARLVGAPPGYVGYEEGGQLTEAVRRRPYSVVLLDEVEKAHPGVFDILLQVLDDGRLTDGQGRTVDFRNTILVLTSNLGSQYLVGSAPEEEKRRQVMEVVRSSFKPEFLNRLDDLVIFSALDEDELARIAGLQIAGLARRLADRRLSLDVTPEALAWLAKEGFDPAYGARPLRRLIQTAIGDRLAKEILAGEVRDGDTVRVDRVEDGLLVGRAEG

SEQ ID NO: 29521 - protein, 239 aa, Listeria welshimeri
KVLAELGADISGSQFIEPDGKFPNHIPNPDNEEAMASLKKAVLASGADLGVIFDTDVDRAAIMDKNGESLNRNPLIAVISSIILKEKPGTTIVTDSTTSGHLQAFIEAKGGKQHRFKRGYRNVINEALRLNENGTPSEIAIEVSGHAALKENYFLDDGAYLIAKILMTYATLRKNGQDLPDLIADLKEPAESEEIRLNITASDFKTYGKEVLADLLIFVEEDEEMELEPSNQEGVRVNT

SEQ ID NO: 29522 - protein, 158 aa, Staphylococcus aureus
ATQLQATDYVTPIVLGDETRVQSLAQKLNLDISNIELINPAKSELKAELVQSFVERRKGKATEEQAQELLNNVNYFGTMLVYAGKADGLVSGAAHSTGDTVRPALQIIKTKPGVSRTSGIFFMIKGDEQYIFGDCAINPELDSQGLAEIAVESAKSAL

SEQ ID NO: 29523 - protein, 158 aa, Staphylococcus aureus
ATQLQATDYVTPIVLGDETKVQSLAQKLNLDISNIELINPATSELKAELVQSFVERRKGKATGEQAQELLNNVNYFGTMLVYAGKADGLVSGAAHSTGDTVRPALQIIKTKPGVSRTSGIFFMIKGDEQYIFGDCAINPELDSQGLAEIAVESAKSAL

SEQ ID NO: 29524 - protein, 848 aa, Cryptococcus bacillisporus
MCMLHCRGRIEMASTPYNIARIIEFLPPHTSPKKGSRVAPSPDVMVRLSLYYRPSDISARNLADFRLLLAAIHTDIQPISNVRGKCYVRHKDRIPDLLEWKRLPDHFYFAKFFDPYIKREFDVIRTADVNNIPSTVKDVLMRRYEYLITEREMVADLTDDFRICCRCRQWSSFQDSIKCESCREHYHMTCLQPPLLAKPAKGYSWVCPSCFYQPNTQPEGQKLLLLNNSSGAGKLRAARTKIKSNTLDFTPDTMFRGWPWRYFGHVRSGRCNIPPGRHSLADYMEHVKRLHLAVPPWDVERINLALSSYTSMGREAAYHFMCHTVLSDFHPIRFTEEESAVFEAELERNGGLDVISCSKILKRTTSDILRFSYIWKNDKLKDENEALRQHRRVSVSHARQNRTLGAPSLGKMRIGDKSKVDDDETSLYGSSTGESTMACATCSTRLGQVWWRNPRTVPGIAMCESCGSNYRKYGVISFVRSEDSKKIDRREHVTRKGKNEVSDQPTASLWGSKINQCACCRRMEPKSQLARCRNCNFVVHTACYGTALLDQKSDWECDVCTNEKTGECHVEPRCVLCPRTPHLVMKARRRTAEYDLLTALKPSEGRRWAHLLCSIWAIGVEYADIASFKQVEGIMNIKEDIWAATCSLCGQNDGAVIKCSDCNIHFHISCAWLCGLTLGFEFSLAKPGKSQSQIVTKFKEGEGVMNARAWCKSHDLSNHIVYDIFDVEPDGGETALQVYVRAYKSATWQSAFPLLRKAIRLELITQSPTKADSPENIQANAVKCNSCGVLDSPMWHKDDTDTVQSDTAASCGNPADDPKSASKSGVYDKRGLKGPWLCHLCWCTIQLN

SEQ ID NO: 29525 - protein, 850 aa, Cryptococcus bacillisporus
MCMFRYLGPIEMASTPYNIARIIEFLPPHTSPKKGSRVAPSSDVMVRLSLYYRPSDISARNVADFRLLLAAIHTDIQPISNVRGKCYVRHKDRIPDLLEWKRSPDHFYFVKFFDPYIKREFEVIRTASVNNVPATVKEVLLRRYEYLITEREMVADLMDNFRNCCRCSQWSSFQDSVKCESCREHYHMSCLQPPLLAKPAKGYSWVCPSCVFQHNTQPEPQKAPLGIDPLGSSKPRGTKSKRKLITSDFTPDTMFRGWPWRYFGHFRSGRRHISSSRHSLADYMEHVKRLHLVVPPWDLERLNLALSSYTSMGREAAYSFMCHTVHSDFRPIHFTEEESVVFEEELERNGGLDVISCSKILKRSTSDILRYSYLWKNGKLKDENEALRQHRRISISHARQNRTLGAPSLGKMRIGDKSEVEDDETSIYAQPLAGTGSTMVCVTCSTKISQLWWRCPRTVPGIAMCESCGSSYRKYGVISFTRSEDIKKSDRKEHVSKKGKNEFSHQTAGSNWSPKFNHCACCRRIEPKSQLFRCRNCCFIAHTGCYGIASSDQRSDWECELCSNEKKEECPIEPRCVLCPRTPHLTLKNKIKNVTEYDLLAALKPSEGRHWAHLLCSTWTNGVEYANATSFKQVEGIMNIGGDRWMIACSLCGQSDGAVINCSDCDTQFHVSCAWLSGLTLGFEFNLAKPGKSHGEIVIKFKDSEGVMSAGVWCKSHDLSGRVIHGIFDVEPDGGETAFQVYIGTYKSPTWNSAFPLLRKARRLELIVPSSLKLSSIEETEKKVEKCNSCGVSDSPMWHKHNEGTVQYDAAYAREAWRDAGIVPRTAENGQGQEQQLRLLCHLCWFDNRK

SEQ ID NO: 29526 - protein, 169 aa, Streptococcus mutans
MSFKSGFVAILGRPNVGKSTFLNHVMGQKIAIMSDKAQTTRNKIMGIYTTDKEQIVFIDTPGIHKPKTALGDFMVESAYSTLREVDTVLFMVPADEKRGKGDNMIIERLKAAKVPVILVINKIDKVHPDQLLEQIDDFRNQMDFQEIVPISALQGNNVSHLVDLLVDHL

SEQ ID NO: 29527 - protein, 173 aa, Solanum lycopersicum
AGINISGINGEVMPGQWEFQVGPSVGISAGDEVWVARYILERIAEIAGVVVSFDPKPIPGDWNGAGAHTNYSTKSMREDGGYEIILKAIEKLGLKHKEHIAAYGEGNERRLSGKHETANINTFKWGVANRGASVRVGRDTEKAGKGYFEDRRPASNMDPYVVTSMIAETTIIG

SEQ ID NO: 29528 - protein, 73 aa, Arabidopsis thaliana
QVEVWFQNRRARTKLKQQVEVWFQNRRARTKLKQTEVDCEFLKKCCETLTDENRRLQKELQDLKALKLSQPFS

SEQ ID NO: 29529 - protein, 290 aa, Streptococcus thermophilus
MSKDFENKTTLKPFTKWVGGKRQLLANLLSLIPSKFNNYFEPFVGGGALFFELAPKKAVINDNNEELVLAYQVIKTDVELLIDELEKHKEKNSKEYYLELRAADRDGRIEKMSDVERAARILYMLRVNFNGLYRVNSKNQFNVPYGKYKNPRILDEDNLRNINKYLNENDIAILNSDFEEATKTAKKGDLVYFDPPYVPLSATEAFTSYTADGFGYDEQVRLRDLFIELTEREVYVILANSSAELVYELYEPYAKTILEVGATRMINSNAQKRGKINELLITNFEVQNEI

SEQ ID NO: 29530 - protein, 510 aa, Solanum tuberosum
MKIATRFSHSIPKLVCLDNGDQDGLLISTKFLNKIIRIDEENMMITVESGVTLRQLISEAGKAGLVLPYTPYWWGLTIGGLIGTGAHGSSLWGLGSSVHDYIVQLRIVTPADAANNYAKVRILENGSPDLNAVRVSLGVLGVVSQVTLKLERVFKRSITFSERDDSNLGEDAVTFGRQHEFADFTWYPSQRKVIYRIDDRVPNGTPGNALNDFLGFRPTDQNLLAIFRTLEEIQESTNDAGGKCAVAIISTSILKYLSYGWRNNGTGYPMVGFQNQVQASGTCLDSLEGATCPWDHRVKGLFFHQTTFTISLSKVKGFIEDVQRLVALEPKALCVLDLYNGILMRYVTTSNAYLGKQEDSLDFDITYYRSKDPMSPRLFEDFLEEIEQLAFFKYGALPHWGKNRNVAFIGAINKYKNVDKFLQVKQSYDHLGLFSSEWTDQVLGLKDGLSIVKEGCALEGLCICSKDIHCAPNKGYFCRPGRIYKDARVCTNPSLSTIDIQTRKTICTSM

SEQ ID NO: 29531 - protein, 407 aa, uncultured alpha proteobacterium EBAC2C11
MALIVQKFGGTSVADLDCIRHVAQRVKIEVDAGNEVAVVVSAMSGATNQLVDWASDIGALHDAREYDTVLATGEQVTVGLLAIALQNIGIDARSWLGWQIPIWSDNVHGAARIDAINGKAIIERLKNGQVAVIAGFQGIGPDGRITTFGRGGSDTSAVAVAAALEADRCDIYTDVDGVYTTDPRIAPKAKKLSRITFEEMLEMASSGAKVLQTRSVAMAMRHNVNLQVRSSFNDTTGTLVVSEDSVVEQETISGIAYSPNEAKITIIGLPDKPGIAAGVFGALADQQVNVDMIVQSASSAAKKTDISFSVGRDDLQKAVDIINKIKVKLEFESVDASPNVAKISVVGTAMRTQPGVAKTMFETLASKGVNMQVISTSEIKISVLIDTEYTELAVRSLHTAYGLDDDS

SEQ ID NO: 29532 - protein, 395 aa, uncultured alpha proteobacterium EBAC2C11
MGNYMLVSPHGSVGLKPLLLPPSEAEEARRRASSFGHKIEMTSRELSDLLMLGMGAYTPLDGFMGYRDWQGVCEEMKTGTGLFWPIPITLSVSEEAANNIKIGDEVALTDNLGRVCGQVTAQEIYQIDKAIECNAVFGTVDTNHPGVAKVMDQHPYNLSGPVKVFDEGDYPKKYKGLYMKPAETRVLFEKNGWSSVAAFQTRNPMHRSHEHLAKIAIEICDGLLIHQVLGALKPGDIPAEVRVDAIDALVKNYFVPGTAIQAGYPIEMRYAGPREALLHAVFRQNFGCSHLVVGRDHAGVGDYYGPFDAHKIFDEIPRGSMETQPLKIDIAFYSYKCGGMATGRTCPSEQNERLNISGTRLREMFANKETIPAEFSRPEVVAVLQRYYDNLSQVG

SEQ ID NO: 29533 - protein, 335 aa, Delftia acidovorans
MKLAHSLTVTAVSPQGSDAILLSLGVDGGQRQHFSFQSGQYLTLAVPVQGDEHWRCYSITSAPEDGQAISVLVRRVAGGRVSNWLCDHARAGQRLQVLPPAGRFTLARHGQPVLLYAGGSGIAPIFALAREALLQGAPQVRLFYACRDRATAMLLAELQALQAGSGQRLEIRHWYDAEQGLPTQALLEAQTQGLEAADAYLCGPEAFMHSVLAALAAAGIEPSRVYREDFGAALEGAVETGAEGPDAELTVQLKGQTHTVSVRGGQFLLGAMLDAGLAVPHACRVGECASCMCRLVDGEVLRLDSSVLDEDDAAEGWLLACRTRAASAQVRLRFS

SEQ ID NO: 29534 - protein, 478 aa, Oryza sativa Japonica Group
MYSNFKEQAIEYVKQAVQEDNGGNYVKAFPLYMNALEYFKTHLKYEKDPKIKDAIAAKFTEYLRRAEEIRAVLDGHIGGGGGGGDSEQAKPRGMLRSAIVAAKPSVKWSDVAGLESAKEALQEAAILPIKFPHFFTGKRSPWKAFLLYGPPGTGKSYLAEAVATEVDSTFFSISSSDLVSKWMGESEKLVANLFQMARENAPSIIFIDEIDSLCGQRGECNENEASRRIKTELLVQMQGFDNSNDKVLVLAATNMPHVLDQAMRRRFDKCIYIPLPDLKARKDTFKIHIGDTPHSLTEGDFVSLAYQTEGFSGSDIAVCVKDALFQPVRKTQDAKFFIKADDDTWTPSEQSQPGSIQTTMQELASKGLAAKILLPPISKIDFDEVLVRQRPTVSKKDLVVYEKFTQEFSEEEIFISPLSNEKPQSHDVPFKKSEEEILTMQKKTKSEEEILTMQKKTKSPMRNFLNVWAKACCCASTI

SEQ ID NO: 29535 - protein, 230 aa, Oryza sativa Japonica Group
MGESEKLVANLFQMARENAPSIIFIDEIDSLCGQRGEGNESEASRRIKTELLVQMQGVGHNDDKVLVLAATNTPYALDQAVRRRFDKRIYIPLPDLKARQHMFKVHLGDTPHNLNESDFENLARRTDGFSGSDIAVCVKDVLFEPVRKTQDAMFFFKADGDMWMPCGPKQSGAVQTTMQELASKGLAAKILPPPISRTDFEKVLARQRPTVSKKDLEVHERFTKEFGEEG

SEQ ID NO: 29536 - protein, 463 aa, Legionella pneumophila str. Lens
MDLFRKKDIKGSPDSESHLAKCLSVFDLTFLGVGAIIGAGIFVLTGIVAATISGPAVIFSYVVAGFACAFAALSYAELAASIGGCGSAYGYAYAGFGELIAWIVGWDLLLEYSIAVSAVSIGWSGYANDFLMALKIFIPTHLLHGPADGGDLNILAILIIAVLTTLLIVGVKSSSRFNNIMVLVKLLVIFIFIAIAFGEVKVENWSSFMPYGWAGVMKGASIIFFAYVGFDAVSTAAEEAINPQRDLPIGIIASLAICTVIYILVSGLLTGIAHYTTLNVSSPISHVLLVLGYKTAAGLVGVGAIAGLTTVMLVLFYGLTRVFLAMSRDGLLPRFLSKTNEHTKTPIRIILLCGILMASLASVTPIGTLAELVNIGTLFAFIVVCGGVLYLRRTHPDMERPFKTPFMPYVPILGIISCFYLILNLPWVTILRFIIWMLVGIAVYFAFSRTNSALSVEGDCAAE

SEQ ID NO: 29537 - protein, 431 aa, Legionella pneumophila str. Lens
MDMDIKHKPLKRELSLFGATMMGLGSIVGTGVFVSIGIAAGVTGPSVILAIALAALVATCNAFSSAQLAANHAVSGGTYEYGYRYLHPAFGFTAGWMFLCAKSASAATAALGFAGYFIHLSGLETVPVIPIALAASITLILLVLSGLRRTNTVNIIIVMITLITLTVFIISGLPDFMQRGTANLRPFFPVSKQEGLSHFFYATALMFVAYTGYGRIATLAEEVKNPGKFIPAAIIITLMVSAALYILVGLVAIGAVGVEKLAQVTETNATPLESAARAIGIPGLSVLVSIGACTAMLGVLLNLILGLSRVALAMGRKGDLPKMFCYVSETRHVPVFAVIGVGVVIIALVLTGSVETTWTFSAFTVLIYYAITNLAALRLPKEEQLYPPLFAIGGLLSCLFLAFWVPIGVWITGISLLVLGLLWKVVANRFL

SEQ ID NO: 29538 - protein, 392 aa, Legionella pneumophila str. Lens
MDIALAKRVQKVKPSPTLAVAAKAAQMKAQGLDIIGLGTGEPDFDTPQHIKLAAISAIEAGDTKYTAVDGIVELKEAVKNKFKRDNELDYQLNQILVSVGGKQSCYNLCQAYLNPGDEVIIPAPYWVSYPDMVLLADGVPVIIETTPAQRYKINAQQLEQAITPKTRMIFLNSPSNPSGIAYTQQELKELGEVLKKHPQILIATDDMYEHILWSQAFTNILNACPELYDRTIVLNGVSKAYAMTGWRIGYAAGPAPLINAMKTIQSQSTSNPCSIAQRAAVAALNGSNESIEEMVNAFHQRHDYVADRLQSIDGIEVIPADGTFYIFPSVQAIIEKRGYANDIEFSEKLLNEVGVALVPGSAFGTEGCIRISFATGIDTLKDALNRLQRFCS

SEQ ID NO: 29539 - protein, 523 aa, Legionella pneumophila str. Lens
MRRQWYIGFGVILLCLFALFAMLQDIVWFFAFLIPVVILWIYDVLQTKHTILRNFPVLGHVRYFLEFLRPEIQQYFIATDESELPFNRETRSMIYQRAKNVRDTIPFGTERDILSVGYTWALHSLSPKHSSEVEPRIDVGGPDCKKPYNASRLNVSAMSFGSLSANAIMALNKGAKLGGFYHNTGEGGLSPYHLQGGDIVFQIGTAYFGCRDDKGDFDENEFIKEASRDEVKMIEIKLSQGAKPSHGGILPAAKLTEEIAKVRKVPMGKDVLSPIAHTAFDNPVGLLHFVKRLRDLSGGKPIGFKLCLGRRHEFMAICKAMLKTNILPDFITIDGAEGGTGAAPVEYTNFIGTPLEAGLVFVHNALVGTGVRDKIRVICSGKVTNGFDLLTNIALGADICNSARAMMMSIGCIQSKQCNANTCPTGVATQKKRLQYGLVVDEKKFLVANFHNNTIKSFLEMVGALGLNNPSDLKPSHIMRRIGVDEVKSFDKIYTYVKPGQFLQGDIPDDYRIHWEHADPDKF

SEQ ID NO: 29540 - protein, 394 aa, Legionella pneumophila str. Lens
MHLKRTLSLTLLAFYGLGTILGAGIYALVGEVAKEAAQFTPLSFLIASIIAFFTAISYAELSSRLPLSAGSALYVRRAFQQRWLSGLIGWIVVLTGVISAATLSHGFVKYFQLFLPLPPSLIITILVVILAGVAVWGIRESATLILFMTLMEVGGLLMIIYYGRYSLASIDIQSFSFPHSFDGVLIGAFIAFYAFIGFEDMVNTAEETINPEKTLPKAIFLALISATILYVVVAWVIVSTIPSHTLVKTDMPLIEIIKLQGQSPLLFSIIALISITNGILVQIIMASRLIYGMANQQNAPQIFSFVYSKTQTPANSTLLVSLIILLFAYALPITTLAKLTSSIILCIFIIIHASLIKIKLTEKKSPEAISFPIVFPMISILLTLTFLGIQFFLK

SEQ ID NO: 29541 - protein, 403 aa, Legionella pneumophila str. Lens
MFNQSQQKIVCVLYDDPKGGFPPNYARESIPELKQYPDGQSLPIPDSIDFIPGELLGSVSGELGLRQFLENNGHQFVVTSDKDGPDSVFARELKDATVVISQPFWPAYLTRDRIERAPKLKLAITAGIGSDHVDLQAAMEHNITVCEVTYCNSISVAEHTVMMILALVRDFIPQYNTVIDGGWNIADCVSRSYDLEGMQVGCVAAGRIGLAVLRRLKPFAVKLHYTDRHRLPVQLEQELNLTYHPSVESMVKVCDVVSIHCPLHPETEYLFDERLIKQMRRGSYLINTARGKICDQHAVAKALESGHLAGYAGDVWFPQPPAKNHPWRSMPHHAMTPHTSGTTLSAQARYAAGVREILECWLGNKPIRDEYLIVSQGRLAGVGSHSYSAGNSTTGAEQEAELV

SEQ ID NO: 29542 - protein, 77 aa, Legionella pneumophila str. Lens
MARGEVKWFNNAKGWGFIIPEGGGEDIFVHFSSIHGTGYKTLVPGQAVTYDVINGERGLHASNVIALSENAEQEEIA

SEQ ID NO: 29543 - protein, 405 aa, Legionella pneumophila str. Lens
MKKNIKKIALAYSGGLDTSIMIPWLKEHYEHAEVIAVICDLGQQEDLDAIKNKALKSGASKAYVVDVKNEFAIQYLWPLVKSGALYEDQYILGTISRPLIAQKLVEIALTEQVNAVAHGATGKGNDQVRFEYSLKALAPQLEIIAPWRAWDIKSRQEAIVYAKAHGIEVPVTPKAPYSRDHNIWYISHEGGVLEDPSQEMPDDVLLMTSPVSQAPDEEEMIILDFKKGVPVALNEQKLSPVALLNSLNQKAGQHGIGVADIVENRLVGMKIRGIYEAPAAAVLYKAHKLLESLCLTRSTLHLKQSLQQTYANLVYEGRWFSQTKQALDAFIDVTQQHVTGRVKLKLFKGNIIPAGMHSPYSLHHPALATFEEDNVYNQKDAEGFINLFSLSAKIYSQVHQGGNYD

SEQ ID NO: 29544 - protein, 250 aa, Legionella pneumophila str. Lens
MLNIKELNVAVNGQSILKGINLEVKPGEVHAIMGPNGSGKSTLSKVLAGHPSYEITRGDISYLGQDLLPMSPEERARAGIFMSFQYPVEIPGVTNINFLKASVNAVRKGQGRNTLDAIEFLSFIREKCQLLDMDESFLYRSINEGFSGGEKKRNEILQMAALEPRLAILDETDSGLDIDALRIISQGVNAMRSPGRSIILVTHYQRLLDYIEPDFIHVLANGRIITSGDKSLALELEKKGYSWLEEVEQL

SEQ ID NO: 29545 - protein, 272 aa, Legionella pneumophila str. Lens
MVKIRPFLKWAGSKYNCLNEIISSLPTGQRLIEPFAGSGVVFMNTSYSSYLLAESNSDLVNIYRILQLNGESFIDYCQQYFTPEANCKEKYYELRSEFNNLMDSNQKSAVFLYLNRHGYNGLCRYNSKGKYNVPFGLYEKPYFPRKEMMLFYKKCLSAQFIHGDFRNTFALAKPGDIIYCDPPYVPLTENNQTLPYNKKLFSLEDQIELAELAQETASKGIPVIISNHDTEFTRYHYKKAQIKSFYVPRWISCRSQMRLPVKELVAVFNCPS

SEQ ID NO: 29546 - protein, 567 aa, Legionella pneumophila str. Lens
MNTITESYRAGLFQKKYWLQNIISGLIVGVVALPLAMAFAIASGAKPEQGLYTAIVAGLIVSIMGGSRVQIAGPTGAFIVVLSGITTQYGISGLQIATLMAGFILVLFGFARLGSIIKFIPSPVIIGFTSGIAVVIWVGQWQYFFGLPAAGSGHFHEKFWHLLLSFPHLNIATTFLGICALFIVLYSSKLPGLKRIPGPLIALVLVTIIQSVWHFEGVATIGSLFGGIPQGLPTFTWPEITMGRLIELTGPAFAIAMLGAIESLLSAVVADGMSGTRHNSNRELVGQGIANIVAPLFGGFAATGAIARTATNIRNGGNSPLSGIIHSITLILVLLFLAPLAVDVPLAALAAILFVVSWNMSEARHFIKLIRVAPRADVVILLVTFCLTVFVDLVVAVNVGVIIAVLHFLRRMVNSIQIQRMSERQLSQELAQEKNYDLPEGVMVYVIEGPFFFGAVETFQSALANTHTDPKVLIIRMRWVPFIDITGLQAMEEIILNLQKRGVRVLLSEANPLVDAKLRKMGIVRLIGEQNYYKEFSQALDVCRINDSDRKSQPPYEAAKPLASVTQ

SEQ ID NO: 29547 - protein, 377 aa, Legionella pneumophila str. Lens
MMIATLMESAQETRVAITPNSAKQYIKLGYEIGIEKNAGLSSDFANEEFEKAGAIIFDSKSTLLKKTQILLCVNEPDPKNLNGLPPDSLIIGHIDNNPLSPLVKWCLDQKITLFSMNLIPRISRAQSMDSLSSQANLAGYRAVLEAAATFHRAIPMMMTAAGMIQPAKVLILGAGVAGLQAIATAKRLGAVVYAFDVRKAAKEQVESLGAEFIEVMQEQDSETAGGYASETSEEYKKLQAELIDQYAKAADMVISTALIPGRQAPVLLYKKTVEQMKPGSVIVDLATSRGGNCELSVADKIIKHGDITIVGLSNIAGLVPATASDLYSNNLVHLINLLAKNPAELNLNPEDEIIQQAVLCHKGTYLPFQGVKEKQNA

SEQ ID NO: 29548 - protein, 373 aa, Legionella pneumophila str. Lens
MLVGVPKEIKSHENRVGLVPSSVREIIRAGSDVLVEKGAGLGIGISDDDYRNAGAEVVDTADDVFANAELIVKVKEPQPIECKRLREGQTLFTYLHLAPDPHQARLLKESGVTAIAYETVTQDDGGLPLLTPMSQVAGRMAIQAGAHCLEMAQGGSGILLGGVPGVAAANVVVIGGGVVGTNAVRMAMGMEARVIVLDRSLQRLNELDFQFGSKLNTVYSTADSIEKYVSSADLVIGAVLVPGAAAPKLVTRSMLSSMRPGSVLVDVAIDQGGCFETSRATTHQEPTYVVDNVVHYCVANMPGAVPRTSTFALNNATLPFILSIVTKGVKLALLSDPHLLNGLNVHQGKITYEAVARDLGYEYTPAAAALSGR

SEQ ID NO: 29549 - protein, 311 aa, Legionella pneumophila str. Lens
MTWLLECFKNKQESRLMSSYCGYIALVGRPNVGKSTLLNRILQQKLSITSRKPQTTRHSILGIRTEDEFQFVYVDTPGIHQGNAKAINRMMNKTAISVLRDVDVIAFLVDGTHWKDEDEYVLNLIKQAKVPCILVVNKVDKITDKTQLLPWIEQISQRYQFAAIIPLSAKTGLQVDELEGKLKTYLPEGPHLFPDDQFTDRSTKFLCAELLREKIFRFCGQELPYSVTVDIESFKDEGNLIRIHALILVDKDNHKRMIIGDKGQKLKEMATNARLDMEKMLDKKVFLQCWCKVKSGWSDDERILKQLGYDQ

SEQ ID NO: 29550 - protein, 69 aa, Legionella pneumophila str. Lens
MTNKIRGKVKWFNKDKGFGFIESSGKDYFVHFSSIQSDGFKTLPDGAAVLFKMGKGQKGPQAEEVEVIK

SEQ ID NO: 29551 - protein, 559 aa, Legionella pneumophila str. Lens
MCSIGEYLAKRLEELNISEYFAIPGDYNLILLDEVLKNEKLKMINCCNELNAGYAADGYARVKGVSALFVTYSVGGLSVVNAVAGAYAENLPILVISGGPNTNSIQDAEILHHTLATEDNLYVRDIFSRITAHVVCIRKPEQAAMQIDEAIAIAIAKKKPVYIEIACNIANYPISKPTQRAFNTYKISDSSSLAAAVEHAAEKLNSALKPSLIVGSKVRHCNAINSVSELAKCTGYAMAAMPDAKGFISEQHPNFIGIYWGPVSSSGCAEIIDSSDAYLLIGPNENDYTTVGYVWGINPHKSIKTTKGGVIIGETVYTNIFMNDFLRELSKKLKFNDASYKAYKRIAEETVVYPELDQPDAPLSSRYLFGQIQKMLSDKKALLAETGDSWFNCMRLSLPEGCPFEIQMQYGSIGWSVGALLGMQAALHNQKRVIACIGDGSFQMTAQEISTMIRYGYKPIIFLMNNACYTIEVQIHDGPYNVINNWRYAELVNVFRGEQSNAKSFIVKTNKELLTAIKQAEKTEALCFIEVFLDKDDCNKNLLEWGSRVANYNSRPPRR

SEQ ID NO: 29552 - protein, 352 aa, Legionella pneumophila str. Lens
MKKILFIDRDGTLVEEPFDFQVDSLDKIKLTSGVIPALLQLQKAGFTFIMVSNQNGIGTVAFPEEDFAVCHEFILDLFSSQGILFDEIFICPHTPEDNCICRKPKTGLLESYLKETAFAKQYSWVIGDRDTDKEFADNLGVNFLPISKTHTWEMVASAIINDARKASVQRKTKETAVDLSVQLDSDQTSVIDTPIPFFTHMLEQVAKHGGFDLRLQASGDLEVDEHHLIEDTAIALGEAIRTALGDKWGINRYGYTLPMDESLATIAIDISGRSFCDFKGQFTREFIGGMATEMIPHFFQSLSSALGATIHIEVTGINHHHMIEACFKVLGRALRQACSRTNNYLPSTKGVL

SEQ ID NO: 29553 - protein, 77 aa, Legionella pneumophila str. Lens
MSQRETGHVKWFNEKKGFGFIVNQKGEDIFVHYKDIQGVGFKTLHENDPVTFELDRGPKGLKAQNVVVASESVHIEE

SEQ ID NO: 29554 - protein, 551 aa, Legionella pneumophila str. Lens
MTEQTEKRAHFIRQLIIDDLANGKHQGIVTRFPPEPNGYLHVGHAKSICLNFGLAEEFKGKCFLRFDDTNPIKEEEEYVNAIIDDVRWLGFEWCAMTHSSDYYHELYELAIYLIKKDMAYVDSLSMEEIRAFRGTLQEPGRESPYRNRTIEENLDLFARMKAGDFPDGTHVLRAKIDMKSGNLNMRDPVLYRIRHARHQRTGDEWCIYPMYDYAHPISDALEKITHSLCTLEFQDHRPLYDWLVDNLPLPAKPVQTEFARLNLSHTVTSKRKLRELVEKKIVTGWDDPRLPTLRGMRKRGYPPAAIRQFCEIIGISRSDSVIDMSLLEECVRAEFNKTAKRALCVMDPLKVVIVNYPENKVEQLQAAFYPQNPESESRNLPFSREIYIEKSDFMENPPNKYFRLSPGAEVRLRHAYVIKCQEVIRNDQGEITELHCTYDENTLGKNPGDRKVKGVIHWVSSSHAYPVTIYQYDRLFTDPNPAREEDYFQFLNHNSLQTLQGFCEPAMAEQAEGDVFQFERLGYYCVNSVAEGCVQAFHRVVDLKDTWGKVS

SEQ ID NO: 29555 - protein, 191 aa, Legionella pneumophila str. Lens
MTPIGKMNIVNVSQKLLQLSMESNNTQQSIKTHSSVIVLHDLSKDSLILTRRSQMLKKHPGEVCFPGGFQEINDQDLYSTALRELNEELGVTSERITLIRKLSIEKTLMGLVIHPWYASIDSIFPYTMNPQEVSELILVPMPLVKNQKNYKEIRIEKEGKHIVTCQFIANEELIWGATARIMRQLASQYQV

SEQ ID NO: 29556 - protein, 387 aa, Legionella pneumophila str. Lens
MAIKSIYFDYMATTPVDPRVVEQMIKYLGPEGDFGNPASATHEYGRVASMAVEQARSQIAETINASPQEIVFTSGATEADNLAILGAARFYKNKGMHLVTMSTEHKAVLDSFHQLEKEGFEVTYLNPESDGLLDLGKLESALRSDTILVSVMHVNNEIGVIQDIASIGELLRNRGIIFHVDAAQSAGKLPIDLSQLSVDLMSFSAHKNYGPKGVGALYVSHKPRIRLQPLSYGGGHEGGLRSGTLPTHQIVGMGEAFAIAEADRIPEQTRILNLRKQLWDGIRHLPAIKLNGHEHRRIAGNLNVSFAGLNGDSLLFALSELAISTTSACSSASIQPSYVLRAIGLTDTEAQSTIRLSIGRFTSEVQIKRAIDIICTQVSRLHELSPL

SEQ ID NO: 29557 - protein, 859 aa, Legionella pneumophila str. Lens
MSGILIMQQVVIKFGGTSVSTRATWNNIAAITQKHLNTGVQPVIVCSALTQISNKLEKAIEAALLDEHHSLFNDIQSSHLNLAEQLEVNHQLIANDLHQLQQWLTGISLLKQAPAKTHAQILSLGELMMTRMGHAFLERHEIKVKWYDARELLTSTPTLGGETMNYLSARCESEYDPGLVEKFLSSGAQAIITQGFFAANPHGETVLLGRGGSDTSAALLAGKLQAASCEIWTDVPGIYTANPHQLPHARLLKQLNYDEAQEIASMGAKVLHPNCIPPVRKANIPMVVKYTHLPEHSGTLITKDIDESAPLIKSIQVKHSILLISIDTLNMWQQVGFLADVFAAFKKHGFSVDLLSSSEFNVTLSLDVNAKIHDRPAINALLDDLNQFGRAKLIEPCSAVSLVGHHIRTVLPHLGPALEVFEAKQVYLMSLASNDLNLTFVVDESHADKLCQRLHHLLIESNPQIFYYSKSWHEEFGKPNVRPTPWWEIERDRLLTTSAIHSPCYVYHSPTQAIRARQLSALESIDSLFYAVKANPFPSILKTLEKEGIGFECVSIQELELVLKLFPNIKKERILFTPNFAPKSEYEFALQTGCYVTIDSLYPLENWPELFKNREVIVRIDPGTGAGHHKHVSTGGNESKFGITQNDISKILSLTKSNHIKVIGLHAHSGSGILSTDLWQQTAVMLASLTDQFPEVRSINLGGGLGIVEKPGQHPIDFAALDAQLMAVKSQYPGLAIWLEPGRFFVAESGVILAKVTQCKEKGKVKFIGIETGMNSLIRPSLYGAYHEIVNLTRLHEEKAGFAHIVGPICESGDTLGYDRLLPVTKEGDVILIANTGAYGHCMSSHYNLRPPAQEIVLE

SEQ ID NO: 29558 - protein, 588 aa, Legionella pneumophila str. Lens
MKNNLPIKSRLLYKRLLSYVKPFWPVLLLGVLANILYSGIDAGFTYMTKLFLDKSFITIDLDFVKQIPLIVLIGITLRGLVSSLGSYCMTWVARSVVKVLRQTVFSHIIHLPADYYDEATSGQLLSKILYDVEQVAQVSADALTDFIQNICLVIGLLTVMMVICWQLSLMFLLTIPFVGIIVNYTNKRVRRISHKVQKTMGEVTEIASEAIEGYRVVRIFGGERYEITKFNKATEYSRKNDMKVAISKAINVSGVQLVIAIGIAMIIMAAIHLSTVITISAGSFLAIIAAMLQLIKPMKTLTTLNATIQRGLAGAESVFNLLDLPLERNNGLILKDKIRGEIEFKHVYHAYRQGQNILHDVNFVIEAGTSVALVGHSGSGKTTIASLLPRFYELSQGMITLDGMPIQQLSLESLRKQMSLVSQNVTLFNDTLANNIAYGRFDASREQIITAAKLAYADEFIKQLPDGYDTRVGENGVLLSGGQRQRIAIARAILKDAPILILDEATSALDSESEHYIQAALEQVMNGRTTLIIAHRLSTIKHAHKIIVMQHGRIVEQGSHQELLDMDGHYAQLYKVQQFGRVNEEVVV

SEQ ID NO: 29559 - protein, 394 aa, Legionella pneumophila str. Lens
MEHNDVVIVAAKRTPMGAMLGNLSALSSPELGAVAHMAVLSQSGIAPAEIDEVISGCVLQAGIGQAPARQAAIKAGIPNSAGATTINKMCGSGMKAVMFAHDLIKAGTANVVLASGMESMSNAPYLLSKARAGYRLGHGELKDHMFLDGLEDAYDKGQLMGCFAETTAKHFNFSREQQDEYALRSMNRALKAIENGAFREEIAPVTLTTRKGDVTIDVDEGPDAAKLAKIPQLKPAFQADGTVTAANSSSISDGAASLILMSASNAEKRGIKPLAKIIAHASHSQAPQWFTTAPVDAIRKVMNKASWKQDDVDLFEINEAFAVVAMAAITQLELNPEQVNIHGGACALGHPIGASGARILVTLMHALKHQGKKRGIASLCIGGGEATAMAIELI

SEQ ID NO: 29560 - protein, 176 aa, Legionella pneumophila str. Lens
MNRIILLDRDGVINTDSINYIKNADELIIIPDSITAIARLCAAGYKIGVATNQSGVSRGLYSEDDLSAIHCKLREVLAEAGGQIDALEYCIHLPEDNCFCRKPQPGMLKALAEKLNCSLDSVPFVGDRVSDIHAALAVGAQPIIVLSNMTDMSELAQYPKVPIYNSLLQYVNQLLL

SEQ ID NO: 29561 - protein, 644 aa, Legionella pneumophila str. Lens
MAKIIGIDLGTTNSCVAVMEGDKPKVIENSEGHRTTPSIVAFTDDNEILVGQSAKRQSVTNPEKTLFAIKRLIGRRFDDPIVQKDIKMVPYKIMKADNGDAWVRVKDQDKAPPQISAEVLRKMKKTAEDYLGEEVKEAVITVPAYFNDSQRQATKDAGRIAGLEVKRIINEPTAAALAYGMDKKRGDSVIAVYDLGGGTFDISIIEIAEVDGEHQFEVLATNGDTFLGGEDFDLALIEYLASEFKKDTGIDLHNDPLALQRLKEAAEKAKIELSSAQQTDVNLPYITADASGPKHLNIKLTRAKLESLVEKLVERTIEPCKTALKDAGLTVSQINEVILVGGQTRMPLVQKTVEEFFGKEPRKDVNPDEAVAVGAAIQAAVLSGEVKDILLLDVTPLSLGIETMGGVMTKLIEKNTTIPTKATQVFSTADDNQTAVTVHVLQGEREQASANKSLGRFDLRDIPPAPRGVPQIEVTFDIDANGILNVSAKDKATGKAQSIVIKASSGLSEEEVAAMVKDAQSHAEEDKKFKEMAELRNQADSLIHSCEKSMKDLADELSEDEKKGIETAISELKEAVQGTDKARIEDKLKVLTDASAKMAERIYAKKSSEGQTAQGQTQSQESTKPAEEGVVDAEFEEVKEEDKK

SEQ ID NO: 29562 - protein, 69 aa, Legionella pneumophila str. Lens
MSKTVNGVVKWFNEIKGFGFIEQEGGPDVFAHFKEISSSGFKTLTEGQRVQFIVTQGAKGLQAQNITPL

SEQ ID NO: 29563 - protein, 468 aa, Legionella pneumophila str. Lens
MNDEFLENVTYEELTIGRKASLNRTLTQDDINLFAAMSGDINPSHVDPQFAKSDVFHGVVGHGMWSGALISTLLGTALPGPGTIYLEQDIQFITPVRIGDNLTITIIVRDKHPGKSIVHFDCMGVNQKGETVIKGLAKVIAPTKKMKVPRTVLPLVQIHHNDHFNKIIEACSNLPSIKTAVVHPVTANVLEAVYDSVKAGLITPVLIGPMAKIKCAASEAKIDLSDWEMIDTEHSDAAAFKAVELAASGKVDSIMKGALHTDELMSAVVPVTSGLRTKYRISHAYVMDVPTYHKPLIITDAAINIAPNAADKADICQNAINLWRILYGEEIKPKVAILAAVEMVNPKMQATVDAAVLCKMADRGQIIDGTLDGPLAFDNAINKQASKEKNIISSVAGDADILLVPDIESGNMLAKQLTFLGHADAAGIVLGARVPIILASRADSLRTRLLSCAVATKIAAARKAGKIK

SEQ ID NO: 29564 - protein, 372 aa, Legionella pneumophila str. Lens
MRHSALLIINSGSSSVKFQVFSNTEKLDLLAKGKIINIGEEPSFTAVNETSVHQRTLITLEKDMTYEQAIHLILDWISQQQQNWEIHAVAHRVVHGGEYFTQSVLVTPQIISQLETLNSLAPLHQPHNLAAIKIIGRIKPELPQIACFDTAFHAQHTPLFTTCALPEYLRQQGIRRYGFHGLSYEWISLVLKKDYPDLANNRIIIAHLGNGASLCAINRGISIDTTMSLTALDGLPMGTRCGSLDPGAVIYMMRELNLAPGKVEEILYNESGLLGLSGKTNNVLELQSSPDKNAQFALEYFCLKTAQFIGMMAISLGGVDGIVFTGGIGENSEPIRANILKRLECLHPFSVIVIPANEEKMMAMHTLTALRT

SEQ ID NO: 29565 - protein, 84 aa, Legionella pneumophila str. Lens
MNEVILYTTGYCPYCIKAKELLDRKKVIYTEIRVDLKPELREEMIQKSGRRTVPQIFINGQAIGGCDDLYALEAQGTLNELLKK

SEQ ID NO: 29566 - protein, 388 aa, Legionella pneumophila str. Lens
MNQCEKKNLPKDSATVAINSLAQQKINAGIKIHNLSAGEPKLPPHPSIINAVTQAMEQGHTLYPPIMGIPELRHLGCEWMHRSYDCSFQNEQCLVVNGGKLGIYLLMQLLLQPNDEVIIPSPYWVSYPAMVSLFGGTPVPVETTEAEEWKLTPQALQKACTTKSKILILNNATNPTGALYTQSELIHLLQTAKKHNLLVISDEVYSELTYDGHHYVSCGSLPQFRESVIIIQSCSKNFSMTGWRVGFIFAPEVFIKPLSALVSQSTSGVTTLSQWAAVAALQEVNQVNIWVQQNMEKRRNCLLRTLHDYLGLTITPPISSLYVFLSLKDIGCKNQNSEEFCKQVLDKANVAMVPGIAFGKEGYVRLSFGGNEDDLKSGIYALAQWLHR

SEQ ID NO: 29567 - protein, 341 aa, Legionella pneumophila str. Lens
MKFVDEALIKVEAGKGGNGCLSFRREKFIPRGGPDGGDGGDGGSIYFEASSDLNTLIDFRYTRQYKAENGQSGMGGNCTGKKGEDLTIKVPVGTMVYDADTGELLADISQPGVPMLIAQGGFHGLGNTRYKSSVNRSPRQTTPGSPGESRNLRLELRVLADVGLLGLPNAGKSTLIRAVSSSKAKVADYPFTTLHPGLGVVRVSPYKSFVMADIPGLIEGAAQGAGLGHRFLKHLSRTCVLLHVIDIAPLDGSDPVADAKAILNELTQYNPDLLNKPRWLVLNKIDMLPDAKEREEKIQSIIKGLEWKDKVFSISAIESKGTQELCYALMQLIDEMKKSEA

SEQ ID NO: 29568 - protein, 314 aa, Legionella pneumophila str. Lens
MKPFVYLTNQFLEPIIPMLIPDWNIIHGWKMASGVDQSRVVALATTVWDQIDHSFLMQFPNLKIISHLGIGTDNIDINFLKQNHIILHSQPNAGVHDTAELAIALLLALSRRVILNDRYTRNNEWVEKKPRFLGNHLLGKQLGLVGFGQIGEKIAQFAEPFGLKIAYTARSQKNNPYLYCPTAANLASISDFLIICCSGGIDTQHLINKQVLDNLGTEGYLINVARGSIVDQNALIDALQRHTIAGAALDVYQYEPEVPFALRQLNNVVLSPHMGSSTKENLNQMFQLQAKHLNQYLNEPLWQRESHVTLFEEQ

SEQ ID NO: 29569 - protein, 71 aa, Legionella pneumophila str. Lens
MSVKETGHVKWFNDDKGYGFISRDNGQDDVFVHFRSIVSSAGRKTLLEGQRVEFLVTKGAKGLQAEEVTAI

SEQ ID NO: 29570 - protein, 133 aa, Legionella pneumophila str. Lens
MAYRKMLKSKIHRACVTQADLDYEGSITISPELLKAANILPYEAVNVWNITAGTRFETYAITGEKGSTDICVNGAAAHLVTPGDLVIIASFTQILEEDCAAHEPTVVFVDQFNRLKEIRPERIGVKNKIPCSA

SEQ ID NO: 29571 - protein, 115 aa, Legionella pneumophila str. Lens
MGFLFYKRCIVDTLEKIKKQIAENAIMLYMKGTPKMPQCGFSARAVQCIEACGVDFAYVDILANPDIRQVLPQFSDWPTFPQLYVKGELIGGSDIIAEMFQQGELEPMLRDAVAA

SEQ ID NO: 29572 - protein, 556 aa, Legionella pneumophila str. Lens
MDIRRIVLYMALALIGLSLWNAWQIDYPAKQPVEEKTASQLTSDGHLLPQIIPSNAEQPVTLKAEEKASSGKQLIQVKTDILDVDIDLKNGDIVKGLLLDYPLSVEDKNKPFPLLQNQASQRYVANSSLFVLDGQTPQSLDFDFTSEKEYYELKPDQNQLIVTLNGKSEDGLDVKKEFVFTKGSYLIEVNYKIANIGNSLWKGYFNTQLLRSSPKEDKSSIFHIGSYTGASFSNPGKNRYQKVSFSDMSKSNLDVDAKGGWIAMQQHYFLSAWVPNADSENKFYTLATDKDYTIGAVSQPITVKPKEDKIVGSKLYIGPEITSVLKGISPSLDLTVDYGILWFLSSLLFSLMKAIYTVVGNWGWSIVLVTVLIKLAFYRLSATSYKSMASMRKLQPKLQALRERYGDDKAKISQATMELYKQEKVNPLGGCLPILIQIPVFIALYWVLLESVELRQAPFIFWINDLASADPYHVLPLIMGATMLIQQKLNPAPADPMQAKVMMFLPILFTGLFWNFPSGLVLYWIVNNTLSILQQWYITRKYSDEKPAKKVVATAK

SEQ ID NO: 29573 - protein, 463 aa, Legionella pneumophila str. Paris
MDLFRKKDIKGSLDNESHLAKCLSVFDLTFLGVGAIIGAGIFVLTGIVAATISGPAVIFSYVVAGFACAFAALSYAELAASIGGCGSAYGYAYAGFGELIAWIVGWDLLLEYSIAVSAVSIGWSGYANDFLMALKIFIPTHLLHGPADGGDLNILAILIIAVLTTLLIVGVKSSSRFNNIMVFVKLLVIFIFIAIAFGEVKVENWSSFMPYGWAGVMKGASIIFFAYVGFDAVSTAAEEAINPQRDLPIGIIASLAICTVIYILVSGLLTGIAHYTTLNVSSPISHVLLVLGYKTAAGLVGVGAIAGLTTVMLVLFYGLTRVFLAMSRDGLLPRFLSKTNEHTKTPIRIILLCGILMASLASVTPIGTLAELVNIGTLFAFIVVCGGVLYLRRTHPDMERPFKTPFMPYVPILGIISCFYLILNLPWVTILRFIIWMLVGIAVYFAFSRTNSALSVEGDCAAE

SEQ ID NO: 29574 - protein, 431 aa, Legionella pneumophila str. Paris
MDMDIKHKPLKRELSLFGATMMGLGSIVGTGVFVSIGIAAGVTGPSVILAIALAALVATCNAFSSAQLAANHAVSGGTYEYGYRYLHPAFGFTAGWMFLCAKSASAATAALGFAGYFIHLSGLETVPVIPIALAVSITLILLVLSGLRRTNTVNIIIVMITLITLTVFIISGLPDFMQRGTANLRPFFPVSKQEGLSHFFYATALMFVAYTGYGRIATLAEEVKNPGKFIPAAIIITLMVSAVLYILVGLVAIGAVGVEKLAQVTETNATPLESAAQAIGIPGLSVLVSIGACTAMLGVLLNLILGLSRVALAMGRKGDLPKIFCYVSETRHVPVSSVIGVGVVIIALVLTGSVETTWTFSAFTVLIYYAITNLAALHLPKEEQLYPPLFAIGGLLSCLFLAFWVPIGVWITGISLLVLGLLWKVVANRFL

SEQ ID NO: 29575 - protein, 392 aa, Legionella pneumophila str. Paris
MDIALAKRVQKVKPSPTLAVAAKAAQMKAQGLDIIGLGTGEPDFDTPQHIKLAAISAIEAGDTKYTAVDGIVELKEAVKNKFKRDNELDYQLNQILVSVGGKQSCYNLCQAYLNPGDEVIIPAPYWVSYPDMVLLADGVPVIIETTPAQRYKINAQQLEQAITPKTRMIFLNSPSNPSGIAYTQNELKELGDVLKKHPQILIATDDMYEHIIWSQAFTNILNACPELYDRTIVLNGVSKAYAMTGWRIGYAAGPAPLINAMKTIQSQSTSNPCSIAQRAAVAALNGSNESIEEMVNAFHQRHDYVADRLQSIDGIEVIPADGTFYIFPSVQAIIEKRGYANDIEFSEKLLNEVGVALVPGSAFGTEGCIRISFATGIDTLKDALNRLQRFCS

SEQ ID NO: 29576 - protein, 523 aa, Legionella pneumophila str. Paris
MRRQWYIGFGVILLCLFALFAMLQDIVWFFAFLIPIVILWIYDVLQTKHTILRNFPVLGHVRYFLEFLRPEIQQYFIATDESELPFNRETRSMIYQRAKNVRDTIPFGTERDILSVGYTWALHSLSPKHSSEVEPRIDVGGPDCKKTYNASRLNISAMSFGSLSSNAIMALNKGAKLGGFYHNTGEGGLSPYHLQGGDIVFQIGTAYFGCRDDKGDFDENEFIKEASRDEVKMIEIKLSQGAKPSHGGILPAAKLTEEIAKVRKVPMGKDVLSPIAHTAFDNPVGLLHFVKRLRDLSGGKPIGFKLCLGRRHEFMAICKAMLKTNILPDFITIDGAEGGTGAAPVEYTNFIGTPLEAGLVFVHNALVGTGVRDKIRVICSGKVTNGFDLLTNIALGADICNSARAMMMSIGCIQSKQCNANTCPTGVATQKKRLQYGLVVDEKKFLVANFHNNTIKSFLEMVGALGLNNPSDLKPSHIMRRIGVDEVKSFDQIYTYVKPGQFLQGDIPDDYRVHWEHADPDKF

SEQ ID NO: 29577 - protein, 394 aa, Legionella pneumophila str. Paris
MHLKRTLSLTLLAFYGLGTILGAGIYALVGEVAKEAAQFTPLSFLIASIIALFTAISYAELSSRLPHSAGSALYVRRAFHQKWLSGLIGWIVVLTGIISAATLSHGFVKYFQLFFPLPPSLIITILTVILAGVAIWGIRESATLILFMTLMEVGGLLMIIYYGRYSLASIDIKSFSFPHSFDGVLIGAFIAFYAFIGFEDMVNTAEETINPEKTLPKAIFLALISATILYIAVAWVIVLTIPSNTLVKTDMPLIEIIKLQGQSPLLFSIIALISITNGILVQIIMASRLIYGMANQQNAPQIFSSVYSKTQTPVHSTLLVFLMILLFAYALPITTLAKLTSSIILCIFIIIHASLIKIKLTEKKPTNAISFPIVFPMISILLTLAFLIIQFFLK

SEQ ID NO: 29578 - protein, 403 aa, Legionella pneumophila str. Paris
MFNQSQQKIVCVLYDDPKGGFPPNYARESIPELKQYPDGQSLPAPDSIDFIPGEMLGSVSGELGLRQFLESNGHQLVVTSDKDGSDSVFARELKEATVVISQPFWPAYLTRDRIESAPKLKLAITAGIGSDHVDLQAAMEHNITVCEVTYCNSISVAEHTVMMILALVRDFIPQYNTVIDGGWNIADCVSRSYDLEGMQVGCVAAGRIGLAVLRRLKPFAVKLHYTDRHRLPLHLEQELNLTYHPSVESMVKVCDVVSIHCPLHPETEYLFDDRLIKQMKRGSYLINTARGKICDQRAVADALESGHLAGYAGDVWFPQPPAKNHPWRSMPNHAMTPHTSGTTLSAQARYAAGVREILECWLGNKPIREEYLIVSQGRLAGVGSHSYSAGNTTTGTEQAVELV

SEQ ID NO: 29579 - protein, 405 aa, Legionella pneumophila str. Paris
MKKVIKKIALAYSGGLDTSIMIPWLKEHYEHAEVIAVICDLGQQEDLDAIKNKALKSGASKAYVVDVKNEFAIQYLWPLVKSGALYEDQYILGTISRPLIAQKLVEIALTEEVNAVAHGATGKGNDQVRFEYSIKALAPQLEIIAPWRTWDIKSRQEAIVYAKAHGIEVPVTPKAPYSRDHNIWYISHEGGVLEDPSQEMPDDVLLMTAPVSQTPDEEEVVVLDFKKGVPVALNGQELSPVDLLNSLNQKAGQHGIGVADIVENRLVGMKIRGIYEAPAAAVLYKAHKLLESLCLTRSTLHLKQSLQQTYANLVYEGRWFSQTKQALDAFIDVTQQHVTGCVKLKLFKGNIIPAGMHSPYSLHHPELATFEEDNVYNQKDAEGFINLFSLSAKIYSQVHQGGNYD

SEQ ID NO: 29580 - protein, 315 aa, Legionella pneumophila str. Paris
MSTMMIFTGNANPELALKISSHLQIPIGKATVGTFSDGETMVEILENVRGKDVFVLQSTCAPANNNLMELLIMADALRRSSAGRITAVVPYFGYARQDRRVRSARVPITAKVVADMMASVGICRVLTVDLHADQIQGFFYMPVDNVYSTPVLLEDITKQKLNNIMIVSPDVGGVVRARAVAKRLNDAELSIIDKRRSGPNKSEVMHIIGEPANKNCIIVDDIVDTAGTLCTAAQELKKNGAKSVRAYITHPVLSGPAVNNIKHSGLDEVVVTDTIPLSAEAQNCEKIRVVSLADMLAQAIKRVNVEESVSSMFAE

SEQ ID NO: 29581 - protein, 272 aa, Legionella pneumophila str. Paris
MVKIRPFLKWAGSKYNCLNEIISSLPTGQRLIEPFAGSGVVFMNTSYSSYLLAESNSDLVNIYRILQLNGESFIDYCQQYFTPEANCKEKYYELRSEFNNLMDSNQKSAVFLYLNRHGYNGLCRYNSKGKYNVPFGLYEKPYFPRKEMMLFYKKCLSAQFIHGDFRNTFALAEPGDVIYCDPPYVPLTENNQTLPYNQKLFSLEDQIELAELAQETASKGIPVIISNHDTEFTRHHYKKAQIKSFYVPRWISCRSQMRLPVKELVAVFNCPS

SEQ ID NO: 29582 - protein, 373 aa, Legionella pneumophila str. Paris
MLVGVPKEIKSHENRVGLVPSSVREIIRAGSEVLVEKGAGLGIGISDDDYRNAGAEVVDTADDVFANAELIVKVKEPQPIECKRLREGQTLFTYLHLAPDPHQARLLKESGVTAIAYETVTQDDGGLPLLTPMSQVAGRMAIQAGAHCLEMAQGGSGILLGGVPGVAAANVVVIGGGVVGTNAVRMAMGMEARVIVLDRSLQRLNELDFQFGSKLNTVYSTADSIEKYVSSADLVIGAVLVPGAAAPKLVTRSMLSSMRPGSVLVDVAIDQGGCFETSRATTHQEPTYVVDGVVHYCVANMPGAVPRTSTFALNNATLPFILSIVSKGVKLALLSDPHLLNGLNVHQGKITYEAVARDLGYEYTPAAAALSGR

SEQ ID NO: 29583 - protein, 311 aa, Legionella pneumophila str. Paris
MTWLLECFKNKQESRLMSSYCGYIALVGRPNVGKSTLLNRILQQKLSITSRKPQTTRHSILGIRTEGEFQFVYVDTPGIHQGNAKAINRMMNKTAISVLRDVDVIAFLVDGTHWKDEDEYVLNLIKQAKVPCILVVNKVDKITDKTQLLPWIEQISQRYQFAAIIPLSAKTGLQVDELEGKLKTYLPEGPHLFPDDQFTDRSIKFLCAELLREKIFRFCGQELPYSVTVDIESFKDEGNLIRIHALILVDKDNHKRMIIGDKGQKLKEMATNARLDMEKMLDKKVFLQCWCKVKSGWSDDERILKQLGYDQ

SEQ ID NO: 29584 - protein, 559 aa, Legionella pneumophila str. Paris
MCSIGEYLAKRLEELNISEYFAIPGDYNLILLDEVLKNEKLKMINCCNELNAGYAADGYARVKGVSALFVTYSVGGLSTVNAVAGAYAENLPILVISGGPNTNSIQDAEILHHTLATEDNLYVRDIFSRITAHVVCIRKPEQAAMQIDEAIAIAIAKKKPVYIEIACNIANYPISKPTQRAFNTYKISDSSSLAAAVEHAAEKLNSALKPSLIVGSKVRHCNAINSVSELAKCTGYAMAAMPDAKGFISEQHPNFIGIYWGPVSSSGCAEIIDSSDAYLLIGPNENDYTTVGYVWGINPHKSIKTTKGGVIIGETVYTNIFMNDFLRELSKKLKFNDASYKAYKRIAEETVVYPELDQPDAPLSSRYLFGQIQKMLSDKKALLAETGDSWFNCMRLSLPEGCPFEIQMQYGSIGWSVGALLGMQAALHNQKRVIACIGDGSFQMTAQEISTMIRYGYKPIIFLMNNACYTIEVQIHDGPYNVINNWRYAELVNVFRGEQSNAKSFVVKTNKELLTAIKQAEKTDALCFIEVFLDKDDCNKNLLEWGSRVANYNSRPPRR

SEQ ID NO: 29585 - protein, 352 aa, Legionella pneumophila str. Paris
MKKILFIDRDGTLVEEPFDFQVDSLDKIKLTSGVIPALLQLQKAGFTFIMVSNQNGIGTVAFPEEDFAVCHEFILDLFSSQGILFDEIFICPHTPEDNCICRKPKTGLLEPYLKETAFAKHYSWVIGDRDTDKEFADNLGVNFLPISKTHTWEMVVSAIINDARKASVQRKTKETAIDLSVQLDSDQTSVIDTPIPFFTHMLEQVAKHGGFDLRLQASGDLEVDEHHLIEDTAIALGEAIRTALGDKWGINRYGYTLPMDESLACVAIDISGRSFCDFKGQFTREFVGGMATEMVPHFFQSLSSALGATIHIEVTGTNHHHMIEACFKVLGRALRQACSRTNNYLPSTKGVL

SEQ ID NO: 29586 - protein, 77 aa, Legionella pneumophila str. Paris
MSQRETGHVKWFNEKKGFGFIVNQKGEDIFVHYKDIQGVGFKTLHENDPVTFELDRGPKGLKAQNVVVASESVHTEE

SEQ ID NO: 29587 - protein, 551 aa, Legionella pneumophila str. Paris
MTEQTEKRAHFIRQLIIDDLANGKHQGIVTRFPPEPNGYLHVGHAKSICLNFGLAEEFKGKCFLRFDDTNPIKEEEEYVNAIIDDVRWLGFEWCAMTHSSDYYHELYELAIYLIKKDMAYVDSLSMEEIRAFRGTLQEPGRESPYRNRTIEENLDLFARMKAGEFPDGTHVLRAKIDMKSGNLNMRDPVLYRIRHARHQRTGDEWCIYPMYDYAHPISDALEKITHSLCTLEFQDHRPLYDWLVDNLPLPAKPVQTEFARLNLSHTVTSKRKLRELVEKKIVTGWDDPRLPTLRGMRKRGYPPAAIRQFCEIIGISRSDSVIDMSLLEECVRAEFNKTAKRALCVMDPLKVVIVNYPENKVEQLQAAFYPQNPESESRSLPFSREIYIEKSDFMENPPNKYFRLSPGAEVRLRHAYVIKCQEVIRNDQGEITELHCTYDENTLGKNPEDRKVKGVIHWVSSSHAYPVTIYQYDRLFTDPNPAREDDYFQFLNHNSLQTLQGFCEPAMAEQAEGDVFQFERLGYYCVNSVAEGCVQAFHRVVDLKDTWGKVS

SEQ ID NO: 29588 - protein, 187 aa, Legionella pneumophila str. Paris
MTPIGKMNIVNVSQKLLQLSMESNNTQQSIKTHSSVIVLYDLSKDSLILTKRSQMLNKHPGEVCFPGGFQEINDQDLYSTALRELNEELGVTSDRITLIRKLNIEKTLLGLVIHPWYASIDSIFPYTMNPQEVSKLILVPMPLVKNQKNYKEIRIEKEGKHFVTCQFIANEELIWGATARIMRQLAS

SEQ ID NO: 29589 - protein, 387 aa, Legionella pneumophila str. Paris
MAIKPIYFDYMATTPVDPRVVEQMIKYLGPEGDFGNPASATHEYGRAASMAVEQARSQIAETINASPQEIVFTSGATEADNLAILGAARFYKNKGMHLVTMSTEHKAVLDSFHQLEKEGFQVTYLHPESDGLLDLGKLESALRPDTILVSVMHVNNEIGVIQDIASIGELLRNRGIIFHVDAAQSAGKLPIDLSQLSVDLMSFSAHKNYGPKGVGALYVRHKPRIRLQPLSYGGGHEGGLRSGTLPTHQIVGMGEAFAIAETDRIPEQTRILNLRKQLWDGIRHLPAIKLNGHEHRRIAGNLNVSFVGLNGDSLLFALSELAISTTSACSSASIQPSYVLRAIGLTDTEAQSTIRLSIGRFTSEVQIKKAIDIICRQVSRLHELSPL

SEQ ID NO: 29590 - protein, 859 aa, Legionella pneumophila str. Paris
MSGILIMQQVVIKFGGTSVSSRATWNNIAAITQKHLNTGVQPVIVCSALTQISNKLEKAIEAALLDEHHSLFNDIQSSHLNLAEQLEVNHQLIANDLHQLQQWLTGISLLKQAPAKTHAQILSLGELMMTRLGHAFLEKQGIKVKWYDARELLTSTPTLGGETMNYLSARCESEYDPALVEKFLSTGAQAIITQGFFAANPHGETVLLGRGGSDTSAALLAGKLQAASCEIWTDVPGIYTANPHQLPHARLLKQLNYDEAQEIASMGAKVLHPNCIPPVRKANIPMVVKYTHLPEHSGTLITKDIDESAPLIKSIQVKHSILLISIDTLNMWQQVGFLADVFAAFKKHGFSVDLLSSSEFNVTLSLDVNAKIHDRPAINALLDDLNQFGRAKLIEPCSAVSLVGHHIRTVLPHLGPALEVFEAKQVYLMSLASNDLNLTFVVDESHADKLCQRLHHLLIESNPQIFYYSKSWHEEFGKPNVRPTPWWEIERDRLLTTSAIHSPCYVYHSPTQATRARQLSALESIDSLFYAIKANPFPSILKTLEKEGIGFECVSIQELELVLKLFPNIKKERILFTPNFAPKSEYEFALQTGCYVTIDSLYPLENWPKLFKDREVIVRIDPGTGAGHHKHVSTGGNESKFGITQNDISKILSHTKANHIKVIGLHAHSGSGILSTDLWQQTAVMLASLTDQFPEVRSINLGGGLGIVEKPGQHPIDFAALDAQLMAVKSQYPGLAIWLEPGRFFVAESGVILAKVTQCKEKGKVKFIGIETGMNSLIRPSLYGAYHEIINLTRLHEEKAGFAHIVGPICESGDTLGYDRLLPVTREGDVILIANTGAYGHCMSSHYNLRPPAQEIVLE

SEQ ID NO: 29591 - protein, 588 aa, Legionella pneumophila str. Paris
MKNNLPIKSRLLYKRLLSYVKPFWPVLLLGVLANILYSGIDAGFTYMTKLFLDKSFITIDLDFVKQIPLIVLIGITLRGLVSSLGSYCMTWVARSVVKVLRQTVFSHIIHLPADYYDEATSGQLLSKILYDVEQVAQVSADALTDFIQNICLVIGLLTVMMVICWQLSLMFLLTIPFVGIIVNYTNKRVRRISHKVQKTMGEVTEIASEAIEGYRVVRIFGGERYEITKFNKATEYSRKNDMKVAISKAINVSGVQLVIAIGIAMIIMAAIHLSTVITISAGSFLAIIAAMLQLIKPMKTLTTLNATIQRGLAGAESVFNLLDLPLERNNGLILKEKVRGEIEFKHVYHAYRQSQNILHDVNFVIEAGTSVALVGHSGSGKTTIASLLPRFYELSQGMITLDGMPIQQLSLESLRKQISLVSQNVTLFNDTLANNIAYGRFDASREQIITAAKLAYADEFIKQLPDGYDTRVGENGVLLSGGQRQRIAIARAILKDAPILILDEATSALDSESEHYIQAALEQVMKGRTTLIIAHRLSTIKHAHKIIVLQHGRIVEQGSHQELLDMDGHYAQLYKVQQFGRINEEVVV

SEQ ID NO: 29592 - protein, 176 aa, Legionella pneumophila str. Paris
MNRIILLDRDGVINTDSINYIKNVDELIIIPDSITAIARLSAAGYKIGVATNQSGVSRGLYSEDDLSAIHCKLREVLAEAGGQIDALEYCIHLPEDNCFCRKPQPGMLKALAEKLNCSLDSVPFVGDRVSDIQAALAVGAQPIIVLSNMTDMSELAQYPKVPIYNSLLQYVNQLLL

SEQ ID NO: 29593 - protein, 644 aa, Legionella pneumophila str. Paris
MAKIIGIDLGTTNSCVAVMEGDKPKVIENSEGHRTTPSIVAFTDDNEILVGQSAKRQSVTNPEKTLFAIKRLIGRRFDDPIVQKDIKMVPYKIMKADNGDAWVRVKDQDKAPPQISAEVLRKMKKTAEDYLGEEVKEAVITVPAYFNDSQRQATKDAGRIAGLEVKRIINEPTAAALAYGMDKKRGDSVIAVYDLGGGTFDISIIEIAEVDGEHQFEVLATNGDTFLGGEDFDLALIEYLASEFKKDTGIDLHNDPLALQRLKEAAEKAKIELSSAQQTDVNLPYITADASGPKHLNIKLTRAKLESLVEKLVERTIEPCKTALKDAGLTVSQINEVILVGGQTRMPLVQKTVEEFFGKEPRKDVNPDEAVAVGAAIQAAVLSGEVKDILLLDVTPLSLGIETMGGVMTKLIEKNTTIPTKATQVFSTADDNQTAVTVHVLQGEREQASANKSLGRFDLRDIPPAPRGVPQIEVTFDIDANGILNVSAKDKATGKAQSIVIKASSGLSEEEVAAMVKDAQSHAEEDKKFKEMAELRNQADSLIHSCEKSMKDLADELSEDEKKGIETAISELKEAVQGTDKTRIEDKLKVLTDASAKMAERIYAKKSSEGQAAQGQTQSQESTKPVEEGVVDAEFEEVKEEDKK

SEQ ID NO: 29594 - protein, 468 aa, Legionella pneumophila str. Paris
MNNEFLENVTYEELTIGRKASLNRTLTQDDINLFAAMSGDINPSHVDPQFAKSDVFHGVVGHGMWSGALISTLLGTALPGPGTIYLEQDIQFITPVRIGDNLTITIVVRDKHPGKSIVHFDCMGVNQKGETVIKGLAKVIAPTKKMKVPRTVLPLVQIHHNDHFNKIIEACSNLPSIKTAVVHPVTANVLEAVYDSVKAGLITPVLIGPMAKIKCAASEAKIDLSNWEMIDTEHSDAAAFKAVELAASGKVDSIMKGALHTDELMSAVVPATSGLRTKYRISHAYVMDVPTYHKPLIITDAAINIAPNAADKADICQNAINLWRILYGEEIKPKVAILAAVEMVNPKMQATVDAAVLCKMADRAQIVDGILDGPLAFDNAINKQASKEKNIISPVAGDADILLVPDIESGNMLAKQLTFLGHADAAGIVLGARVPIILASRADSLRTRLLSCAVATKIAAARKAGKIK

SEQ ID NO: 29595 - protein, 372 aa, Legionella pneumophila str. Paris
MRHSALLIINSGSSSVKFQVFSNTENLDLLAKGKIINIGGEPSFTAVNETSKHQRTLITLEKGMTYEQAIHLILDWISQQQQNWEIHAVAHRVVHGGEYFTQSVLVTPQIISQLETLNSLAPLHQPHNLAAIKIIKKIKPELPQIACFDTAFHAQHTPLFTTCALPEYLRQQGIRRYGFHGLSYEWISLVLKKDYHDLANNRIIIAHLGNGASLCAMDKGVSIDTTMSLTALDGLPMGTRCGSLDPGAVIYMMRELNLPPDKLEEILYNDSGLLGLSGKTNNVLELQSSPDKNAQFALEYFCLKTAQFIGMMTISLGGVDGIVFTGGIGENSESIRANILKRIECLHPFSVIVIPANEEKMMAMHTLTALRT

SEQ ID NO: 29596 - protein, 69 aa, Legionella pneumophila str. Paris
MANKIRGKVKWFNKDKGFGFIESSGKDYFVHFSSIQSGGFKTLPDGATVLFKMGKGQKGPQAEEVEVIK

SEQ ID NO: 29597 - protein, 627 aa, Legionella pneumophila str. Paris
MLFQYIKKFFLFLWVQAVSISFLLAMASVSFAQLTAQDHAAHHQGEKESEGMGGMMKNIGTPSKELYPSLMNLPTLSPEKRLAIQQKAHQRITSGMALMKGGLNELLLASNNNDYAKMQEALEKLREGIAQYESALAALRALSEGKNPRDIALQWFKREMNLLPSTPQAKNVLGGPFFHLTIIALFGLFFLVMIWMYFFKMRRAAALLDRLTKQNATVSSETPPQFSKAPEPTPSLTSVEPIKSSQVSKVPSEIAPTTPPTCPAHKCPVPQFPVMRSLTEPEEKWEGQLRVCRIFQEAPGIKTFHLASTHEVALPFTYYPGQFITLTALINGKTVRRSYTMASTPTQLHYCAITVKREEQGVFSRYLHDEIKEGDLLEVMGPNGKFTFTGEEAKSIVLICGGVGITPMMSIIRYLTDIGWHNDIYLLYCCRTTSEFLFREELEQLQERYLNLHVYASMLRSEGTVWMGLQGLFTKNIISHLVPDIASHRIHVCGPPAMMEAILASLKELNVPADLILTEAFGPEKKPEIAQEELEAIKAETRAMISFRKSEKMVPILPDRTLLEIAEANGVTIDNACRTGQCGLCKVKLLSGEVTMACEDALSKEDKQQGLILACQAKATQNIEVDA

SEQ ID NO: 29598 - protein, 388 aa, Legionella pneumophila str. Paris
MNHYEKMSLLKDSATVAINSLAQQKIHAGIKIHNLSAGEPKLPPHPSIINAVTQAMEQGHTLYPPIMGIPELRHMGCEWMYRSYDCSFQNEQCLIVNGGKLGIYLLMQLLLQPKDEVIIPSPYWVSYPAMVSLFGGTPVPVETTEAEEWKLTPQALQKACTTKSKILILNNATNPTGALYTQSELIHLLQIAKKHNLLVISDEVYSELTYDGHHYVSCGSLPQFRERVIIIQSCSKNFSMTGWRVGFIFAPEIFIKPLSALVSQSTSGVATLSQWAAVAALQEINQVNIWVQQNMEKRRNCLLRTLHDYLGLTITPPISSLYVFLSLKDIGCKNQNSEEFCKQALDKANVAMVPGIAFGKEGYVRLSFGGNEDDLKSGIYALAQWLHR

SEQ ID NO: 29599 - protein, 341 aa, Legionella pneumophila str. Paris
MKFVDEALIKVEAGKGGNGCLSFRREKFIPRGGPDGGDGGDGGSIYFEASSDLNTLIDFRYTRQYKAENGQSGMGGNCTGKKGEDLTIKVPVGTMVYDADTGELLADISQPGVPVLIAQGGFHGLGNTRYKSSVNRSPRQTTPGSPGESRNLRLELRVLADVGLLGLPNAGKSTLIRAVSSSKAKVADYPFTTLHPGLGVVRVSPYKSFVMADIPGLIEGAAQGAGLGHRFLKHLSRTCVLLHVIDIAPLDGSDPVADAKAILNELTQYNPDLLNKPRWLVLNKIDMLPDEKEREEKIQSIIKGLKWKDKVFSISAIESKGTQELCYALMQLIDEMKESEA

SEQ ID NO: 29600 - protein, 314 aa, Legionella pneumophila str. Paris
MKPFVYLTNQFLEPIIPMLIPDWNIIHGWKMASGVDQSRVVALATTVWDQIDHSFLMQFPNLKIISHLGIGTDNIDINFLKQNHIILHSQPNAGVHDTAELAIALLLALSRRVILNDRYTRNNEWVEKKPRFLGNHLLGKQLGLVGFGQIGEKIAQFAEPFGLKIAYTARSQKNSPYLYCPTAANLASISDFLIICCSGGIDTQHLINKQVLDNLGTEGYLINVARGSIVDQNALIDALQRHTIAGAALDVYQYEPEVPLALRQLDNVVLSPHMGSSTKENLNQMFQLQAKHLNQYLNEPLWQRESHLTLFEEQ

SEQ ID NO: 29601 - protein, 71 aa, Legionella pneumophila str. Paris
MSVKETGHVKWFNDDKGYGFISRDNGQDDVFVHFRSIVSSAGRKTLVEGQRVEFLVTKGAKGLQAEEVTAI

SEQ ID NO: 29602 - protein, 133 aa, Legionella pneumophila str. Paris
MAYRKMLKSKIHRACVTQADLDYEGSITISPELLKVANILPYEAVNVWNITAGTRFETYAITGEKGSTDICVNGAAAHLVTPGDLVIIASFTQILEEDCAAHEPTVVFVDQFNRLKEIRPERIGVKSRIPYPA

SEQ ID NO: 29603 - protein, 556 aa, Legionella pneumophila str. Paris
MDIRRIVLYMALALIGLSLWNAWQIDYPAKQPVEEKTASQLTSDGHLLPQIIPSNAEQPITLKAEEKASSSKQLIQVKTDVLDVDIDLKNGDIVKGLLLDYPLSVEDKNKPFPLLQNQASQRYVANSSLFILDGQTPQSLDFDFTSEKEYYELKSDQNQLIVTLNGKSEDGLDVKKEFVFTKGSYLIEVNYKIANTGNSLWKGYFNTQLLRSSPKEDKSSIFHIGSYTGASFSNPGKNRYQKVSFSDMSKSNLDVDAKGGWIAMQQHYFLSAWVPNADSENKFYTLATDKDYTIGAVSQPITVKPKEDKIVGSKLYIGPEITSVLKGISPSLDLTVDYGILWFLSSLLFSLMKAIYTVVGNWGWSIVLVTVLIKLAFYRLSATSYKSMASMRKLQPKLQALRERYGDDKAKISQATMELYKQEKVNPLGGCLPILIQIPVFIALYWVLLESVELRQAPFIFWINDLASADPYHVLPLIMGATMLIQQKLNPAPADPMQAKVMMFLPILFTGLFWNFPSGLVLYWIVNNTLSILQQWYITRKYSDEKPAKKVVATAK

SEQ ID NO: 29604 - protein, 79 aa, Photobacterium profundum SS9
MNLNIKGHYMSNTTTGLVKWFNEDKGFGFITQDNGGADVFVHFRAIASEGFKTLAEGQKVSFEVEQGQKGPQAANVVAL

SEQ ID NO: 29605 - protein, 416 aa, Photobacterium profundum SS9
MTCVWTAFCPVYLFSDEITMSNSLVLVINSGSSSLKFALIDTVSGEATLNGIGECFGLADANVSWKIDGKKHEFQLSDNGNHHKQAIDRIVALLEEQGIKQDIVAVGHRVVHGGEKFTQTVKIDETVLQEIENLSDLAPLHNPAHVVGMRAAIAAFPALSQYAVFDTAFHQTMPAKAFTGAISSKLYDDYGIRRYGFHGTSHYFVSREAAKVINKPIEKSSFISVHLGNGASVCAIKDGQSVDTSMGFTPLSGLMMGTRCGDLDPGIIEFLLKKGWSTEQVFKELNSNSGFLGVSGLTSDCRGVIEAMEEGHAGATLAFEIFTYRVAKYIASYMVALDELDGIIFTGGIGENSLPIRRQILKSLKIFGYREDEVANADARFGKGGVITQANTPIAMVIPTNEEWVIAKESMALLHA

SEQ ID NO: 29606 - protein, 611 aa, Photobacterium profundum SS9
MSKPTLLTSPTLSQINVFPVKSIAGLSQSQVWVEKQGISFDRRFMVAKKDGSMITARKHPEMVKVMATIQSHGITLSYPGRMPLILKYADFLMEDTNAEVWGDEFSAYTTTIKADIWFSLLLGQEVQLLYTGEQSNRLRPKINQNVSFADGFPLLVISEASLEALNARSSQRSTMDQFRTNLVVSGTEAFAEDSWKRIRIGEVEFLSVKPCSRCILTTVNPKTAEFNALKEPLATMSKFRADASGDVYFGQNLVALNEGKIKAGDIIEVLETKPKEVYADNSELNLTLTCVEREDIAQDFCTFWLEPTKEQTLPTYQPGQHLPLQLEINGEYISRRYTLSSSPSRPGRYAISVKRVNDGRVSNWLHDHLAVGDTLVAEKPDGTFHLGAHTDKLLLLSAGSGITPMLSMLRYLADHNQVHDVVFYHQCSTQNDIPCLDELELLQEAHPHLTVHVVLSRKDKAWKGLSGRLSAELLSHIPTLAERQVFVCGPDAFMKEAKSLLLAKALPESQYHQEAFGPIQIETGEEKSVTISIDGNIFEGNNQQTVLEQAENAGLKMANSCRAGLCGACKVTLASGEVEQPDVPALFSGEKEEGKVLACCCIPKTDIELVS

SEQ ID NO: 29607 - protein, 405 aa, Photobacterium profundum SS9
MTFVDNISHAVETLVQSSDTLFILLGAIMVLAMHAGFAFLEVGTVRQKNQVNALVKIIADFGFSAIAYFFIGYWVAYDVTFFSSAEQLSAINGYELVKFFFLMTFAAAIPAIISGGVAERARFYPMLVASFFIVAFVYPFFEGIMWNGNYGFQNWLTETFGFGFHDFAGSVVVHAVGGWIALVAVAMLGIRNGRYRGGRLIAFAPSNIPFLALGAWILTIGWFGFNVMSAQTMGSISGLVAVNTLMAMVGGILTSLFVGKNDPGFIHNGPLAGLVAVCAGSDLMHPIGALVTGAIAGALFVWLFTYIQNRLHLDDVLGVWPLHGVCGAWGGIAAGIFGSEAFGGLGGVSLASQVIGTLAGIAIAVIGAFIVYGIIKKTVGLRLTDEDEYKGADLAIHKIGSVSDD

SEQ ID NO: 29608 - protein, 623 aa, Photobacterium profundum SS9
MLESVTEFRQLDLADTLLSALDSMGFVSPTPIQAASIPLLLTGVDALGKAQTGTGKTAAFSLPVLNKVDLSQHKPQAIVMAPTRELAIQVAAEIKVLGQNIKGLKVLEIYGGASIVDQMRALKNGAHIVVGTPGRVKDLISRDRLHLDEVSTFVLDEADEMLKMGFVDDVTWIMEQAPASAQRVLFSATMPPIVKQIVDRFLRNPERIDVAGENRTVSQVSQQFWIVKGVEKDEAMIRMLETEENIDASIVFVRTRQDTERLADWLSARGCKAAALHGDIPQSLRERTVDHIKRGVIDVLVATDVVARGLDIQRITHVFNYDIPFDVESYIHRIGRTGRAGRSGKAILLVRTNQIRMLRTIERVTKSRMEEIQLPNRDAVAAARLTRLGQELESQKEQATLEAFVELVGKLQETIDVDATTLAAMLLQRQQGNRPLFYKGPDPMIAAIDREQQRRERRGNDDRGTRNERGGERRSNNSADWDTYQLQVGREQGIQVKDIVGAIANELGLSKEFIGAIKLAPSHTFVQLPKKMSAEVSAQLKKLRIRQNDVKAVVVEGEVLREHRPRNSGSRDGGRGGYRGNRDSNGGERRFDRNRGSDNRGGNRGSANSDRPRRPSGERSNNA

SEQ ID NO: 29609 - protein, 518 aa, Photobacterium profundum SS9
MQIGVPKEIFANETRVAATPKTVEQLLNMGFSVAIEQNAGVLASFGDAAFEAAGATIVSTEDVWQSDLILKVNAPQVNDETGVDEFDLIKEGASIACFIWPAQNKELLDKLSTKNINVMAMDSVPRISRAQALDALSSMANIAGYRAVVEAAHEFGRFFTGQITAAGKVPPAKVLVAGAGVAGLAAIGAAGSLGAIVRSFDVRPEVKEQVESMGASFLEVDFKEDTSTGDGYAKEMSDDFNKAAERLYAEQAKDVDIIITTALIPGRPAPKLITKEMVDSMKSGSVIVDLAAANGGNCVYTEANKVITTPNGVKVIGYTDMVGRLPTQSSQLYGTNLVNLLKLLCKEKDGNINIDFEDEVLRGLTVIKEGEITWPAPAIKVSAAPQQPAAEIKPKVVVKKAPMSPVKKYGLMAAGIAAFGWIANYAPAEFLAHLTVFVLACVVGYYVVWNVSHALHTPLMSVTNAISGIIIVGAVLQVSQGSSLVTVLAFIAVLIASINIFGGFTVTKRMLEMFRKDK

SEQ ID NO: 29610 - protein, 534 aa, Photobacterium profundum SS9
MGFKSKKYSIDSTDYQVGQDNISKWGMDVHNTVFVASLGLSILFIVTLLALPPADAKAAIDSIKGAVLSNFDFLFMWGANILLIFAIIIAFSPLGKIRLGGEGATPDYSKASWISMLFAAGMGIGLIFWGVAEPTAFFTNWFGTPLNVEPFTEAGRELALGATVFHWGLHAWAIYGMTALCLAYFVYNKGLPLSMRSVFYPLLGDRVWGKTGDVIDILTVLVTLFGLATSLGLGGTQAASGISHVFGMENNIYLQQSIIVLIMGLAIISVLRGMDGGVKFLSNLNMVIAFIFLGLIAVLNFTTVLDSLVTAVTGYVKNIIPLSQTSGRDDTTWLHGWTVFYWAWWVAYAPFFGMFVARISRGRTVREFLLCVMLIPTMVTTAWMSIFGGVAIQQVIDKVGKLGVDQGITDVSLSLFHMLDAYPFGDILSFIAVALIIVFFVTTLDSGSIVIDGMTAGGKLEVPVKQKVVWAVISGVIAMVMLWIGGTQSIQALQSITIIAAMPFTIILLLGSVSLFKGLLTEVNKPQVSTNQVK

SEQ ID NO: 29611 - protein, 415 aa, Photobacterium profundum SS9
MEKTIWIVSAKRTPLGSFQGKLKAFSAPQLGQFAIKAALDAVPISPDCINEVFMGCVLTAGCGQAPARQAALGAGLSYSVGCTTINKVCGSGMKSVMLAHDLIKAGSIGCAVAGGMESMSNAPYLLKESRNGMRIGHKTTYDHMFLDGLQDAYEGDLMGVYAQHIADRLNYTREQMDEWATMSVQRSLDAQTQQLFTDEIVPISLSTKGAAAPEDGTNTHNSKTLDYDEHPREVDLQKIPKLTPVFAMHGTVTAANSSAISDGAAALVVMNAEIAQQQGLEPLAIIRGHTTHARKPAEFTLAPVYAIEQLLSKLDWSIDEVDLWEINEAFAVVTQIAVRQLGLDIDKVNIKGGACALGHPIGASGARILVTLIHSLRQIQALDTEHEPNKKVMRGVASLCIGGGEATAMGIEIPL

SEQ ID NO: 29612 - protein, 311 aa, Photobacterium profundum SS9
MAYLPITLFSIVMGLIGLGIAWKECFQTSSVAQTLSLAIGIVASALFIILLGAYGWKIFRHASDVRAELHHPVRLNFFPTISVNMLLLSVFWQSIPILAITLWTAGMLLQLVLTIYVMSSWLNHNHFTIEHVNPSWFIPMVGNIVVPINGMYLGYVEISWFFFSVGLIFWLVLLTIVMYRLLFHEQLPLHLTPTYFILLAPPSIGFVSYTGLIGGLDNAARLLYYCALFLMMLLGSNAIRFWRVPFFISSWAFSFPLAALSIATIKMAELSQQSCLIWLARLLVTLLSVIVSWLVFRTVQAARQGKICIPE

SEQ ID NO: 29613 - protein, 305 aa, Photobacterium profundum SS9
MLAITIGYMILQNLTGISVAKLFGLDSAVGLLGGSVSLIGGHGTAIAWAPRIGEEFGISNAMEIGIASATFGLILASLMGGPIAKFLITRYQLKPNKDEQLDIGISNTEGNEQITGFDFLDAIFAIHICAIVGFILNEAISELGLQLPLFVTCLFAGIVITNLIPKSLPRISGTKWPSRKPAIALIADISLGTFLAMSLMSMQLWTLVDLAGPIFAILSAQFIVAVLVNLFIVFPAMGKTYDAAVVCSGFGGISLGSTPTAMANMSAVSQRYGNSHQAFIIVPLVCAFFIDLANALIIPYFLANF

SEQ ID NO: 29614 - protein, 269 aa, Photobacterium profundum SS9
MKKLLAACLAVMTLMMGTNALAAEKSTLIDIKERGTLRVGLSTFVPWAMRDKQGELVGFEVDVARRLAKDAGLKVEFIPTAWDGIIPALLAGKFDVIIGGLSITPQRNMSVLFTSPYAHSGVQLAANKEKSADKLAIADYNKRSVTLSVRRGAFTVETAKKYFPKAKLRQFDDDAQAFQEVLNGNAHAVLASSPKPEQMAIQYNEKLFIPLTDRLSRGSEAFAIRHGEFDLLNFFNNWILLRTEDGWLKERHDYWFTTLDWQNQISEGQ

SEQ ID NO: 29615 - protein, 603 aa, Photobacterium profundum SS9
MQAQPSSNETINIKSAQPNEKVKKLSILFELVKFVRPYKGRVAAALVALIFTASLTLSIGHGIRILVDEGFIQQSIHDLGSAIQFILAITVLISIGTFFRFYLVSSVGERVSADIRLAVFNHVITLHPSFFETNGSGDIMSRITTDTTLLQSIIGSSFSMAMRSALMCVGAIIMLFATNIKLALIVLASVPFILVPILVYGRRVRALSRKSQDSMADVGSYAGEAIEHIKTVQSYSHEAQERESFSNEVEKAFEIGRQRVKQRAILISGVIVIVFSAIAGMLWVGGSDVINGTMSAGDLGAFVFYAIIVASSLATISEVLGELQRAAGATERLIEILQVESHIVAPSQNIISPQALSAEVAFDDVTFHYPSRPDQAAAEHLTLKAEEGKVLALVGPSGAGKTTLFELLQRFYDPQLGKVTLGGVDIRLFDPHELRKQMALVPQQPALFSHDVFHNIRYGNPQATDEQVIEAAKKAHAHEFIMNLPEGYNSFLGERGVRLSGGQRQRIAIARAILKDPNILLLDEATSALDSESEHHVQQALKELMRGRTTLIIAHRLSTIQHADQIAVLDQGRLVDVGDHQSLLKSCDLYQRLVELQFKRMSS

SEQ ID NO: 29616 - protein, 495 aa, Photobacterium profundum SS9
MFKNPILLLSLSLTGGIALWGIADTAGLAEFSSTVVGIMFNSRGWFIMLTACLLVYLCIWLAFSKYGSIRLGKDDDRPEFSTVSWLTMLFAAGMGVGLLYFGSAEPLFHYKSFLPNMSQPDAAQNALFATNFHWGFHAWAIYATVGLIIAYFSFRKGTPNLISAPIRHVFGDRGWPKWVGGFSDLMAITAIAIGVGGSIAIGVFQVQAGVESLFGLEKSGMTISLVIFGMLIIAYLGPLTVDLGKEMAVLSNTAMAIAGCLMFFVILAGPTHYIMGGIMGGAGEYFSRVLTQGFHTLTFYDEVAGNWFQSWTLTYMVWWLAWSPFVGVFIARISKGRTIKEFILGVVLVPSIFSIFWFGVFGSVGFYGVLETDVAILDVIDNHIDSTTFFVLDKLPFSDLTIGATVIAAFLFVVTSVVSAAFVLSMFSSGGDLNPSTKTKLVWGVILGALGLVMIFSNSIAAVKSIIALGALPFVYIVLLIAVCFIKELRKETFK

SEQ ID NO: 29617 - protein, 364 aa, Photobacterium profundum SS9
MAQGNIPVEAIDEVVVGNVIGAGQGMGPGRQAAIFAGIPNEVPAYSLNMVCGSGMKAVMDAAAHIKAGDAELVVAAGAECMSQIPFCASSKIRDGQKMGNLELTDLLIADGLTDAFNDYHMGVTAENVVAKVGLNREQQDNFALASQQKAITAIEQGKFVDEIVPVEVKSRRETKVIDTDEYPKSDASFEGLAKLRPAFKKEGSVTAGNASGINDGGSAIIVASEAAVEKYGLTPLAEIESYAQAGVAPELMGLGPVPAVIKALTKADLNIESVGLFEFNEAFAGQALGVLHEVAKELDTSVEDLAERSNVNGGAIALGHPLGASGNRIIVSLLHEMRRRNTEYGLATLCIGGGMGTAIVLKSV

SEQ ID NO: 29618 - protein, 451 aa, Photobacterium profundum SS9
MQIMSSSKTPSSTLSASALKPLKLNSSGLGQSTKPSSPKLSTPKLSFSLGGDSQNTAKSDTTTKTTFAKSLFAKPKFAAFSIGEPTANVIKKPAPWSPSTTALILVKREVETHDSMSFTFAAADEALFDFKPGQFVTLAAKIDNKTHYRAYSISSVPQQKQLRLTIKRVPDGLVSNWLADNLNIGDSLSALNIAGQFNSSDCKHKSKLLLISAGCGITPVMSIAKTLLAHDSDTDIEFLHCARDKDNVIFHDEMKKLLAQHRNFNVQLLLENSDGFASFSADKNTDSCALSHQTGMVSSGVIQQLYPDLKERTIFLCGPVGFMKAVENIAQESDFDMANFFQESFTPAANNEQQDHISSDASTASVMLHVPDFSVEKEVVQGSSLLEVLENNGVPIIGACRAGVCGSCKCKVTKGSVKSTSTETLTAEEIEQGFVLACSSTVEEDVAVALS

SEQ ID NO: 29619 - protein, 498 aa, Photobacterium profundum SS9
MIENSFAITGTFIVYLIAMMAIGYIAYKRTSNSSDYFLGGRSLGPWPAALSAGASDMSGWLLLGLPGYAYAAGIESLWLAGGLLLGTWLNWLICAKRLRTYSITADNSLTLPEFLARRFDDKSKLIQTISAFFILLFFLFYTSSGLVAGGKLFETVFGLDYSIAVIVGTVCVVSYTLFGGFLAVSWTDLVQGLLMSAALLIVPIAAMSGGVGDLTAALELKNPELMTLFNDVKGQPLSAIAIISLAAWGLGYFGQPHILARFKATRSNADITTARRIAVIWTALSMIGAVLVGLVGILYVDNQLAGELADGEKIFMLLVNSIFHPVVAGILLAAILAAIMSTADSQLLVSSSALAEDFYKQVFRPDAPTEEIVMVGRVAVIGLSIVALVLAMNPDSTVLGLVSYAWAGFGAAFGPVLLLSLYWKRMNRNGALVGIIVGALTVVIWKQITGGIFDIYEIVPGFILATLSVVIVSLTTGEPSEKIQKQFDQYEKNLVEFD

SEQ ID NO: 29620 - protein, 584 aa, Cicer arietinum
MNKIKQSLTRISNSNKKKLFFSLFTALLITASIIAISASVTSSQKTKTKNNIVSSSLSLSHHSHTIIKTACTTTLYPDLCFSAISSEPNITHKINNHKDVISLSLNITTRAVEHNFFTVENLLRRKNLSEREKIALHDCLETIDDTLDELKEAQRDLVLYPNKKTLYQHADDLKTLISAAITNQVTCLDGFSHDGADKQVRKVLEQGQVHVEHMCSNALAMTKNMTDKDIAKFEENNNKKNRKLLEEENGVNWPEWISAGDRRLLQGAAVKADVVVAADGSGNFKTVSEAVAGAPLKSSKRYVIKIKAGVYKENVEVPKKKSNIMFLGDGKKNTIITASRNVVDGSTTFHSATVAVVGGNFLARDITFQNTAGPSKHQAVALRVGGDLSAFYNCDIIAYQDTLYVHNNRQFFVNCFISGTVDFIFGNSAVVFQNCDIHARKPDSGQKNMVTAQGRVDPNQNTGIVIQKCRIGATKDLEGLKGTFPTYLGRPWKEYSRTVIMQSSISDVIDPIGWHEWNGNFALNTLVYREYQNTGPGAGTSKRVNWKGFKVITSASEAQTFTPGNFIGGSTWLGSTGFPFSLGL

SEQ ID NO: 29621 - protein, 298 aa, Fragaria x ananassa
MGDTFEYNYQNNSSCSSSAPASSVSVAQSHSSTDEISLFLQQILVRSSSLTGQQFLFSSSPAGYALPENLGSPSNDSFVGGVIRGVDVSTAVVTASGPNVSSSSVGASENEADEYDCESEEGLEALVEEAAVKSGGRSSSKRSRAAEVHNLSEKRRRSRINEKMKALQNLIPNSNKTDKASMLDEAIEYLKQLQLQVQMLSMRNGMSLHPMCLPGASQFSQIRMDFGGEENRPVHLNMSGILNMNQDPSTQNLYNPNQSLCTRFVKCSQFRRCIWIGSIYSGSLGTLSAPKLIQGNLQ

SEQ ID NO: 29622 - protein, 387 aa, Photobacterium profundum SS9
MNNVVIVDCIRTPMGRSKAGAFRNVRAEDLSAHLMKGLISRNPQLDPNSIEDIYWGCVQQTLEQGFNVARNASLLAGIPHTVAATTVNRLCGSSMQALHDATRAIMVGDAETCIIGGVEHMGHVPMNHGVDFHPGMSKSVAKAAGMMGLTAEMLGRMHGISRQMQDEFAARSHQRAHAATIEGRFKNEILPIEGHDENGILKLYDYDEVIRPETTVEGLSNLRPAFDPVNGTVTAGSSSALSDGASAMLVMSEHRAKELGLTIRARVKSMAVAGCDPSIMGYGPVPATQKALKRAGLSIDDIGMVELNEAFAAQSLPCAKDLGLLDKIDEKVNLNGGAIALGHPLGCSGSRISTTLINQMEHHDVQFGLATMCIGLGQGIATVFERV

SEQ ID NO: 29623 - protein, 801 aa, Photobacterium profundum SS9
MKRQLHKFGGSSLADPECYRRVTDILREYSHPNDLIVVSAAGKTTNCLIEWVERLNKDGRQAHETLQEIRQFQQHLIEASVNGEQADRLLSQLHAELSELAKLSGLEITEAVRSSILGHGEIWSARLLAALLNRNNMPAVSLDSRDFLRAERAVQPEVDRTLSRPLLQQQLVQHNKCRIVITGFMARNQASETVLLGRNGSDYSATVIGALADVSRVTIWSDVAGVYSADPRKVADACLLPLLRLDEADELARLAAPVLHSRTLQPVAQSTIDLTLRCSHQPESGSTRVERVLASGRGAKIVTSLDEVCLIELDVPRSHDFDAIKTDIERTLQRAQLLPLAQSAEVELGRILLAYTSEMVNCVLELLQNRGVAAELRLREGFSMVAAVGAGVVNNPVHCHGFYQQLKGLPVEFMTEAESGLSLIAVLRKVDTEGLVARIHQSLFQAQKRVGIVLCGKGNIGSRWLELFEREKEPLEKRHGMSFTLVGVVDSSRHWIDFSGINPKRALNSFDDEAINYADGELFSALASSDYDDVVILDVTASAQLAARYPSIAESGLHLISANKVAGSASSKDYHAVQDAFAKTSRHWLYNATVGAGLPVNHTVRDLRESGDDIIAVSGIFSGTLSWLFQQYDGALPFSQLIEQAWQQGLTEPDPRHDLDGSDVMRKLVILARESGLEIEPEQVKVESLVPDDLAALSLDGFFEQAEKLDELLLERLTKAQQEDKVLRYVARLDKNGKANVGVEALPQEHALANLLPCDNIFAIESRWYRDNPLVIRGPGAGRDVTAGALLSDINRLAALL

SEQ ID NO: 29624 - protein, 404 aa, Photobacterium profundum SS9
MSKVTKVVLAYSGGLDTSAIIPWLKENYDCEVVAFVADVGQGAAELEGIEEKAIASGASSCYIADLKEEMVADYIYPSLKTGAIYEGKYLLGTSMARPIIAKAQVECALAVGADAVCHGCTGKGNDQVRFEGAYAALAPQLTVIAPWREWDLRSREALLDYLAERDIPCTASLEKIYSRDANAWHISTEGGVLENTWNQSNELCWVWTKDPENAPEKAETVSILVEKGEVVAVDGEAMSPFNALTYLNEKGAEHGVGRIDIVENRLVGIKSRGCYETPGGTIMNEALRAVEQLVLDKESYEFRETVGLKASHLIYDGRWFTPLCKSILAAADELAQDVSGEVVVKLYKGQATVIQKRSMNSLYSEEFATFGEDDVYDHSHAGGFIRLYSLASRIRALNTQKKQK

SEQ ID NO: 29625 - protein, 278 aa, Photobacterium profundum SS9
MKKHRAFLKWAGGKYSLVEEIQRHLPPARKLVEPFVGAGSVFLNTDFEQYLLADINPDLINLYNILKDDPEKYIEDVRKLFTPEFNQKEEYLKIREEFNKTQDPYVRSLYFLYMNRHGFNGLCRYNKKGGFNVPFGSYKKPYFPEKEMYFFAEKAKRATFVCEGYQQTFSRARKGCVVYCDPPYAPLSSTANFTSYTGNGFSLDDQADLADVAEKAATEREIPVLISNHDTKLTRRLYHGADLSVVKVRRTISRNGSGRNKVDELLALFKSQEKSPNC

SEQ ID NO: 29626 - protein, 390 aa, Photobacterium profundum SS9
MKFVDEAVIRADAGDGGNGTVSFRTEKYVPRGGPDGGDGGDGGDVYLLADENVNTLIDFRFERFHAAERGENGRGGNCTGHRGEDKILTVPVGTRAIDEETGEVIADLTDHGVKVMVSKGGFHGLGNTRFKSSVNRAPRQKSMGSKGEIRHLRLELLLLADVGMLGLPNAGKSTFIRSVSAAKPKVADYPFTTLIPSLGVVRVDAERSFVIADIPGLIEGAADGAGLGIRFLKHLERCRVLLHMIDLLPADGSDPVENAFTIINELDKYSDKLANKPRWLIFNKVDLLSEEDTQAKISEVLEALAWEGDYYCISALTRDGTKELTYNLMTTIESLPQNKYDEIEEKVEKVEFKWDDYHAEQIKKAEEDDDDDDWDNWNEDDYDVEIIYKP

SEQ ID NO: 29627 - protein, 334 aa, Photobacterium profundum SS9
MKNHSSIEQPSVSETPLTQKIAFLDRATIPKHIQLPSPNFPHEWQEFATTKPEQVIQRLQHATIAIANKVILDADVLSQLPQLKMIAISATGTNNVDLAYCHQHKITVANIRGYATNSVPEHVIAMMFALKRNLMGYHQDIQAGVWQQKKQFCFFTHPISDIAGSTLGIIGNGGLGQAVAALAKALGMEVLYAEHKGKETCRDGYSVFNDVIAHADVISLHCPLSEQTHNLIGNDEFNRMKPNSILINAGRGGLVDEDALVSALKNGDIAGAGVDVFTQEPADMSNPLIANADLPNLILTPHVAWGSDSAIQTLANQLIDNMNAYVAGQPQNLV

SEQ ID NO: 29628 - protein, 572 aa, Photobacterium profundum SS9
MEMLSGADMIVRSMIDQGVKHIFGYPGGSVLDIYDALHEKSDIEHVLVRHEQAAVHMADGYARATGDVGVVLVTSGPGATNAITGIATAYMDSIPMVVFSGQVMSNLIGNDAFQECDMVGISRPVVKHSFLIKKAQDIPEIIKKAFYIASSGRPGPVVIDIPKDMLNPAETYPYQYPESIAMRSYNPTTQGHKGQIKRGLKALLSAKKPVLYVGGGAVISECDQQILKLAESLNLPVVNTLMGLGAFPGTHKNCLGMLGMHGTYEANMAMHNADLIFGIGVRFDDRTTNNVDKYCPNATIMHIDIDPSSISKTIAVDIPIVGSAETVLDCMLKMLDEQESSNDQEAIASWWADLESWRSRKCLSYETNNERIKPQQVIESLYKLTNGDAYVASDVGQHQMFAALYYPFDKPRRWINSGGLGTMGFGLPAAMGVKFALPDAEVVCVTGDGSIQMNIQELSTALQYDIPVKIINLNNRFLGMVKQWQDMIYQGRHSHSYMDSVPDFAAIAEAYGHVGVRISDPAKLDSELEKALAMKDKLVFVDISIDETEHVYPMLIRGGSMSEMWLSKTERT

SEQ ID NO: 29629 - protein, 696 aa, Photobacterium profundum SS9
MWLQVTNCSTLHSSLSYCGANTLSDMAKNLILWLVIAVVLMSVFQSFGPSDSAGRQVDYTTFVREIGQDQIREARFNEREITVFKRDNTRYVTYLPVFNDQKLLDDLINANVKVLGTPPEEPSLLASIFISWFPMLLLIGVWVFFMRQMQGGGGGKGAMSFGKSKARMMSEDQIKTTFADVAGCDEAKEDVKELVDYLRDPSRFQKLGGKIPTGILLVGPPGTGKTLLAKAIAGEAKVPFFTISGSDFVEMFVGVGASRVRDMFEQAKKAAPCIIFIDEIDAVGRQRGAGVGGGHDEREQTLNQMLVEMDGFEGNEGVIVIAATNRPDVLDPALLRPGRFDRQVVVGLPDVRGREQILKVHMRKVPLEGDVEPSLIARGTPGFSGADLANLVNEAALFAARGNKRVVSMQEFELAKDKIMMGAERKSMVMSEDQKESTAYHEAGHAIIGRLVPDHDPVYKVSIIPRGRALGVTMYLPEKDRISHSREFLESMLSSLYGGRLAEELIYGVDKVSTGASNDIERATDIARKMVTQWGFSEKMGPVLYADDEGEVFLGRSVTQTKHMSDDTARAIDMEIRALIDRNYERAREILAQNMDIMHAMKDALMKYETIDAAQIDDLMARKSEIRAPKGWGDTDDVMKSSPTTSESAPEAKTESAPEAKAEANVETEEKPVAADSEELKPKAEQAPKEDDKPQA

SEQ ID NO: 29630 - protein, 914 aa, Photobacterium profundum SS9
MASANGLYAFTYRNIKTEHHSVRSKRHAGYSVIARFSVSEYLAKLISVLGWIMSTMTLTSLVDKLTPEAKRTLELSAALANSRSHSSVEILHWLISIVDAQSSDYVAVSRCFDINDAQLKQDLMVKLERLPTGCDDAPGLAVHTVNLLRQAWLATTIEFNDNSIGAVHLLYTMLADDSLSSIVGFYSKELGKISPAQLLHVWPELVTKQKSNAVDQDPHLSAGSQTPALSQFTIDLTEQARNGDIDPIVGRDDEIRQMIDILSRRRQNNPILTGEAGVGKTAVVEGLALRVAANDVPESLQGVVIRSLDLALLQAGAGVKGEFENRLKSVVSEVKNSPVPIIIFIDEAHAMVGSGGQAGQSDAANILKPALARGELRTIAATTWAEYKKYFEKDAALARRFQVVKVEEPSEDLAVVMLRGLLPVMEAHHQVTITDQALQAAVRLSHRYISGRQLPDKAVGLLDTACARVAMSQATAPAKIEALNKYQQQLEAEIIQLEKEQKTGGDHQERLHNLQCELDTTATDLQAYQALWQQECVLINRAKALSTAVLESIEPIDEQAELIEIKLQLSANNEPMVFFEVDENLIAEVVSDWTGIPLGRMQTDEIQQVLALDKHLKKRVIGQDHALNHLAEVVKISRANLNDENKPNGVFLLSGPSGVGKTESALALAEQVYGSEAHITTINMSEYKEEHKVSLLLGSPPGYIGFGEGGVLTEAVRRKPYSVVLLDEIEKAHPGVQDIFYQVFDKGTIKDGEGRDIDFKNTIIILTSNVGTELTMQLFEDPEIAPTIEGLREALQDDLLKVFKPAFLGRINVIPYVPLDSDSLTKIAKLQIERICQRFKNNYKAECIYTDDVVNYLIGISSDASAGARVIQQNIQKKLLPILSAKILEQLSNNKLINEINIDVINDTFDVKMK

SEQ ID NO: 29631 - protein, 639 aa, Photobacterium profundum SS9
MGRIIGIDLGTTNSCVAVLDGDKPRVIENAEGERTTASVVAYTQDGETLVGQPAKRQAVTNPENTLYAIKRLIGRRFEDEEVQRDLKIMPFKIVKADNGDAWVEAKGQKMAAPQVSAEILKKMKKTAEDFLGEEVTAAVITVPAYFNDAQRQATKDAGRIAGLEVKRIINEPTAAALAYGLDKKGGDRTIAVYDLGGGTFDISIIEIDEVEGEKTFEVLSTNGDTHLGGEDFDNRLINYLVEEFKKEQGMDLRNDPLAMQRLKEAAEKAKIELSSAQQTDVNLPYITADATGPKHMNIKVTRAKLESLVEDLVQRSLEPLKVALSDAGLSVSEITDIIVVGGQTRMPMVQAKVAEFFGKEPRKDVNPDEAVAVGAAVQAGVLAGDVKDVLLLDVTPLSLGIETMGGVMTKLIEKNTTIPTKANQVFSTAEDNQSAVTIHVLQGERKQSSYNKSLGQFNLEGIQAAARGMPQIEVTFDLDADGILHVSAKDKSTGKEQKITIQSSSGLSEEDIEKMVQEAEANKESDKKFEELVTARNQADQLIHGTRKQVEEAGEALPAEDKEKIEAAVSELEEARKAEDKEAIDAKVQALVAASQKLMEIAQQQAQAQQAPGGEGEQEAKQDDNVVDAEFEEVKDEKK

SEQ ID NO: 29632 - protein, 404 aa, Photobacterium profundum SS9
MKLPIYFDYSATCPVDPRVAEKMMQCLTMDGNFGNPASRSHRFGWQAEEAVDTAREQVADLMNADPREIVFTSGATESDNLAIKGAARFYSKKGKHIITCKTEHKAVLDPCRQLEREGFEVTYLDPEANGLIDMAKLRDAIREDTVLMSIMHVNNEIGVIQDITAIGELCRENKIVFHVDAAQSIGKLPIDVQAMKVDLISVTSHKIYGPKGIGALYVRRKPRIRLEAQMHGGGHERGMRSGTLATHQIVGMGEAFRIAKEEMEQDRVHTLALRTRLLDGLKDMESVHINGDLEQRVSSNLNISFAFVEGESLLMALKDLAVSSGSACTSASLEPSYVLRALGLDDELAHSSIRFSFGRFSTEEEIDYAITQIRTAVEKLRDMSPLWDMHKEGIDLNSVEWAHH

SEQ ID NO: 29633 - protein, 407 aa, Photobacterium profundum SS9
MDIILGVVMFTLIILALVLVILFAKSKLVPSGDITISVNNDPEKAITTAAGGKLLTALSSSGIFVSSACGGGGSCGQCRVKIKSGGGDILPTELDHITKGEAREGERLACQVNVKSDMNIELPEEIFGVKKWECEVLSNDNEATFIKELVLKIPDGEEVPFRAGGYIQIEAEPHHIKYADFDVPEEYRGDWDKFNLFRYESIVKEHSIRAYSMASYPEEKGLIKLNVRIATPPPNNPDVAPGIMSSYIWSLKPGDNCTISGPFGEFFAKETDNEMVFIGGGAGMAPMRSHIFDQLHRLQSTRKMTYWYGARSKREMFYVEDFDKLAAENENFDWYVALSDPSPEENWDGYTGFIHNVIYDNYLKDHDAPEDCEYYMCGPPMMNAAVIGMLKDLGVEDENILLDDFGG

SEQ ID NO: 29634 - protein, 555 aa, Photobacterium profundum SS9
MCSVFGILDIKSDPSALRATALEMSKKMRHRGPDWSGIYSSDKAILVHERLAIVDLNSGEQPLYNQDKTHILAVNGEIYNHKELSAEFAPDYPFQTESDCEIILALYKEKGPELLDYLNGIFGFILYDAVEDAYLIGRDHIGIIPLYQGYDEHGNYYIASEMKALVPICKTISEFPPGSFLWSKKGEPTRYYKRDWMEFETVADAPTDKVALKEALESAVKRQLMTDVPYGVLLSGGLDSSIISAITKKFAARRIEDDEKSQAWWPTLHSFAVGLEDAPDLKAAKIVADSIGTVHHELTYTIQEGIDAIRDVIYHIETYDVTTIRASTPMYLMSRKIRAMGIKMVLSGEGADEVFGGYLYFHKAPNKREFHEETVRKLLALNMFDCARANKSMAAWGIEARVPFLDKEFLEVAMRINPEDKMCGNGKMEKHILRECFEDHLPESVAWRQKEQFSDGVGYSWIDSLKEVAEAKVTEQQLETASFRFPYNTPTTKEGYMYREIFDELFPLESAAKCVPGGPSIACSSAKAIEWDESFKNSADPSGRAIAAVHNEAYK

SEQ ID NO: 29635 - protein, 555 aa, Photobacterium profundum SS9
MMSESEARPTNFIRQIIDADLDSGKHKSVHTRFPPEPNGYLHIGHAKSICLNFGIAQDYQGQCNLRFDDTNPEKEDIEYVESIKNDVNWLGFDWSGEICYSSNYFDKLYGFAVELINKGLAYVDELSPEQMREYRGNLTEPGKPSPYRDRSVAENLELFEKMKNGEVEEGIMSLRAKIDMASSFMVLRDPVIYRVRFATHHQTGDKWCIYPMYDFTHCISDALEGITHSICTLEFQDNRRLYDWVLDNITIDCQPRQYEFSRLNLEYTVMSKRKLNQLVTDNLVSGWDDPRMPTVSGLRRRGFTSASIREFCKRIGVTKQENTIEMSSLESCIRDDLNENAPRAMAVLDPVKIVIENFTGDTEVLTVSNHPNNSEMGTREVPFTREIWIEREDFREEANKKYKRLVLGKEVRLRGAYVIKAERIEKDAEGNITTIFCSYDNETLGVNPSDGRKVKGVIHWVSADAGLPAEIRLYDRLFTVANPAAADDFVTVINPESLTVLNGFVEPSLKVAEAEKAFQFERIGYFCVDSKDSSAEKLVFNRTVGLRDTWAKMGE

SEQ ID NO: 29636 - protein, 361 aa, Photobacterium profundum SS9
MSKEKILFIDRDGTLIVEPPVDFQVDRLDKLKLEPFVIPALLTLQDAGYKLVMVTNQDGLGTDSYPQADFDAPQNMMMEIFESQGVKFDDVLICPHFNEDNCSCRKPKLGLVKSYLQQGRVDFATSAVIGDRQTDLQLAENMAIKGIQYNPLPTDKSSLNWQQIVKDLTTNPRIAEVVRTTKETDIRVKVNLDETGGNSIETGLGFFDHMLDQIATHGGFQMQVNVKGDLHIDDHHSIEDTALALGQALKEALGDKRGIGRFGFSLPMDECLAQCALDLSGRPYLKFEAEFGRDQVGDLSTEMVSHFFRSLTDTLACTLHLSSTGHNDHHIVESLFKAFGRTLRQAIRVDGNELPSSKGVL

SEQ ID NO: 29637 - protein, 373 aa, Photobacterium profundum SS9
MIIGVPKEIKNHEYRVGLIPASVRELISFGHQVVIETNAGAGIGLTDADYQAAGASIISNAKEVFTRSEMIIKVKEPQAVERTMLHEGQILFTYLHLAPDFPQTEDLIKSKAICIAYETVTDNKGTLPLLAPMSEVAGRMSIQAGAQTLENSRGGRGLLLSGVPGVEPAKVVILGGGVVGSNAARMAVGMRADVTILDKNIDTLRALDAEFQGKAKVIYSTKEAIDRLVVQADLIIGAILIPGAAAPKLITAAHLKMMKPGSALVDVAIDQGGCFETSHPTTHADPTFIIDDIVHYCVANMPGAVARTSTFALNNATLPYIINLANKGYKKALQDDEGFLKGLNIMHGKVTSKEIADTFNLHYTDPVTAISMH

SEQ ID NO: 29638 - protein, 496 aa, Photobacterium profundum SS9
MNSTLFLTGFGVYVVFLIWLGWFVSRNQKSGEDFLLGGRSLPLFLVLGTTVATMVGTGSSMGAVGFGYANGWAGALYGIGGALGILLLAKWFAPVRELNFMTMSEELAYYVGANKIVKNVVGVLIFVASIGWLGAHILGGGMYLAWIADIDINTAKLIIAAAFTIYVVIGGYTAVVWTDTIQAVILFAGFILMAVMSVDYIGGMDNLYAAMEPAATSFLAIDKLGIIPAVSLAMVVGVGVLATPSFRQRIYSGKDVSTIRRSFVISGVLYLFFSIIPAIIGMAAHAINPDLNNPNFSFPYIAATVLPVGVGMIVLIAGLSATMSSASSDAIAGVSILMRDIYIMFTGKVPAKDKMVAYSRISLVIVIGFALLFALTSNDIISYITKMISTVMSGMFVCGMLGRFWARYNWQGAIATLAGASVASFAIMFNADWTTFWGNPVIPSVLTALAAGVVVSLATPANTVTKAEAKAILDAERQAMEQDAAETVSAKPVMAK

SEQ ID NO: 29639 - protein, 273 aa, Photobacterium profundum SS9
MYADTIKKCSATAARIVDFADKDKFGFWLSSAMAGAYVGLGIILIFTLGNMVDPSIRSLVMGSTFGIALTLVIIAGSELYTGHTMFLTFGVKTGQITVADTLRVLPQTWMGNLIGSVGVALLFFYAGGGKLLPDSNSLLNNVAMAKTAAPASVLLFKGILCNWLVCLAIWMCQRVEGSSKFIAIWWCLLAFIASGFEHSVANMTIFALSYFGEHKEAFTLAGIGHNLLWVTVGNTISGVVFVGLGYWFSTPKAQRPLLASAKKELTNNVTQTA

SEQ ID NO: 29640 - protein, 641 aa, Photobacterium profundum SS9
MSKIIGIDLGTTNSCIALLDGDKPRVIENAEGERTTASVIAYTQDGEILVGQPAKRQAVTNPKNTLFAIKRLLGRRFEDEEVQRDIEIMPFNIVKADNGDAWVEAKGKKMAAPQVSAEVLKKMKKTAEDYLGEEVTGAVITVPAYFNDAQRQATKDAGRIAGLDVKRIINEPTAAALAYGLDKQGGERTIAVYDLGGGTFDISIIEIDEVDGEKTFEVLSTNGDTHLGGEDFDNRMINYLVGEFKKEQGIDLKSDPLAMQRVKEAAEKAKIELSSAQQTDVNLPYVTADAAGPKHMNVKVTRAKLESLVEDLVQRTLEPLKIALTDANLSITDITDVILVGGQTRMPMVQAKVTEFFGKEPRKDVNPDEAVAVGAAIQAGVLAGEVKDVLLLDVTPLSLGIETMGGVMTKLIEKNTTIPTKANQVFSTAEDNQSAVTIHVLQGERKQSSYNKSLGQFNLEGIQAGSRGTAQIDVTFDLDADGILHVSATDKATNKEQKITIQASGGLSNDDIEKMVQEAEANKEADKMFEELVTARNQADQLVHSTRKQVEELGDALPADEKAKIDTAIADVETALKGEDKAAIDNATQALMTASQALVQMAQQQAQAQHAQSSQQTNDTTGQSSTDDDVFEAEFEEVKDK

SEQ ID NO: 29641 - protein, 530 aa, Photobacterium profundum SS9
MQSNACQIGKDITATSSTRKRRIDGKLVPALTIGFISLFLLAALIDLPRFTLLIQELFSAAAGQFGFWWQWLMVANFAIALCIAVSRYGKTRMGVETKPTIGTFRWLAMIMCTLLAGGGVFWSAAEPIYHFITPSPSYPGITGSTAEAVVPALSQSFLHWGFLAWSVLGTLATIVLMYAHHNHGIKLRPRALLFPLVGNRLENHWIGAVIDACSIIAVAAGTIGPIGFLASQMGYSLEVLTGIKNDSSTQLMILGAVVSVCAISAASGMDKGLQWLSRLNVIGAFALLLAILILGPTQFIFEQFGNAFAGYLQHMPTMSLTNSTPGWNVWWTWFFWGWFIGFAPMMAIFIARISEGRSIRELVLAVAVGAPIVTNFWFTVLGGTGIFLELQTPGIISGPLNDAGLPAVLLASLQQLPLSGILLPAFLVLTTTFVVTTGDSMAYSIAMVVSGDNEPDRKQRIFWAVMMGAVAAVLLLAGDGGLNALQSFIVITAVPVSFIIAATLITGPIAAIKMTKMQNARIAEKALQAA

SEQ ID NO: 29642 - protein, 535 aa, Photobacterium profundum SS9
MDSKSKKYSIDTTDYQVGQDNIQKWGFDIHNPVFGISAGFILLFLTTLMIVDPNTAKDALNGLKNSIINGFDTFFMWSTNFFVLFSLVLLLSPFGKIRIGGKEAKAEHSTVSWLAMLFAAGMGIGLLFWGVAEPVAYFTDWWGTPFNVEPYTPEAKALAMGSTIFHWGIHGWAIYAIVALSLAFFTYNKGLPLSIRSVFYPIFGDRAWGWLGHVIDILAVLATLFGLATSLGLGAQQATSGINHVFGTDGGIGMQLTVIAFVTMIAIVSVIRGIDGGVKVLSNINMLFAFALLLFVGYVGFDVVKLSIPETFIAYAENIIGLSNPHGREDTTWMHGWTVFYWAWWISWSPFVGMFIARISKGRTVREFLLAVIFIPTLVTIIWMAVFGGIAIDQVVNKVGELGANGLTDISLSLFHVYDALPFGSVISVLSIILILIFFITSSDSGSLVIDSITSGGKIDAPVPQRIFWATVEGAIAGVMLWVGGKEALQALQSGVVATALPFTFVLLLMCVSLVKGLNSELALYTNDKKFTKTA

SEQ ID NO: 29643 - protein, 407 aa, Photobacterium profundum SS9
MNTTIQINELESLLIAIIVLFLGYFINTKVTVLRKYNIPEPIVGGLIVAVIIALIHQQGIDITFKLSIKDTLMQMFFATVGLAASYKLLAKGGSRVFLFLGLATVFIIIQNAVGVTLSTLLGLDPIIGLIVGSITLSGGHGTGAAWAQSFAADYNLHVLELSMASATFGLVMGGIIGGPVAQRLINKHKLKSSFGDGEHHHIKHPDLITYSDKEEDRITSKNTIEVLFILLICVAGAAHVKELVDSFGISWLRIPDFVYALFIGVFITNICETTKVYKINSETVDALGTISLSLFLAMALMSLKLWELLELALPMLMILTVQTVVLAAFAYFVTFRVMGKTYDAAVIAGGHCGFGMGATPTAVMNMGSLVSRNGPSPQAFMVVPIVGAFFIDIANLIVLQGYLSFIQ

SEQ ID NO: 29644 - protein, 261 aa, Photobacterium profundum SS9
MWIFMDSSALPSLPHLLIVDDHSEIRDLLKRFLSQHNYRVSVAADGNEMEQCLRDNSIDLIVLDLMLPGKDGLTLCRELRVHSNIPVIMLTAMGEEVDKIIGLEMGADDYLPKPFNPRELLARVKAVIRRFNAIPEGKSVRQSKVDSVEEAQDKESYVYRFNRWCFDIGQRELTDNDGIAVSLTSAEFTLLKVFVEHPRKVLSREQLLDLAKGRETDVYDRSIDTIISRLRKKLEIDHKKPELIKTIWGGGYQLVCEVTHD

SEQ ID NO: 29645 - protein, 373 aa, Photobacterium profundum SS9
MKMIIGVPKEIKVHEYRVGMVPASVNEAVSHGHTVYVQTLAGSGIGFSDQDYIDAGAQILPTAEAVFAEAEMIVKVKEPQAVERAMLREGQILFTYLHLAPDPEQTTDLVNSKAVCIAYETVTDDKGRLPLLAPMSEVAGRMSIQAGAFALEKSKGGSGMLLAGVPGVEPAKVVIIGGGVVGANAAQMAVGLRANVVVLDRNIDVLRDLDAQFGGTVQCVYSTKEAIEKHVLAADLVIGGVLVVGAAAPKLVTAEMIKKMKPGSAIVDVAIDQGGCVETSHATTHSDPTYIVDDVVHYCVANMPGAVARTSTFALNNATLPYILKLADKGYKAALQDDKHLLNGLNVYRGQITCESVASALDLEFVAADKAIA

SEQ ID NO: 29646 - protein, 568 aa, Photobacterium profundum SS9
MENHTLIKTFQSLVGTKNVLTRIKETEYYRSGFRSGKGEALAVVFPTTLLEQWNVIKSCVESNCIIIMQAAKTGLTEGSAPSGSDYDREVVIINITKMKQIHLLDGGKQAVCMPGTSLHSLEKELKKVKRAPHSVIGSSSIGATVVGGIANNSGGALVKRGPAYTELSLFAQVDKEGELHLVNHLGIDGLGETPEEVLTNIQNGNIKLENIQHDVGMASDREYEARVRDVDSDIPSRFNADARRLYEASGCAGKLGIFAVRVDSYPVTEKEQVFYIGTDDAEKLTQLRRDILSKFDNLPEMGEYMHRDIFNLSEKYGKDVFLSINYLGTESLPKFFALKAKVENFLGRIPYVSKYLPDTILYYVSKLFPQHLPKRMLDFRNKYQHHLILKMSDVGIEEAKAYLEKNWGEDSGGSYFACTADEGKKALLHRFAAAGAAIRYETIHRNEVEEIVALDIALRRNDREWVEELPEEITKNMVTSLYYGHFMCHVFHQDYIFKKGTDTKKMKKLMLELLEQKGAKYPAEHNVGHLYEAENTLQEFYHKLDPTNTFNPGIGKMSKYKRNCSCCH

SEQ ID NO: 29647 - protein, 295 aa, Photobacterium profundum SS9
MSTIAFIGTGIMGKPMAVNLQKAGHQLVFSEHYSPVPNDLIAAGGIAFPTPKVATEQADYIILMLPNTPQVEAVLFGKDGVEEALTAGKVVIDMSSISPIETKQFAARVKESGAEYVDAPVSGGEVGAINAALTIMVGGEESSFEKAKPLFEVMGKNITLVGESGAGQICKVANQIIVALNIEAVSEALVFASKAGADPARVREALMGGFANSKILDVHGERMIKGTFDPGFKIALHQKDLNLAISGAKTLGVSLPNTVMAQGLFDQCVAMGGEGWDHSAMIRAIEQLADHEIRK

SEQ ID NO: 29648 - protein, 585 aa, Photobacterium profundum SS9
MTQSTEQSTLDTYKRLWPYISFYKAGLSVAVVALIINALGDTLMLSMIKPLLDESFGGLDNIESDFLSMMPYYLVGLMILRGASGFVSTYCLSWVSGKVVMNLRRGLFNHFMKMPVSFFDKESSGALLSRITYDSEQVASATSSALVSMVREGASIIGLMALMFWNSWQLSAILLVIAPVVAFSIRLVSKRFRKISKNMQDAMGSVTSSAEQMLKGHKVVLSYGGQEVEKQRFDSVSNNMRQQTMKLVSAQAIANPVIQVIASFALVVVLVLANSEALRAELTPGTFAVVFGAMFGLMRPLKALTNVTSQFQRGMAACQTLFELMDLEAEEDNGKHKIARVNGDIQVKNVTFTYPTKDTPALRNVSFDLPAGKTLALVGRSGSGKSTIANLLTRFYDIDSGELILDGREVKDYQLSNLRDQVAVVSQNVHLFNDTIANNIAYASGDSFSRADIEKAAELAYAMDFIKGMPKGLDTMIGENGVSLSGGQRQRLAIARALLRNAPVLILDEATSALDTESERAIQSALEELQKDRTVLVIAHRLSTIEGADQILVVDDGEIIERGTHGELIKHDGAYAQLHRIQFGD

SEQ ID NO: 29649 - protein, 199 aa, Photobacterium profundum SS9
MISQQQILSRFMLAPTTDYDKSHNERVRQHVSATDTFKPAAVLIPLVPRNNTYNVVLTRRANHLKHHPGQIAFPGGRHESFDQDLAATALRETEEETGILCSRNHILGQLPALPTISGYMVTPFLSTIAADYQPKLDPSEVDELFEVPIQYLLNPVNMRSQQFQINGHLHNIYSIPFSNYSIWGATAQMIKLLSKQLWY

SEQ ID NO: 29650 - protein, 525 aa, Photobacterium profundum SS9
MTKGIDKYSIDSTDYTVGQDNVQKWGFDVHNPVFGISAGLIALFLIAALVLDPAIAKSTLDGIKLQIISSFDWLFIWAGNIFVIFCLGLIVSPYGKIRLGGEDAVADYSVMSWLSMLFAAGMGIGLMFWSVAEPVAYFTGWYETPLGVEANSPEAAKLALGATMYHWGLHPWAIYGIVALSLAFFSYNKGLPLSLRSIFYPILGDRAWGWAGHCIDILAVLATLFGLATSLGLGAQQAASGIHHVFGIDAGIGLQIAVITVVTLLAIVSVVRGIDGGVKILSNINMIIAFLLLVLVAVIGYSVSFSSISTTFMSYVENILPLSNPHGRNDEAWFQGWTVFYWAWWISWSPFVGMFIARVSKGRTIRQFITAVLIVPTSVTLIWMSVFGGLAIDQVINNVGELGAKGLTDVSLAMFEMFDVMPYGSILSMIAVVLVLVFFITSSDSGSLVIDSITSGGKVDVPIPQRIFWASLQGAVAVALLWIGGTEAVQALQAAVISTALPFTFILLLMCVSLVLGMRTEPFKR

SEQ ID NO: 29651 - protein, 113 aa, Photobacterium profundum SS9
METIDKIKQQISENPILLYMKGSPKLPSCGFSSQTSQALMSCGEKFAYVDILQNPDIRAELPVYAQWPTFPQLWIEGELIGGCDIVLEMFQKGELQPLIKEAAVRRDGEAAAE

SEQ ID NO: 29652 - protein, 404 aa, Photobacterium profundum SS9
MHNIGMSSKLNNVCYDIRGPVLKHAKRMEEEGHKILKLNIGNPAPFGFDAPDEILVDVIRNLPTSQGYCDSKGIYPARKAIVQHYQKRGLLDLDVEDVYIGNGVSELIVMAMQALLDNNDEILVPSPDYPLWTAAVSLSGGNPVHYICDEESDWYPDLDDIKKKITPNTRGIVLINPNNPTGAVYSRDFLLEIVEIARKHKLIIFADEIYDKILYEGAQHTSIAPLAPDVFCITFNGLSKSYRVCGFRAGWMVLSGPKHEAKGYIEGLEMLSSMRLCANVPMQHAIQTAIGGYQSINELILPGGRLLEQRDKAYDLITQIPGVSCVKPKGALYLFPKLDQKKFNIVDDQRMALDFLQQEKVLIVHGTGFNWEKPDHFRIVTLPRVDDLEMAIGRLERFLHNYRQ

SEQ ID NO: 29653 - protein, 492 aa, Photobacterium profundum SS9
MGSATASTNNNFTPKEMMKQAEKYAVGKASKPTRTTIALAITAGVFIGLAFVFYITVTTGNGGVSWGLNRFYGGLAFSLGLILVVICGGELFTSTVLSSIARANNHISSGRMLGTWAKVYFGNFLGAMLLLLLVSMASLYQLDGGQWGLNALNIAQHKLHHQPLEAFSLGVLCNLLVCLAIWMTFCTENMMTKMVIMILPVAMFVSTGFEHSVANMFMVPLGITIQNFAPESFWLNLGVLPEQYNDLTIQNFIFANLIPVTLGNIVGGGVLVGLSYWAIFSSPKEQHASATIITPDFSNTHTLNMEHTMLNEKQFVNDHMRPATITLLPGMPVAQALDILMNEDLTGAPVLTTDQRLVGFFSIHDALVDLWCNDYMPDAESKVQDLMKHEIQTVSPDNSILEIAEYMSIDKNILYPVSDGGIATRFTSLSLNERARAMVINRPHCFPVVKDEQLVGIITRKEIVSALRPVYGNIVSVTEVANTQPKAVSDIA

SEQ ID NO: 29654 - protein, 398 aa, Photobacterium profundum SS9
MSKLVLVLNCGSSSLKFAIVDAVSGEEHLTGLAECLHLPEARIKWKLDGKHEAQLGDGAAHEEALAFMVESIIASKPEFAANLAAIGHRVVHGGEKFTQSVLIDETVVKGIEDCSALAPLHNPAHIIGIKAAQKAFPALKNVAVFDTAFHQTMPEEAYLYALPYNLYTDHAIRRYGMHGTSHLFITRVTAELLEKPVDELNIINCHLGNGASVCAIKNGKSVDTSMGLTPLEGLVMGTRCGDIDPAIIFHLHDTLGYSVEKINNMLTKESGLQGLTQVTSDCRFVEDNYGKKEEATRAMDVFCHRLAKYVAGYTATLEGRLDAITFTGGIGENSAPIREMVLNRLAILGVEVDVEANLKARFGKEGVITTANSRVPAMVVSTNEELVIAEDTARLAAI

SEQ ID NO: 29655 - protein, 718 aa, Photobacterium profundum SS9
MSRTIMLIPVGAGVGLTSVSLGVLRAMERKGVRVSFFKPIAQPRSGGEQPDLTTTIIRANSDMEIAEPFTMARAEELLRNDQSDVLLEDIVARFKASTAQSEVALIEGLVPTRKHPFANQINYEIAKTLGAEIVFVIAHGTDNPAQLKERIEVACSNFGGIKNKQISGVIVNKLNAPVDAEGRTRPDLSEIFDDIDGTTIPLNVEVMQVYNSSPIRVLGCAPWSPELIATRSTDIAAHLNAQIINEGDIATRRIKSVTFCARSIPNMVEHFRPGSLLVTSADRPDVIVAACLAAMNGVEIGALLLTGGYELPKPVMDLCERAFATGLPVMTALGNTWQTSLNLQSFSLEVPADDKERVEFVNEYMASHIDGQWIESLTEGSAKERRLSPPAFRYELTELARKAAKRVVLPEGDEPRTVKAAAICAERGIAECVLLGNPEEIKRVAEQQGVTLGAGVTIIDSESVRENYVKRLVELRGAKGMTDVVAREKLKDSVFLGTMMLEAGEVDGLVSGAVHTTANTIVPPFQIIKTAPDASIVSSIFFMLLPDQVLVYGDCAINPDPNAEQLAEIAIQSADSAKAFGIEPRVAMISYSTGTSGKGADVDKVREATRIAQEKRPDLIIDGPLQYDAAIMENVAASKAPNSPVAGKATVFVFPDLNTGNTTYKAVQRSADLVSIGPMLQGMRKPVNDLSRGALVDDIVYTVALTAIQAKQTENATK

SEQ ID NO: 29656 - protein, 281 aa, Photobacterium profundum SS9
MNQGQFDSLLPPQMAEKAAEVGVGKATKDPMKSFLLAITAGLHIGIAFIFYTTVTTGSGDMAWGMSKFIGGLAFSLGLILVVITGGELFTSSVLTLVARASGKISWKSLCMNWGVVYIGNLIGALLLVGIMLVAKQYMSANGAVGINTMQIAQHKLHHGFFQAVALGIMCNVLVCAAVWMTFSGRTLTDKILVMILPVAMFVSSGFEHCIANMFQVPMAIGIKTLASPEFWQLSGMNPADFADLTMSNFIINNLIPVTLGNIIGGGVFVGMGYWLIYLRSE

SEQ ID NO: 29657 - protein, 315 aa, Photobacterium profundum SS9
MPDMKLFAGNATPELAQRIADRLYISLGDATVDRFSDGEVCVQINENVRGSDVFIIQSTCAPTNDNLMELVVMIDALRRASAGRITAVIPYFGYARQDRRVRSARVPITAKVVADFLSNVGVDRVLTVDLHAEQIQGFFDVPVDNVFGSPVLLEDILARNLEDPVVVSPDIGGVVRARAIAKLLDDTDIAIIDKRRPRANVSQVMHLIGDVEGRDCIIVDDMIDTGGTLCKAAKALKERGAKRVFAYATHPVFSGSAVKNICESVIDEIIVTDSIPLSKEIIATGRVSVLTLSGMLAEAIRRISNEESISAMFEH

SEQ ID NO: 29658 - protein, 184 aa, Photobacterium profundum SS9
MANPAVFIDRDGVINVDHGYVHTVDDFEFIDGVFEACKKLKDMGYLLILVTNQAGIARGMYTEAEFTRLTEWMDWNFVDHDVEFDGIYYCPHHPTEGKGEYLQDCDCRKPEPGMLLSACEEFDIDMDNSIMIGDKTDDMTAATTANVGTKILVRTGKPVTEQGEALASVVLDSVADVPAWLAAR

SEQ ID NO: 29659 - protein, 861 aa, Photobacterium profundum SS9
MGELMRLDRFTSKFQMAIFDGQSLALGRDHQYIEPAHLMVALLNQDGSTIRPLLTMLNVDISQLRSRLGELLDHLPKVTGIGGEVQLSNDMGLLLNMCDKLAQKRKDKFISSELFILAAVDDKGSLGKLLKELGLTAAKIEQAINQVRGGQKVDDQNAEENRQALEKFTIDLTERAEQGKLDPVIGRDDEIRRTIQVLQRRTKNNPVIIGQPGVGKTAIVEGLAQRIVNGEVPEGLRHKRVLSLDMGSLIAGAKYRGEFEERLKSVLNELSQEEGSVILFIDELHTMVGAGKGEGSMDAGNMLKPALARGELHCVGATTLDEYRQYIEKDAALERRFQKVLVDEPTVEDTIAILRGLKERYELHHHVEITDPAIVAAARLSHRYVSDRQLPDKAIDLIDEAASSIRMQIDSKPESLDRLERRIIQLKIEQQALSKESDAASQKRLNDICEELDVKEREYAELEEVWNAEKAALSGTQHIKSELEQARMNMEVARRAGDLNRMSELQYGKIPELEKQLDLAAQAEMQEMSLLKNKVTDAEIAEVLSKQTGIPVAKMLEGERDKLLRMEDELHQRVIGQNEAVEAVANAIRRSRAGLSDPNRPIGSFLFLGPTGVGKTELCKTLANFMFDSEDNMVRIDMSEFMEKHSVARLVGAPPGYVGYEEGGYLTEAVRRRPYSVILLDEVEKAHPDVFNILLQVLDDGRLTDGQGRTVDFRNTVIIMTSNLGSDRIQENFGNLNYEGIKNMVLEVVSQYFRPEFINRVDETVVFHPLGQENIKHIASIQIERLVNRLKEKDYELTVQESALDFVAKAGFDPVYGARPLKRAIQQYIENPLAQEILSGKLETGKPIDLLIEDEHLVTKQ

SEQ ID NO: 29660 - protein, 490 aa, Photobacterium profundum SS9
MLVFVSCYAVLNVSTLPKSICMSLNSPRYSSIALVKEIESPENPGGLEKRVALVPSDVGQLVQAGIKVYVECGAGDGVGFSDEEYLKNNAIMQTAEQIYKDKALIIKFKGPALSSIEQMSEGCTLFCMAHFHSYPDRAILLKDRRINVIAMEEICESPKHDTDQRILGRLAMNEALIPFFNDNSIGGLRVRIIGWSERLRGAINRCGNRGPRSLQVIQPTLSFDELDATGSNALYFYDSQSFKDQQDILIKLKNAGTHLFDLNEFEHQHGQQAIASYRASHQPEEFGLRRIQCLHETGQAGARYGMALLNAKKQSVDRVNTKAVILGYGNVAQGALDELHQQGIKNIHVLGRSQTAKSRIDYWLKDVDIVVNGAEQSSELRGKNFLISNQHLKDLIPEQSVVIDLVGGSATNRSPVEPVISCSFLTEPYFVQDGVLVSSLWGWPMMGMMRETAIRYSGQIVEVLIGHEKLIDGLEQLKPGVQRALVCGPF

SEQ ID NO: 29661 - protein, 301 aa, Photobacterium profundum SS9
MTEKQHCGFIAIVGRPNVGKSTLLNRLVGQKLSITSRKPQTTRHRIMGVDTRDGYQAVFIDTPGLHIEEKRTINRLMNRAASSSLTDVELVLFLVDGTMWTADDEMVLNKLKKSELPTVLLINKVDNVKEKGDLFPHLDALSKKMDFVDVVPISAKKGTNVDAVEKIVRAHIPEGEYYFPEDYVTDRSQRFMASEIIREKLMRFLGEELPYSVTVEIERFDYNPKMDGFDINGLIFVERKGQKKMVIGKNGEKMKVIGREARIDMEDLFGRKVYLELWVKVKSGWADDERALRSLGYTDDL

SEQ ID NO: 29662 - protein, 409 aa, Photobacterium profundum SS9
MELTTTVTELRYALDTFFFLISGALVMWMAAGFAMLEAGLVRSKNTTEILTKNFCLYAIACTTYLIVGYNIMYVDNGEGGWLPSIGALIGTQAEGADHSLESDFFFQVVFVATAMSVVSGAVAERMKLWSFLLFSVVLTAFIYPMEGYWTWGGGFLSEAGFSDFAGSGIVHMAGASAALAGVLLLGARKGKYGKNGEINPIPGSNMPLATLGTFILWLGWFGFNGGSQLMLSDFENASAVGQIFLNTNAAAAAGAVAALAVCKTMWGKADLTMILNGALAGLVAITADPLSPSPIASVIVGVVAGALVIFSIIMLDKIKIDDPVGAISVHGVCGFFGLMVVPFSNGDASFGAQLLGAAVIFAWVFTASFVVWFVIKVTIGIRVTEEEEMAGMDLHDCGVDAYPEFVSLK

SEQ ID NO: 29663 - protein, 323 aa, Photobacterium profundum SS9
MSEKFDFCAHGRKVLEIEIAALQQISQYINGCFTQACELILSSHGKVIVMGMGKSGHIGNKIAATLASTGTPSFFVHPGEASHGDLGMIEKGDVVLAISNSGEASEILSLLPVIKRLGIPLISVTGKPESSMAKFSQVHLQITVAAEACPLNLAPTSSTTATLAMGDALAIALMEARGFTANDFALSHPGGALGRKLLLCIADVMHTGDLLPIIDEAATIKDALLEVSRKGLGMTAVVNSEQQLTGIFTDGDLRRLLDKRVDIHNTAIGDVMGRNPSTIEANVLAAEGLKLMEDNKINGLLITENGQLVGALNMHDLLKAGVM

SEQ ID NO: 29664 - protein, 459 aa, Photobacterium profundum SS9
MSLVDSYVNPYTSLTVAKFGGTSVADFTAMSRSAAIILHAPQTRLVLISACSGVTNILVELANGVTDTQQRHALLTRLTDIHQSVLSQLKQPQQADEAITLLLKNVAELAKKAAIEKSVALTDQLVSHGELLSTHLFAQILRELGIKAIRFDIRDVMRTDGQFGKAIPQPSIIRQLSEQHLLPQLKKHVVVSQGFIGSDEQGNTTTLGRGGSDYSAALMAEAIGASTLEIWTDVPGMYTTDPRIATKAKPIKEISFSEASEMANFGAKILHPSTLVPAIRQQIPVFIGSSKAPEQGGTWIRETVSDAPLFRALALRCNQTMVTLTSLNMFHAYGFLAEVFRILAEHKISVDLITTSEVSVSLTLDQTDTSGGAPTLPAQALAELSELCRVEVEQDLCLVALIGNQMSSTKGSAKTVFSTLEYYNLRMICYGASPHNLCFLVKAQDAKSAIKDLHCAIFE

SEQ ID NO: 29665 - protein, 394 aa, Photobacterium profundum SS9
MISQQTIDIVKATAPVVAETGPKLTAHFYERMFNHNPELKDIFNMSNQRNGDQREALFNAICAYANNIDNLAALLPAVEKIAHKHTSFMITAEQYQIVGGHLLATIDELLSPGQEVLDAWGEAYGVLANVFITREEAIYQENEEKTGGWRGTREFTLIEKTQESDVITSFTFKPADGGTVSNFKPGQYLGIYLTPDAFEFQEIRQYSLSSAPRTDNYRISVKREEGGKVSNYLHNELTVGDTVQLAAPAGDFFLDVPATTPVTLISAGVGLTPTLSMLDALTEHQASVHWLHATENGSHHAFKDYVNTLADKYDHISATTWYREPLATDRPAEDFDYQGMIDLKAVASQLIDPAMHYYFCGPVGFMQHVAKQLIELDVQEDNIHYECFGPHKVL

SEQ ID NO: 29666 - protein, 484 aa, Photobacterium profundum SS9
MNSQILIPLVIYLFAVFALAFFTRGKSTSSKGFLSEYLIGNRSMGGFVLAMTLAATYSSASSFIGGPGAAYKMGLGWVLLAMIQLPAAWLTLGVLGKKFAIEARRHNALTLNDILYARYKNKAVVILASLALLLAFFGTMVVQFVGGARLLQTVTGLPYSQGLMIFAVTVGLYTTIGGFRAVVMTDTLQGVMMIIGTIALLAGVVHVGGGVGELITELHHIDPSLITPFGPDNFLSQPFMLSFWILVCFGVIGLPHAAVRCMAYKDSRSLHRGMVISTAMVAFLMLGMHLSGALGRAIVPDIASPDQIMPTLMMTVLSPWVAGIFLAGPMAAIMSSIDSQLIQASATLLKDLYLNYINPKAAEGPNANKHLSKLSLWVTGIFSILVFIAATNPPEMIIWLNLLAFGGMQAVFLWPLVLGLYWEKASATGALASMVSGLVCYISLSVIKPDLSGLHAIVPTLGVSLIAFVLGSLTKPAMVTAPQH

SEQ ID NO: 29667 - protein, 317 aa, Comamonas sp. JS46
MLKVKITSKALEARDIVSLELLSLDGAELPAFEPGAHIDLHVLPGVVRQYSLCGSPLLRHGYRVAVLRDPASRGGSAAVHDVLNEGDIVTIGMPTNLFPLAVSPHSLLFAGGIGITPILSMAQRLSRDCASFELHYCARSRERMAFLQEIGNSLAPDQLHLHLDDGSPEQRLDVQDILQRSAPGSHLYVCGPAGYISHVTDTARRLGWDEARIHFEHFGNAAAAHAGGDRPFRICIASSGRIVEVGAQEPATVALARAGLHVPVACEQGICGTCLTRIVEGVPEHRDMYLTEREKAANDQFLPCCSRAAGDLLVVDL

SEQ ID NO: 29668 - protein, 482 aa, Streptomyces lavendulae
MSKVLTSLPAGERVGIAFSGGLDTSVAVAWMRDKGAVPCTYTADIGQYDEPDIASVPSRASAYGAEITRLVDCRAALVEEGLAALACGAFHIRSGGRPYFNTTPLGRAVTGTLLVRAMLEDGVQIWGDGSTFKGNDIERFYRYGLLANPHLRIYKPWLDADFVTELGGRKEMSEWLLAHGLPYRDSTEKAYSTDANIWGATHEAKTLEHLDTGIETVDPIMGVRFWDPSVEIATEDVTVGFEQGRPVSINGKEFASAVDLVMEANAIGGRHGLGMSDQIENRIIEAKSRGIYEAPGMALLHIVYERLVNAIHNEDTLAAYHNEGRRLGRLMYEGRWLDPQALMIRESLQRWVGTAVTGEVTLRLRRGEDYSILDTTGPAFSYHPDKLSMERTEDSAFGPVDRIGQLTMRNLDIADSRARLEQYVGLGLVGTPHPTPIGAAQAAATGLIGAMDEGGAEAIASRGEATDEETMLDRAAMESGTD

SEQ ID NO: 29669 - protein, 1465 aa, uncultured proteobacterium RedeBAC7D11
MDHRGGCGFEENTGDGAGILLALPHEFFKEEAKKLNINLPEKGNYAVGNIFFPQKKSEKDFCKKTIEDVLKQEKLELLGWRQVPIDSKKADVGPAALDCKPGIEQIFIKAPKNIDQNDFERKLYLVRKIFTKKLRQESNLSQALMFYACSLSSRLIVYKGMLTPSQLFPFFPDLEDKSFETHLAMVHSRFSTNTFPSWDRAQPCRYMCHNGEINTLKGNMNLMQSRQGKASSDLYKNKISKLFPIAEPDCSDSGSFDNVLELLIMTGRKLPEAVMMMIPEAWQNDKNMAKAKKDFYQYSSSLMEPWDGPASIVFTDGTQVGAVLDRNGLRPSRFYVTDNDKVIMASEVGVLEVEPKTVLRKGRLQPGKMFLIDFDKGKLISDEEIKKEVANQHPYGNWNSNQIIELDDLPDKSKKHVVSDLISKMKAFGYTTETLEFMLLPLVTELRDPLGSMGNDAALACLSDKPRMIYDYFKQLFAQITNPPIDSIREEIIMSLECLIGPEGNLLSTDENNVKRLRLEHPILSNQELEKIRSIKTKGYKSKTIDITYQKGLRKEGLTKALDKICRESLKAIDEGYSFIILSDKSITSEKLALSTLLACSTVHNFLVKKEKRTQIGIVLESGEAREVHHHCLLIGYGADAINPYLAFAVLEKSLEDGALEDKNLNNSSDLVKAYKKGVAKGMLKVMAKMGISTLQSYKGAQIFEAVGLSDEIIEKSFPGTPSRVQGVTFDILSEEMERRHVMGFPESLEINVTALPNPGDFHWRNGGDSHMWDPKSISALQIAARNNDESAYWNFSNHANEETTKNSTLRGLMKFKYTKNPLPLDKVEPEKEIVKRFATGAMSLGSISTEAHESLALAMNKLGGKSNTGEGGEDPIRFKPLEDGSSKRSAIKQVASGRFGVTMWYLTNADELQIKIAQGAKPGEGGELPGTKVDKYIAKIRHSTPGVGLISPPPHHDIYSIEDIAQLIHDLKNANRSSRISVKLVSEIGVGTIAAGVVKAKTDHLVIAGHDGGTGASPLTSIKHAGLPWELGIAETHQTLVMNNLRSRVVLQTDGQLKTGRDVAIAAILGAEEFGFSTAPLVTLGCIMMRKCHLNTCPVGIATQDKELRKKFKGSPENVVNYLFMVAKELRMIMANLGITKLDDLIGRVDLLEMDNAIDHWKRDGLDLSKILSPAEIIYKDTEVFNTQKQNHNLEKSLDIKLLKKIKNHIKTKKRIVIDSKIGNTNRVFGTIISNEVAKSWGAAGLPNDTLRFNLTGSAGQSFGAWATKGMTLSLEGDANDYVGKGLSGGKLIIYPPADSSFIPEENIILGNVALYGATDGEAYFRGIAAERFCVRNSGAKVVVEGIGDHGCEYMTGGRAVILGPTGRNFGAGMSGGIAYVYDPKNNFKKNCNMSTFDLEKLVINEDKEELKTLIANHHRYTKSDVAKKILSNWNNELANFKKVMPIDFKRVLMETNNQKLKAS

SEQ ID NO: 29670 - protein, 280 aa, Methanococcus vannielii
MEVIRMVDINPPDKMVEIAGNVGQVKGSLSPSQLLVRGIMGGAYIAMGGGLATIVGTGIGEAMGLGFGKFMAAAVFPVGLIMIILTGMELVTGDMMLLPVAVFQKKASYAQLIKVWTCVYIGNLIGSLIYAAMMVFGPLQSIDAATGQLTVNSFGQAAIGTANAKVLPYMAGGAIGWFSALVKGIGCNWLVNLAVIGSMASTSVLGKVFMIWFPIMSFVATGFEHSVANMYFIPAGMMLGANITVLDWWIWNIIPVTIGNIIGAVLFVSMIYQFAYGKKI

SEQ ID NO: 29671 - protein, 448 aa, Gracilaria gracilis
MGNVTRKAAVQNGKSKAATLVDEAIQTNPVVIFSKTYCPYCQSAKSNIRSALKKIANAPKPEIFELDRMGSLGYQIQNYLAQVTGRHTVPNVFIGGSSVGGGDDIAAYARRGVLVQMLTQAPQRLVHQFPERFEPEKKPDTAAEAVERAIKDNAVMVFSKSYCPFCTSAKDLLQERIAAVEGLNPINVFELDEMGTDGAAMQQYLFQKTGQRTVPNIFIAGKHVGGSDDVHGLDARNELIPMLTSAAASVSSPAATEVLSAEEEQTETDTALPADVVSEEKPKTETKEIVFGAGCFWGVELAFQRVAGVLKTEVGYSNGKMSRVTYDAICTGATGSAEVVRVWYDPSVLFLKQLLEVWESRHDPTSLNKQGNDQGTQYRSAIYYSDEEQAEEVRRWISEASTRHTKEIVTEVAAIKNYCAAEEYHQRYLEKKGQSAEKGSSASIRCYG

SEQ ID NO: 29672 - protein, 280 aa, Methanobacterium formicicum
MASSFKSPADTAKACVGVAALKEKAPLSNLIVLSFVAGAYIAFGGLLAEVATGGMAAAGWPTGLVKLVFGGVFPVGLMLVVIAGSELFTGNCMYMPMGILQGEASVMGTIKNWVGSWVFNLVGALFVAYVLAYLTGILTAEPWAATAVTIAKTKALGGAQFIAAGKTVTSLSWMQVFWRAIGCNWLVCLAVYLAVASDDVIGKSFGIWFPIMAFVCIGFEHVVANMFFIPVGIFIGGVTWSQFFINNMIPATLGNIVGGAIFVGCIYWFTYLRGTNKAKA

SEQ ID NO: 29673 - protein, 1536 aa, Antithamnion sp.
MQVSKYFTHQLSQFSGYPSIVSERDACGVGFIANLNSKPSNKIVTEALNALSCMEHRGGCGADNISGDGAGVTIQIPWDIFISEGINFLPKLQSNQSILNYGVRMILRSSDDLDKIKKIFSWALDEYQLDLISWRNVPVDKSILGEESKFNQPLVVQCIVRSNNLIDYKLDKHLYLVRKKIEKLVSKLDINTNKQFYICSFSSKTIVYKGMLRSEFLVKYYNDLSNSLYVSNFAMYHRRFSTNTMPKWSLAQPMRFMAHNGEINTLLGNLNWNKSKESLLKSSIWSDYYDILSPITNLENSDSANLDSVLELFIHSGRTPQEALMILIPEAYKNQPALSLFPEITDFYEYYSILQEPWDGPALVVFTDGKFVGATLDRNGLRPARYTITDDGFISLSSETGVSNINSQNVVTKGRLGPGQMLCVDLSKNLVLDNWMIKQQISQKFPYKEWVNKYQSNLNLLEYLNDFTFDKVQMNRWHTAFGYTNEDVELVIEHMASSAKEPTFSMGDDTPLPILSEKPHLIYDYFKQRFAQVTNPAIDPLRESLVMSLITYLGPKGNILEPTAIMAKSIKLESPIINENELAQLNSFNLSVVTVPTFIDKHLSTQTFVDKILEICSQCDSYISQGIEILVLSDRIEILPVDKIFVSPLLIVGAVHHYLIKKQLRHKVSLVIDTGQCWTTHHFALLIGYGASAICPYLAFLTVRQWWHNSRTQKLMSTGKLSRLTIQESQDNYRSAIEKGLLKILSKMGISLLSSYHGAQIFEILGLGQDVVDLAFSGTVSRLNGMTLNELYEDSLKSYNLAFITEIPKKLPNLGYVQYRPSAEYHVNNPEMSKTLHKAVRNNDNILYSKYKSLLNDRRPTNLRDLLELKTDRQPISIDQVEDVNSVLMRFCTGGMSLGALSRETHETLAIRMNRIGGKSNSGEGGEDSTRFKSIQDLDTSGVSRTFSHLKGLKINDLASSAIKQIASGRFGVTPEYLVNAKQLEIKIAQGAKPGEGGQLPGKKVSPYIAELRNCKPGVTLISPPPHHDIYSIEDLAQLIFDLHQINPDAQVSVKLVASLGIGTIAAGVAKGNADIIQISGHDGGTGASPLSSIKHAGAPWDVGLAEVHTTLVENSLREKVILRVDGGLRTGKDIIIAALMGAEEFGFGTVAMIATGCVMARVCHTNNCPVGVATQRQDLRNRFPGIPSDVVNFFIFVAEEVREILAELGYKSLEELIGLNDLFKVKDIELSKTKNLNLNILFNSINMNRNLIPKLKHKTVHTNGNVLDDILLSKSNIINAINLQSNIVQDIEILNTDRCVGARISGLITKMYGRDNFNGNLQLNFVGSAGQSFGAFISKGIHLYLKGEANDYVGKGMNGGEIIICPPIEQKTSSSNQVILGNTCLYGATGGYLFANGQAGERFAVRNSNGYSVVEGVGDHACEYMTGGLIVVLGTFGRNIGAGMTGGIAYFLDEDNTLKNKLNTEIVKAQRLLTKESEEQLKNIMELYEIKTKSEKAKLILDNWSQYLAKFYQIVPPSEQIQHLLMLIFFFSKYC

SEQ ID NO: 29674 - protein, 316 aa, Gossypium hirsutum
MASTIPIVTLLIVMLSCHAANAQLSPNFYASSCPNLQTIVRNAMSRAVNRETRIGASILRLFFHDCFVNGCDGSILLDDTATFTGEKNAVPNRNSARGFEVIDTIKTNVEAACSATVSCADILALAARDGVALLGGPTWQVPLGRRDARTASQSAANNQIPSPFANLATLTSSFAAKGLSTRDLTALSGGHTIGLARCTTFRGRIYNDTNIDANFAATRRANCPASGGDNNLAPLDIQTPTRFDNDYFRNLVARRGLLHSDQELFNGGSQDALVRTYSNNPATFSADFAAAMVKMGNISPLTGTQGEIRRNCRVVN

SEQ ID NO: 29675 - protein, 424 aa, Blastocladiella emersonii
TLIDKLMEKTKKVVGSSDKDAPAPASPSSPSTAAGAGSASSTASSTTTAAASGNLSIPSPLVAGSTTSSSISHAQKMATAAHTNSDYSPSPAATPSAPLDAVAERRRRKTTLADLELRQTLGTGSFGRVHLVRLRSTGKYYAMKVLKKAEVVKHKQVEHTLNEKGILEQIDHPFLVALHSSFQDSANLYMVMEYVTGGELFTYLRRSQRFSNNVAKFYAAEVVLAFEYLHSKDIIYRDLKPENLLLDAQGHVKITDFGFAKHVPDITWTLCGTPDYLAPEIIQSRGYGRAVDWYALGVLIFEMLAGYPPFYDEDHVRMYEKILQGKVKWPSHFDPAAKDLLKRLLTTDLTKRYGNLKGGSKDIKMHKWFAGLDWTKLFNKQIPPPYTPPNRGDGDTSNFDAYPEETEPYGKVQPDPYAQLFKDF

SEQ ID NO: 29676 - protein, 1284 aa, Emericella nidulans
MKSTAESKETPSQDESTTSVPCTEAPLVEEGEEASFGAYKRIFTFAGRTELILQAVAILAACASGAGIALQNLIFGQFVTVITDFTNGISTPADFRDNAAELALYFVYLGIARLVLSYTYNTLLTYAAYRIVRNIRHAYLKAALSQEVAYYDFGSGGSIAAQATSNGKLIQAGASDKIGLLFQGLAAFVTLSLSRLWCKWKLTLICICIPVATIGTTGVVAAVEAGHETRILQIHAQANSFAEGILAGVKAVHAFGMRDSLVRKFDEYLVEAHKVGKKISPLLGLLFSAEYTIIYLGYGLAFWQGIHMFGRGEIGTAGDIFTVLLSVVIASINLTLLAPYSIEFSRAASAAAQLFRLIDRESEINPYGKEGLEPERVLGDVELENVTFSYPTRPGITVLDNFSLKVPAGKVTALVGQSGSGKSTIVGLLERWYNPTSGAIRLDGNLISELNVGWLRRNVRLVQQEPVLFQGSVFDNIRYGLVGTPWENASREEQMERVQEAAKLAYAHEFISELTDGYDTLIGERGGLLSGGQKQRVAIARSVVSQPKVLLLDEATSALDPHAETIVQKALDKAAEGRTTIVIAHKLATIRKADNIVVMSKGHIVEQGTHESLIAKDGVYAGLVKIQNLAVNASAHDNVNEEGEGEDVALLEVTETAVTRYPTSIRGRMNSIKDRDDYENHKHMDMLAALAYLVRECPELKWAYLVVLLGCLGGCAMYPGQAILMSRVVEVFTLSGDAMLDKGDFYASMLIVLAAGCLICYLAVGYATNTIAQHLSHWFRRLILHDMLRQDIQFFDREENTTGALVSRIDSYPHAILELMGYNIALVVIAVLQVVTCGILAIAFSWKLGLVVVFGGIPPLVGAGMVRIRVDSRLDRQTSKKYGTSSSIASEAVNAIRTVSSLAIEETVLRRYTEELDHAVSSSVKPMAATMICFGLTQCIEYWFQALGFWYGCRLVSLGETSMYSFFVAFLSVFFAGQASAQLFQWSTSITKGINATNYIAWLHQLQPTVRETPENHDKGPGSGAPIAMDNVRFSYPLRPDAPILKGVNLKINKGQFIAFVGSSGCGKSTMIAMLERFYDPTTGSITIDASTLTDINPISYRNIVALVQQEPTLFQGTIRDNISLGVFNPNTQPFFSDKDAVKSVSDEQIESALRAANAWDFVSSLPQGIYTPAGSGGSQLSGGQRQRIAIARALIRDPKILLLDEATSALDTESEKIVQKALEGAARDGDRLTVAVAHRLSTIKDANVICVFFGGKIAEMGTHQELIVRGGLYRRMCEAQALD

SEQ ID NO: 29677 - protein, 1348 aa, Emericella nidulans
MSPLETNPLSPETAMREPAETSTTEEQASTPHAADEKKILSDLSAPSSTTATPADKEHRPKSSSSNNAVSVNEVDALIAHLPEDERQVLKTQLEEIKVNISFFGLWRYATKMDILIMVISTICAIAAGAALPLFTILFGSLASTFQRIMLYQISYDEFYDELTKNVLYFVYLGIGEFVTVYVSTVGFIYTGEHATQKIREYYLESILRQNIGYFDKLGAGEVTTRITADTNLIQDGISEKVGLTLTALATFVTAFIIAYVKYWKLALICSSTIVALVLTMGGGSQFIIKYSKKSLDSYGAGGTVAEEVISSIRNATAFGTQDKLAKQYEVHLDEAEKWGTKNQIVMGFMIGAMFGLMYSNYGLGFWMGSRFLVDGAVDVGDILTVLMAILIGSFSLGNVSPNAQAFTNAVAAAAKIFGTIDRQSPLDPYSNEGKTLDHFEGHIELRNVKHIYPSRPEVTVMEDVSLSMPAGKTTALVGPSGSGKSTVVGLVERFYMPVRGTVLLDGHDIKDLNLRWLRQQISLVSQEPVLFGTTIYKNIRHGLIGTKYENESEDKVRELIENAAKMANAHDFITALPEGYETNVGQRGFLLSGGQKQRIAIARAVVSDPKILLLDEATSALDTKSEGVVQAALERAAEGRTTIVIAHRLSTIKTAHNIVVLVNGKIAEQGTHDELVDRGGAYRKLVEAQRINEQKEADALEDADAEDLTNADIAKIKTASSASSDLDGKPTTIDRTGTHKSVSSAILSKRPPETTPKYSLWTLLKFVASFNRPEIPYMLIGLVFSVLAGGGQPTQAVLYAKAISTLSLPESQYSKLRHDADFWSLMFFVVGIIQFITQSTNGAAFAVCSERLIRRARSTAFRTILRQDIAFFDKEENSTGALTSFLSTETKHLSGVSGVTLGTILMTSTTLGAAIIIALAIGWKLALVCISVVPVLLACGFYRFYMLAQFQSRSKLAYEGSANFACEATSSIRTVASLTRERDVWEIYHAQLDAQGRTSLISVLRSSLLYASSQALVFFCVALGFWYGGTLLGHHEYDIFRFFVCFSEILFGAQSAGTVFSFAPDMGKAKNAAAEFRRLFDRKPQIDNWSEEGEKLETVEGEIEFRNVHFRYPTRPEQPVLRGLDLTVKPGQYVALVGPSGCGKSTTIALLERFYDAIAGSILVDGKDISKLNINSYRSFLSLVSQEPTLYQGTIKENILLGIVEDDVPEEFLIKACKDANIYDFIMSLPEGFNTVVGSKGGMLSGGQKQRVAIARALLRDPKILLLDEATSALDSESEKVVQAALDAAARGRTTIAVAHRLSTIQKADVIYVFDQGKIVESGTHSELVQKKGRYYELVNLQSLGKGH

SEQ ID NO: 29678 - protein, 578 aa, Arabidopsis thaliana
MVSRKCVEEFGYASYLVPSNARAPRSARKRRSIEKRISKEDDNMCAIDLLATVAGHLPFESGSSLMSIDKLIEDHRVKEEFPEEEKPLMPVALSPYRGSLSPCGFSSVINGKVENEVDGFSYSGGSDACQVGNFSQDVKPDIDGDAVVLDARPNVVVSLGSSSRTEVPSIGNCVSHGVRDDVNLFSRDDDENFSKYIHPRVTKHSPRTVPRIGDRRIRKILASRHWKGGSRHSDTKPWRNYYLHQQRSYPIKKRKNFDHISDSVTDDYRMRTKMHRGSRKGQGASFVASDSHVKLRIKSFRVPELFIEIPETATVGSLKRMVMEAVSTLLSDGHRVGLMVQGKKVRDDNKTLHQTGISQDNSHLDSLDFSLEPSSEMPQLLTSHPLGHACEELLPVCQATKIDNVLESDHHDSALFPSDSLGNNNVTEDSKAMISVALNELSSQSQPPSRKSRRSEQQQQQAAQRRIRRPFSVAEVEALVQAVEKLGTGRWRDVKLCAFEDADHRTYVDLKDKWKTLVHTAKISPQQRRGEPVPQELLNRVLNAHGYWTQQQMQQLQQNVNKLEQETQSQTTEGLLLL

SEQ ID NO: 29679 - protein, 392 aa, Pseudomonas stutzeri
MLCAEQIALIKATVPLLESGGEALTTHFYKLWLDEHPEVQPLFNQAHQASGEQPRALANGVLMYAKHIDRLEALGPLVGQIINKHVALQVLPEHYPLVGSCLLRAIREVLGEEIATEAVIDAWGAAYQQLADILIGQEESLYRAKAAAEGGWRGARPFRIIRKVAESEEITSFHLQPEDGGPLMDFLPGQYIGLRLEVDGQEVRRNYSLSAASNGSEYRISVKREPGGVASNALHAMPEGAVLELFGPAGEFTLEPGNKPLVLISGGVGITPTLAMLEQALASTRPVHFIHCARNAGVHAFRCSVDTLAERHAQLKRFYCYEEHDGAGAAPDAVGRLTEQQLGEWLPEDRNVDAYFLGPKPFMAAVRRQLKSLGVPEQQTRYEFFGPASALD

SEQ ID NO: 29680 - protein, 197 aa, Solanum tuberosum
MRVISKLTLLIISIGCIFQVSSLGADASSLLPLILDQMIGSNPANTFLDPFKVLEQIPFGLENREETTLPLSIARVDWKETAEGHVISIDVPGLKKDDIKIEIEENRVLRVSGERKKEEEKNDEQNHWHCVERSYGKFWRQFRLPENADIDTMKAKLENGVLTISFAKLSADRIKGPKVVSIESKQEGKESSVREEL

SEQ ID NO: 29681 - protein, 338 aa, Solanum lycopersicum
MRSAGRMGIHYMQKLHASNVPKELVEKGQNRVIEASLTLIRERAKLKGELVRALGGAVASTSLLGVPLGHNSSFLQGPAFAPPRIREAMWCGSTNSTTEEGKELDDPRILTDVGDVPVQELRDAGVDDDRLMSIISESVKLVMEENPLRPLVLGGDHSISYPVVRAVSEKLGGPIDILHLDAHPDIYHAFEGNKYSHASSFARIMEGGYARRLLQVGIRSINKEGREQGKRFGVEQYEMRTFSQDRQFLENLKLGEGVKGVYISVDVDCMDPAFAPGVSHIEPGGLSFRDVLNILHNLQADVVGADVVEFNPQRDTVDGMTAMVAAKLVRELTAKISK

SEQ ID NO: 29682 - protein, 338 aa, Solanum lycopersicum
MKSAGSMGINYMQKLLTSNVPKEVVKRGQDRVVEASLTLIRERAKLKGELVRGLGGAVASTSLLGIPLGHNSSFLQGPAFAPPLIREAIWCGSTNSTTEEGKILDDQRVLTDVGDLPVQELRDTGIDDDRLMSTVSESVKLVMDENPLRPLVLGGDHSISYPVVRAVSEKLGGPVDILHLDAHPDIYDAFEGNKYSHASSFARIMEGGYARRLLQVGIRSINLEGREQGKRFGVEQYEMRTFSRDRQFLENLKLGEGVKGVYISVDVDCLDPAFAPGVSHFESGGLSFRDVLNILHNLQGDIVGADVVEYNPQRDTADGMTAMVAAKLVRELAAKMSK

SEQ ID NO: 29683 - protein, 401 aa, Streptomyces nodosus
MVDSYVYAAARTPFGRFRGALSDVRPDDLAALAVSGVLAGTPSLDPAAIGDVVWGNANGAGEDNRNVGRMAVLLAGLPTSVPATTVNRLCGSSLDAAIIASRAIETGDTDIVLTGGVESMTRAPWVLPKPSRGFPAGDMTAVSTTLGWRLVNERMPAEWTVSLGEANEMLAEEFGISRERQDEFAARSHHLADEAWASGFYDDLVVPVEVGGDGGPFSRDEGIRPGSTARKLAGLKPAFRPDGVITAGNASPLNDGASAVLLGSREASSRIGLAPQARIAGRGVSALEPRMFGFAPVEAAGRALRRAGISWSDVSAVELNEAFAVQSLACVDAWGIDPGIVNAKGGAIAIGHPLGASGGRLLGTLTARLRESGGRWGVAAICIGVGQALAVVLENVTEDRA

SEQ ID NO: 29684 - protein, 1132 aa, Physcomitrella patens
MSTPKKTYSSTSSAKSKAHSVRVAQTTADAALQAVFEKSGDSGDSFDYSKSVSKSTAESLPSGAVTAYLQRMQRGGLTQSFGCMIAVEGTGFRVIAYSENAPEILDLVPQAVPSVGEMDTLRIGTDVRTLFTASSVASLEKAAEAQEMSLLNPITVNCRRSGKQLYAIAHRIDIGIVIDFEAVKTDDHLVSAAGALQSHKLAAKAITRLQALPGGNIGLLCDTVVEEVRELTGYDRVMAYRFHEDEHGEVVAEIRRADLEPYLGLHYPGTDIPQASRFLFMKNKVRIIADCSAPPVKVIQDPTLRQPVSLAGSTLRSPHGCHAQYMGNMGSIASLVMAVIINDNEEDSHGSVQRGRKLWGLVVCHHTSPRTVPFPLRSACGFLMQVFGLQLNMEVESAAQLREKHILRTQTLLCDMLLRDAPIGIVSQIPNIMDLVKCDGAALYYGKPFWLLGTTPTESQIKDIAEWLLEYHKDSTGLSTDSLADANYPAAHLLGDAVCGMAAAKITAKDFLFWFRSHTAKEIKWGGAKHDPGENHDGRKMHPRSSFKAFLEVVKRRSLPWEDVEMDAIHSLQLILRGSFQDIADSDTKTMIHARLNDLKLHDMDELSVVANEMVRLIETATAPILAVDSNGMINGWNAKIAQVTGLPVSEAHGRSLVKDLVTDESVAVVERLLYLALRGEEEQNVEIKLKTFGTQTEKGVVILIVDACSSIHVSENVVGVCFVGQDVTGQKMFMDKFTRIQGDYKTIVQNPHPLIPPIFGADEFGYCFEWNPAMEGLTGWKKDEVVGKLLVGEIFGMQMMCCRMKSQDAMTKFMIALNTAMDGQSTDKFTFSFFDREGKYVDVLLSTNKRTNADGVITGVFCFLQIASSELQQALKVQRATEKVAVAKLKELAYIVREIKNPLCGLTFTRQLLEDTDLSDDQQQFLDTSAVCEQQLQKSLNDMDLESIEDGYLELDTAEFEMGTVMNAVISQGMTTSREKGLQIFRETPREINTMRLLGDQIRLQQVLSDFLLNTVRFTPSPEGWVKIKVVPTRKRLGGSVHVVHLEFRVSHPGAGLPEELVLEMYDRGKGMTQEGLGLNMCRKLVRLMNGDVHYVREAMQCYFVVNVELPMAQRDDASSQCRSLYSYLLA

SEQ ID NO: 29685 - protein, 165 aa, Arabidopsis thaliana
SASRASNEDNDDENGSTRKKLRLSKDQSAFLEDSFKEHSTLNPKQKIALAKQLNLRPRQVEVWFQNRRARTKLKQTEVDCEYLKRCCESLTEENRRLQKEVKELRTLKTSTPFYMQLPATTLTMCPSCERVATSAAQPSTSAAHNLCLSTSSLIPVKPRPAKQVS

SEQ ID NO: 29686 - protein, 208 aa, Arabidopsis thaliana
NSTISSTISGKRSEREGISGTGVGSGDDHDEITPDRGYSRGTSDEEEDGGETSRKKLRLSKDQSAFLEETFKEHNTLNPKQKLALAKKLNLTARQVEVWFQNRRARTKLKQTEVDCEYLKRCVEKLTEENRRLQKEAMELRTLKLSPQFYGQMTPPTTLIMCPSCERVGGPSSSNHHHNHRPVSINPWVACAGQVAHGLNFEALRPRS

SEQ ID NO: 29687 - protein, 315 aa, Arabidopsis thaliana
MSERDDGLGLSLSLSLGFNQKDPSSRLNPMPLASYASSSHMQHMQQSNYNHPQKIQNTWINMFQSSERNSDMRSFLRGIDVNRAPSTVVVDVEDEGAGVSSPNSTVSSVMSGKKSERELMAAAGAVGGGRVEDNEIERASCSLGGGSDDEDGSGNGDDSSRKKLRLSKEQALVLEETFKEHSTLNPKQKMALAKQLNLRTRQVEVWFQNRRQRTKLKQTEVDCEYLKRCCENLTDENRRLQKEVSELRALKLSPHLYMHMKPPTTLTMCPSCERVAVTSSPSSVAPPVMNSSSPMGPMSPWAAMPLRQRPAAGSH

SEQ ID NO: 29688 - protein, 274 aa, Arabidopsis thaliana
MGFDDTCNTGLVLGLGPSPISNNYNSTIRQSSVYKLEPSLTLCLSGDPSVTVVTGADQLCRQTSSHSGVSSFSSGRVVKRERDGGEESPEEEEMTERVISDYHEDEEGISARKKLRLTKQQSALLEESFKDHSTLNPKQKQVLARQLNLRPRQVEVWFQNRRARTKLKQTEVDCEFLKKCCETLADENIRLQKEIQELKTLKLTQPFYMHMPASTLTKCPSCERIGGGGGGNGGGGGGSGATAVIVDGSTAKGAFSISSKPHFFNPFTNPSAAC

SEQ ID NO: 29689 - protein, 274 aa, Arabidopsis thaliana
MGFDDTCNTGLVLGLGPSPISNNYNSTIRQSSVYKLEPSLTLCLSGDPSVTVVTGADQLCRQTSSHSGVSSFSSGRVVKRERDGGEESPVEEEMTERVISDYHEDEEGISARKKLRLTKQQSALLEESFKDHSTLNPKQKQVLARQLNLRPRQVEVWFQNRRARTKLKQTEVDCEFLKKCCETLADENIRLQKEIQELKTLKLTQPFYMHMPASTLTKCPSCERIGGGGGGNGGGGGGSGATAVIVDGSTAKGAFSISSKPHFFNPFTNPSAAC

SEQ ID NO: 29690 - protein, 340 aa, Picea abies
MARIKHSPGLTLQFQSVLITAVALMLWIQTLDAQSCNGLSHHFYYKSCPKAQAIIKSMVEDAVKKEARIAASLLRLHFHDCFVKGCDASLLLDDNASFTGEKTAIPNKNSLRGFEVVDKIKSNLEKACPGVVSCADILAVAARDSVAISGGPFWKVLLGRRDSRSASKSGANEDLPAPNSTHQTLETKFKLQGLNVVDLVALSGAHTIGLARCASFKQRLYNQTGNKPDQTLDTTYLKQLRTVCPQTGTDNNQTRPFDPVSPTKFDVNYYKNVVAGKGLLNSDEILYSTKGSRTAGFVKYYTTNTHAFFKQFAASMIKMGNISPLTGFHGEIRKNCRRIN

SEQ ID NO: 29691 - protein, 240 aa, Escherichia coli str. K12 substr. W3110
MTRKPRRHALSVPVRSGSEVGFPQSLGEVHDMLYDKSLERDNCGFGLIAHIEGEPSHKVVRTAIHALARMQHRGAILADGKTGDGCGLLLQKPDRFFRIVAQERLAFRKNYAVGMLFLNKDPELAAAARRIVEEELQRNTLSIVGWRDVPTNEGVLGEIALSSLPRIEQIFVNAPAGWRPRDMERRLFIARRRIEKRLEADKDFYVCSLSNLVNIYKGCVCRRICRVLSGSCGPASGMAI

SEQ ID NO: 29692 - protein, 251 aa, unidentified bacterium
MNTGDLAWVLISAALVWLMTPGLALFYGGLGERRNLLHTMFVPILIIGIATMVWFTVGYSLAFGGAGDIIGNFKHLFLSGVSFTHSTKSLTIPDGAFALFQGMFPIITAAIITGSVIGRVRIKAMIVFITLWLIFIYTPLAHMVWGGGLLAKLGAIDFAGGTVVHISSGVTGLVLALMIGHRHNDKHVPVRPSYVLIGGALLWVGWFGFNSGSALAANGIAVLALVNTWLASAAGVLTWGLAEYKMHGPGI

SEQ ID NO: 29693 - protein, 336 aa, Oryza sativa Japonica Group
MAHSFRSVRERQVVLRFYEIGWMGMPLRFRGGHRQMRWMRVWCLRTPRSPNPHRRMAPEWTARMTATRAHRLVFSLLRSLDFSLSPLIRSASASPFHTCASCSSWSLVSSSSSRFDFLFFSSLFRGGEGRGGRMAAQEQEQEKQQVKTSTTSSLPSSSERSSSSAPNNLKEGGGVESDEEIRRVPEMGGGGGSASSGAGADERQGKEDGKQQGGGGGGAAAAGGGQEQAPPARKRGRSAGDKEQNRLKRLLRNRVSAQQARERKKAYMTELEAKAKDLELRNAELEQRVSTLQNENNTLRQILKNTTAHAGKRGGGGGGKGGDGGGGGKKHHFTKS

SEQ ID NO: 29694 - protein, 624 aa, Oryza sativa Japonica Group
MIKGDSKQLASMYMKEEMIKGERQLGTHEDRLKDEVIKDGDKISDGNFFKSLQNISSTKEEVCSPGPIERSCMDSSLLNMKAQNKGQDDKLESTRAEMGEVREENERLKTLLSRISHDYRSLQTHFYDVLQQGRAKKLPDSPATDIEEPELVSLRLGTSTSKCKKEDKSTTSSEVKGSTEDFLKIKGGLSLGLSDCRVDANNSEKVQPDVMTLSPEGSFEDARDDTAETTEQWPPSKMLKNLRSVGAEAEDDIAPQPQVKKARVSVRARCDAPTMNDGCQWRKYGQKIAKGNPCPRAYYRCTVAAGCPVRKQVQRCADDMSILITTYEGTHNHPLSVSATAMASTTSAAASMLISGSSSTSLAAYPAAAASPALAFDASSKPPLIGGRPFFLPTAAAAAITSTPSYPTITLDLTSPAAAATSSHAAFSLSNRFSHTRYPSTGFTFSGSGPSSAPWPGYLSYGASLSAHPYNAGGGKSSSSFEAALSSINGSRQQGGGGGGGSAPPLYQMQQKAAAAAPPPPSVITDTIAKAITADPSFHTALAAAITSYVGKKGSPPASGGEDSKVGLKWGEHLGLGLTHSSLSTAAAAAASSSSQMFLQPSLGLSGSTTSASTSPVANREQAH

SEQ ID NO: 29695 - protein, 898 aa, Oryza sativa Japonica Group
MSIGFLNVDCGLTNRSTYNDTDTTLTYVSDREFVESGKSYDIMAQYMADATNEQEKTLRSFPDGQRNCYTLPTNSSKKYLIRATFTYGNYDGLNSSEKGSLFIFGLHIGVNFWTTVNLTKWDPSSTVWKEVITVAPDKSVSVCLINMGSGTPFISTLDLRPLQDTMYPFVNASTSVSYFSRIRFGSVDEYITRFPTDQYDRFWEGWVFTMHTFPWVNKSSNGKVAELPNIDTFGLPPAILGSASTINGNFSWLNISVSASNSLATDLELLPVFHFVELGNNGSKRIFDIYNVDEPQALFSNFSPPSFLSSMFHNWFLRKGRRAYFQLRKTPDSQLPPLINAYEVYSRVQVENFTTASSDVDSMKTIKEKYMVIKNWNGDPCSPREYIWNGLTCTYPNGGQNPRIVEINLSGSGLQGELEISFMKMSSLKKLDLSHNNLTGTIPDYQVNSLTVIDLSNNQLNGSIPDSILQRYKAGLLELRLEGNPICSKVRASYCGNKKNTRTRILLISVLVPVTSLLVVLFIFWRLCWKGKSRKSEEEDYDMYEEETPLHIDIRRFTYAELKLITNNFQSIIGKGGFGTVYHGILENNDEVAVKVLVETSIAESKDFLPEVQTLSKVHHKNLVALVGYCQNKKCLALVYDFMPRGNLQQLLRGGYDSLNWEERLHIALDAAQGLEYLHESCTPSIVHRDVKTPNILLDKNLVAKISDFGLSRAFNAAHTHISTVAAGTLGYLDPEYHATFQLTVKTDVYSFGIVLLEIVTGQPPVFMDPQTVHLPNWVRQKIANGSVHDVVDKKLLDQYDATHLQTVIDLAMNCLENASIDRPSMTEVVSVLKVCLPISSERQSATSTPRKKNVMDAEIPRQFQLMISGASTTSYEGSSFQSGYTGGVSEISHISGR

SEQ ID NO: 29696 - protein, 908 aa, Oryza sativa Japonica Group
MAVGLPIVFGCHDYSGFTNIDCGFVDGESYTDSTTNLTYVPDHEFVEGGTHHEVVPKLISGSTDEQEKTLRSFPDGQRNCYTIPSTSGKKYLIRTTFTYGNYDGLRSSENGSLFLFGLHIGVNFWTTVNLTKQDSSDTIWKEVLTVAPDEFIYVCLVNFGSGTPFISALELRQLDDPMYPFLNLFVSVSYFTRMRFGAVDDFITRYPTDLFDRFWEAAQCYSYPWLNLTTNQTVNKLPGNDNFQVPTLIVQKASTINSGFSWLNISITAGDNLNGQSLELLPIFHFAEIEKNRPNRTFQIYSDGNELHQAFSPSYLQVDSVYLRDRYLHESGTTFTLCKTNSSELPPLINAFEAYSLVRMENLTTDTIDVSSMKQVKTQYNVQRRSWNGDPCSPKEYTWEGVKCNYYDGKQNPRIILVNLSASRLSGWINPSFRNMSLEILDLSHNNLSGTIPYNQVNSLKSLNLSYNQLIGSVPDYLFKRYKAGLLELRLEGNPMCSNISESYCAMQADKAKKNTATLLIAVIVPVVAITLMLFLWMLCCKGKPKEHDDYDMYEEENPLHSDTRRFTYTELRTITNNFQSIIGNGGFGTVYHGILGNGEEVAVKVLRETSRALSKDFLPEVQTLSKVHHKNLVTFLGYCLNKKCLALVYDFMSRGNLQEVLRGGQDYSLSWEERLHIALDAAQGLEYLHESCTPAIVHRDVKTANILLDENLVAMISDFGLSRSYTPAHTHISTIAAGTVGYLDPEYHATFQLTVKADVYSFGIVLLEIITGQPSVLVDPEPVHLPNWVRQKIARGSIHDAVDSRLMHQYDATSVQSVIDLAMNCVGNVSIDRPSMTEIVIKLKECLLAGTGKKQLVSGSYKQKDAMDAGIARQFQLLISGVPIDGDGCACATHREEMINHCNGKMK

SEQ ID NO: 29697 - protein, 345 aa, Marinomonas mediterranea
MRGFFVTATNSAVEMLIANSNTFFILLGAIMVFAMHAGFAFLEVGTVRSKNQVNALVKIMTDFAISALVYFFIGYQIAYGINFFESAATLAEQSGYALVKFFFLMTFAAAIPAIISGGVAERARFYPMLISAAVIVGVAYPFLEGLIWNGNYGFQDWLETQFGAPFHDFAGSIVVHGFGGWVALAAIILLGTRNGRFRGDKLVAFAPSNIPFLALGAWILCIGWFGFNVMSAQTLDGISGLVAVNSLMAMVGGIIAAMILGKNDPGFIHNGPLAGLVAVCAGSDIMHPIGALATGLVAGALFTWLFTLIQQKFQHIDDVLGVWPLHGICGAWGGIAAGIFGLESL

SEQ ID NO: 29698 - protein, 476 aa, Haloarcula marismortui ATCC 43049
MAEQPVDVDPAGENIAGEAPAEEPEAVTDDTVVHDDDVELERTIGLVGGLAIGIGTMIGAGIFVFPGLAAANAGLAATLSFAIGGLIALLVALPTSELATAMPRSGGGYYFISRGMGTAYGAIVGLGLWLGLMFASAFYLVGLGHYASAVFAELGIGLPFSPVIGIGLLFGVALTALSIGGTENTAKLQNVVVGVLLVVLTGFLSYGVLDAVGVFGGGTVPEQFFSRGYFRVLTTAALVFTSYLGFAQVATVAGEIKQPSRNLPLAMVGSVLIVTVFYVVTIFVATSAFGAERLGEFGETAMVEVARDFLGLPGAVAILGAGLLATFSSANASILSASRAVYALSRDALLPRKASEVNLRYGTPHVALLSAGGPILVLVATGRVELLAEVASFLHLIMYGLMCIALLVLRRRNPEWYSPSYRVPGYPLVPVVGALASFGLIVFMQPASIGIGVVVMLASYLWYRYYAGDVTLKGDI

SEQ ID NO: 29699 - protein, 368 aa, Haloarcula marismortui ATCC 43049
MTDRNGDDIYGEKHKEANEPIFSGIPTFLKLPEVERDALDEENVDIGILGAPLDTATTIRPGTRYGPRAVRAASTVPSPPYEHFNIETGIDPFDTFSVADTGDAAVSPGDTRQSQLNIEDAVYEISEQATPIVIGGDHSISYPDIKGWAEANDYDDIGLIHFDCHADTGDEGLTGFEYDHGAWVKRVFDDDLMAGENYTLIGPRGFWPGPDTYEEMREAGMKWYTSMEVGGMDLDDIVTDAVQRATDGTDAVWVSFDVDVMEPAYAPGTGEPEPGGLIPREAIYMVREVVKALDPEDFGFDVVEVSPAYDTSDSSSYNGGVTSGLANRLIIEVMGSMALAEKGLESGDPIKPKEPLGPTEEAETPADD

SEQ ID NO: 29700 - protein, 645 aa, Haloarcula marismortui ATCC 43049
MLASDGVDRLASRCGIVIYVFDTEYRRMATSDASGISEIVGRLLVPLCAASGALVLAGFFFPTLVGEAVTGPAWLTIALVFFSSGLCYIALLPYSEDATAPAAADVLLRVRRTKVRRAIKEFLTQHEPAILAFPVLVFAAFFGLQIAFPARTTGAVDAAAATVLRDGGPLFLAAVFLSVCYCLFLLLGPWGEIKLGGPDTEPSYTYPTYFTLVFTAGIAAGLVFWGPTEALFHYDQPPPYIGAAAGSPGAVNGALVYTLFHWGVSAWSAYAVIGVPIAYFAFTRGAPLRVSTVLAPLLGVDELDSAWATLVDTLAVFATIGGIATSVALVSEQFLAGINYQWDVAAGEVGPVLFVGGLTLIFVVSSATGIHRGIRRIAGLNIVLFGLFALLIAAVGPRLFILQRGTQALGTYVVEFVPLSLHTGGQWVAAWTVWNWSWWFSWAPFAGLFIAALSRGRRVRTVVFTSVVATSAATMVWFLLLGGTSLFIQQTGQADILAAIAQRGGSEAVAGFPLFASLPLGQLLMFLFLALIIVFMATSADTSTLVVSVLATRRGMAPSATHIVFWGIFQGSVAVSVLLLGGAETLQALAVLTGGPFAVISLVAVGGLTVTWYRDEQGHTSLFRRAVRKLPDIQTHHDVDPPEKK

SEQ ID NO: 29701 - protein, 586 aa, Haloarcula marismortui ATCC 43049
MADSDDQTGGMSDGLQVELFHPESDREPGDTNIQAAGFDIHPVVFPVALAIIALFIAITILLGDTAASAYTWLFNTIGDTFGWFYLLAVNVFIITLLYFAFSKYGNIRIGGVEAEKEFSDFSWMAMLFSAGMGIGLMFFSVSEPLYYFQNPPSFFGAEAGTGAAASAAMAQTFFHWGFHPWAVYGLVGLGLAFFSFNRGLPLTFRSIFWPLLGERIYGWPGHIIDLVTVFATLFGLSTSLGLGVAQVNTGLSYVGGDMLGAVNIPTGTWPQVALIAGITLIATLSVAAGLDGGVKRLSTLNLYLMFALLGFLVIVGPTVYIFGTWTEGLGAYFGNILALGFFTGTLNEAANGTPTAWTVFYWGWWIAWSPFVGMFIARISKGRSVREFVLGVLFLPSMFSTLWLSVFGGSAMFNSLMGNGQALATYNEVGQTVAMFALLEQFPLGVISGLLATLLVITFFVTSSDSGSLVIDHLTSGGKHDVPRTQRIFWALTEGLVASILLIGGGLTALQTAAITTGLPFALILCLMCYTVYLGLDNEYQILESEEFAETIQDLSERDDVDVVTAGDEMVTDISDPGDDTATSTD

SEQ ID NO: 29702 - protein, 579 aa, Haloarcula marismortui ATCC 43049
MDDELRDRITEAAETNALLNAVKHDSEAQVGAIMGPLMGENPEFREYGDEIPGVIAPVVERVNGMDAEERRERLAELAPEKLEELEAEDEGEDHPLPDLPSAEEYDTVRMRVAPNPNGPWHIGHARMAAVVGTYKQRYDGEFICRFDDTDPETKRPDLDAYDAILDAIDYLGFEPDDVVNASDRVETYYEYARKLIDKGGAYTCSCPQGEFSDLKNNGEACPHRDKDAETTRSEFEAMVDGEYDSGEMVLRVRTDITHKNPALRDFVAFRMVDTPHPREAAEQYRCWPMLDFQSGLDDHLLGVTHIIRGIDLQDSAKRQQFVYDYFDWEYPEVIHWGHVQVDEYDVPLSTSSIAELIEDGELAGWDDPRAPTVASLERRGIRGEAVVDAMIQLGTSTSNVDLAMSSIYSNNRDLIDDDSDRAFFVRDSDDHGGLVERQIVGGPDAGEPPLHPDYEERGRREIPVTSGVVVEGDDLPDHGDRIWLKGYGCVRHTRDAFEYTGDDIDAVREEGVDVIHWAPADGPALRLRTMDGDVSGVAEPGLRNYDTDDVVQFERIGFARLDKVADDSDTESVAYFTHP

SEQ ID NO: 29703 - protein, 549 aa, Haloarcula marismortui ATCC 43049
MRVSLAVVDRLVANGIDTVFGIPGKQSLPLNEAIGNRDDIRFVVARHETAVSHQAWGYAETSGEIASTVVVPGPGDMNAMNGLKNALNDCTPLVHFAIETEPALRGGDAIHETPPDTYDNVVKENILLKNPETTAATIDRAVQIAQTPPKGPVRVGLPKNYLQMDVPLAGASTPSAPSSNTVPEQEVSTAAEHLLAAERPLILAGGGVRASGGTAALRSLAERLDAPVVTTYKGKGVFPEDHDLSAGVLAGSASPELLDCLADSDAVLAVGSDLDAHGTRGWSVELPETLIQVTIDADDLGTGYDPTVGILADAADAMTAIENRIAAADTAPASKTDGAERAQAVRDATARRIEPLVDSEPPLTSVHVLQVLRDALPSDAITAVDAGGFRVWALNTFAAYGPRSYVNPGSWATMGTGLPSAIGAQLANPDTPVVALTGDGGLMMCVHELHTAVAENLPITVVVLNNDDYAIISEEAGRSYDLDHQAYGWDRTPIDFGTVAAGMGMEATQADTPSEIRTAVHEAVQTDAPTLVEVRTDPAEPQASEWMRE

SEQ ID NO: 29704 - protein, 1515 aa, Haloarcula marismortui ATCC 43049
MVERQTGLSAGDAGLADPTDERSNCGVGVVMDLDGQSDHWVVSDGLELLDNLEHRGTTGAEQDTGDGAGIMLQIPHEFFAAEVDADLPPAGEYAVGTLFLPQDDEVAESLKDLVETELAAEGLDVLDWRDVPTDNSDLGATALESEPDIVQFFVTSATGKTGDAFENQLYIGRRALENTVEEKKPPGHERFYVVSLATDVVVYKGLLKAEQLEDYYPDLEDEQMQSTFAMVHARFSTNTLGAWHLAHPYRRVIHNGEFNTIQGNINWMRARETDIQSDEFEGDLEKIKPIIDDPEQSDTASVDNALELLLQGGRDLPHALRMLIPEAWRGEMNDVTGDRRDFYDYHASLVEPWDGPALVAATDGDRIGAVLDRNGLRPCRYDVLEDNTLVMSSEAGALEHDASEIKERGRLQPGQCFLADPEEGRVIPDEEVFDDIADDKYGEWVAEEQVDIDEVANREDNAPRDPADALRSQQAMYGYTYDEVDHLIEPMAEKGKDPVGSMGDDTPLSVLSQFNRPLFTYFKQLFAQVTNPPLDYIREELVTSLESRLGHQRNILDESQGHARQLVLDSPILTDEETQSIKDLNANGMSTKVIDITYKEGGDLRQAVEDVRAEADAAAREHDILVLSDRAASEGRVPIPSLLAVGGIHHHLVRNGLRNHVGLVVESGDPRAVHHFATLIGYGAGAVNPYLAYQTIEDLVAGPDGADLADAIDAYITAVEDGLLKTMAKMGISTVESYQGAQIFEAVGLSSDFIAEYFEGTTCRTDGIGIEEIEDDLTQRHDVAWSEEEPDMPRQGEYEFRSNGIHHQWNPNTVGKIQQAVRMGDYDTYKEFAELVNDQNEELQTLRGLLEFDSDRESIPIEDVEPVDDIVERFETAAMSLGSLSPEMHENNAIAMNRLGANANTGEGGEPPERFDTEKECTTKQVASGRFGVTSDYLASADELQIKMAQGSKPGEGGHLPGKKVNEMIAHVRYATPGVGLISPPPLHDIYSIEDLKQLIHDLKASNPEADINVKLVSEDGIGTIAAGVAKANADVVHISGHDGGTGASPKTSIKNAGLPWELGVSEANQMLRATGLRSRIKVTTDGGMKTGRDVAVAALLGAEGYTFGTASMVTSGCVMARQCHENTCPVGIATQNENLRERFPGEPQHVINYMTFVAQELREIMAELGFETIDEMIGRPSVLKQRDDVSQPKAQKLDLSGVIAEPADNDGRYKQREQTHEVDEQLDWDLIDAAEDAIYSGDPVAIDTDITNVDRAVGATLSNRISREHASDGLADDTIRVDFDGTAGQSFGAFLAQGVTMELTGTANDYVGKGLSGGKLIVNTPDQAPFDPSENIVIGNVALYGATQGEAYVNGMAGERFAVRNSGVKGVVEGVGDHGCEYMTGGAIVVLGETGKNFAAGMSGGVAYVYDPDGEFAAKANTGMVSLADTLEGKDRQMITRLVENHAAYTDSDRAAELLDDWDAEVENFTKVMPDAYAEVIADRERDDVRNEPPAKAAASAEAAEADFAASTDD

SEQ ID NO: 29705 - protein, 511 aa, Haloarcula marismortui ATCC 43049
MTCYAMSLRQRSTTASRRGSPYQRQMGPGVSGNAQNDAVPDSLVVVSNREPYSHEQDDDGEIQVQSAAGGLTSALDPVMQSRGGTWVAWGSGDADMAVADEGIVEVPPSDPAYDLKRVPLSDAAVQGYYYGYANQVLWPLCHEDTGRIWAEPAYWEQYRAVNEQFAEAVDTVADAGQPVWFQDYHLALAPRLVRERRPDATLLQFWHIPWPAPSVFRHCPHSDALLDGLLACDIIGFHTAGYAEQFLHCVDSAFPAATVDTDSGTVTRDGDRTRAVANPLGIDVGGVRDRARATDVASIRDTVLGGSRSDTSIRLALGVERLDYSKGIPERIEALAHLWDRRPDLRGDFTYVQKASRTREGIAAYRRYRADVVDAIERVNDRFGTDDWQPIVYTEANLDNETLAGLYRAAEVAVVTPHRDGMNLVAHEYPVACTDGDGALVLSELAGAATHLDGALTVNPHDIEAIADAIERALELDEAETSDRLSRLQHSVETLDSAEWVARQFSAGQSL

SEQ ID NO: 29706 - protein, 484 aa, Haloarcula marismortui ATCC 43049
MSKSQTRSPEAELGLLDATMIGMGAMIGAGIFVLTGLAAEIAGPAAILVFALNGVVTAFTGLSYAELAASIPKSGGGYAFVREIFDDFASFIMGWMLWFAYMIAGALYALGFAPNFLELLHVYDVVPSPDEIGAVAVPVIDVGLPPAFLLAFIAVLGLVALNAVSTAASGSVETIFTIIKVSILVVFVAFGLTSPMFSGAEFQPLFPEGSGAAAVLPAMGLTFIAFEGYDLITTVTEEVQNPRENIPKAIFISLAVTVVVYLAVVTVAIGTLGAEGLADAGEAGIATAATSFMPTGLPIIQNGGALIVFGAVFSTLTALNAVVIASSRVAFSMGREGQLLPSIGQIHHRYGTPFVAILTSAIVMLGSVALPTQSAGNMSSLFFLLSFIIVNVAVIRLRRERPNMNRPYEMPFYPAPPIIGIALNLILTGVLIEFLLRTDPLALGLSVAWILLGAVVYFALKRIRQQSDREQATAVSEIKPEAED

SEQ ID NO: 29707 - protein, 585 aa, Haloarcula marismortui ATCC 43049
MSERASVPKEEEETEPETEQEPVTTGAQSVIRALENAETDYVFGVQGGAIMPVYDALYDSDINHVTMAHEQGASHAADAYGVVTGDPGVCFATSGPGATNLVTGIADANMDSDPVIALTGQVPTEFVGNDAFQETDTVGITQPITKESYFAADSDTVGDDVSEAFALADAGRQGPTLVDLPKDVTQGETEVEPGSPETPETYEVPEEADDENVQEAAEALAEADRPVILSGGGVIKADASSALREFAKEYEIPVITTMPGIGSFPEDHELSLEWAGMHGTGYANMAISNTDCMLAIGTRFDDRLTGGVDSFAPDAEVIHVDIDPAEISKNVYADYPLIGDARNVLRQLFDAMPRAPDADEWRDQCQTWKDEYPMDYDTPDDEPLKPQYVVEQFSEMTPDDTIVCTGVGQHQMWASQFWEYTEPRTWVSSHGLGTMGYGVPAAIGAKLAAPDQEVVCFDGDGSFLMTVQGLSVAVREQLDITYVVLNNEAVGMVRQWQDGFYEGRRMASEYPWIPQFDKLAEAFGARGFTLESYDNVEETIQEARDYDGPSVIDAHIDPGENVFPMVPSGGDNGQFALNEDHLDMI

SEQ ID NO: 29708 - protein, 754 aa, Haloarcula marismortui ATCC 43049
MSDDELAKDLGLVSAMTIGIGTMIGAGIFVLPGVAANAAGPVVVVSFVVGGLIAMVNALSVSELGTAMPKAGGGYYYINKSLGPLFGSIAGMGDWMGLAFASAFYCIGFGQYLAVFVPLPEVAFLNPIQIGALIAGAIFVAVNYIGAKETGGVQTVIVFILLSILTVFAVAGFFAFDYATLAGADGLAPFGTGAILPATALVFVSFLGYAKIATVAEELKNPGRNLPIAIIGSVGIVTVIYAILVSMMLGVVPWPELSQDAPVAQAAQLAFPESIGPIGGVAAGAAAVMTVGALLATASSANASILASARINFAMGRDKIVTNWLNEIHPNYATPYRSILVTGGLIIVFIAFLGRDIEVLAKAASVLHLIVYALLNVGLIVFRETDAPEYDPDFTVPLYPITPILGAVLSLGLVAFMDSIEIALSAGFVLVAVVWYFVYARGKTTQKGVLSDYISDREEQLPDQVVNAADAVAPNGAGGPTIMVALANPRTESALITLASALAQHEDGRVLATHIATVPDQTALETAAANRDRIDATSESLLDTAKADAEAFDVPIETKTILSHRGIEEVFDAARTNHADTVVMGYGGTQFAGGRAEGTLDELAHDLPCDFLVLDGQDLDLSDVLVPTAGGLSSDLSAAVAKALEETFGVAVSLLHVVDPGEEESGRQFMYEWAAEHGLSDAELRIETGDIEATIERLGRDYSLVIVGATERGLLSRIVRGSLVFDVIETLDTPVLLAERPSSRSLRERLFGRE

SEQ ID NO: 29709 - protein, 757 aa, Haloarcula marismortui ATCC 43049
MRLTVKPLKQKDAGRGLAAIDRAAMDELELENGDYIVLEGKQDSRAVARVWPGYPEDEGNGIVRIDGQLRQEANVGIDDPVNIEKADVNPATSVTVALPQNLRVRGNVGPMIRNNLSGQAVTQGQTVPVSFGLGPLSSMSGQKIPLKIAETEPSGTVVVTDSTDIQVSEMPAEQVHSGEGAPEASDTPDVTYEDIGGLDRELEQVREMIELPMRHPELFQQLGIEPPKGVLLHGPPGTGKTLMAKAVANEIDAYFTTISGPEIMSKYYGESEEQLREVFDEASENAPAIVFIDEIDSIAPKRGETQGDVERRVVAQLLSLMDGLEERGQVIVIGATNRVDDIDPALRRGGRFDREIEIGVPDKKGRKEILQVHTRGMPLSEEINIENYAENTHGFVGADLATLTKESAMNALRRIRPELDLESDEIDAEVLERLEISDKDFREAMKGIEPSALREVFVEVPDVTWDSVGGLEDTKERLRETIQWPLEYEDVFESMDLEAAKGVLMYGPPGTGKTLLAKAVANEAQSNFISVKGPELLNKFVGESEKGVREVFSKARENAPTVVFFDEIDSIAGERGGGTTDSGVGERVVSQLLTELDGIEDMENVVVVATTNRPDLIDDALLRPGRLDRHVHVPVPDEEARRAIFQVHTRDKPLADGVDLDELASRTDGYVGADIEAVAREASMAATREFINSVDPEDIGDSVSNVRVTMDHFEHALSEVGPSVTEETRERYDEIEQRFDRAEPGVTDESTASRTFQ

SEQ ID NO: 29710 - protein, 705 aa, Haloarcula marismortui ATCC 43049
MSGSTEAGVELTVEGANKRDAGRGIARLPESARTELGVLSGSPVIIDGDDMTVVKVWPADDDGSFVRIDSDTRANAGVNIGDTVTVTSGSVSEATEIAVQPVEPMPGSEDYESLVRKRLVDQIIQADERTHIDGLGTFLVRKTSPSGPVRVTDATAVTVLPGLDGGSGAGQSSSDEATTTNTPTAETESGVSYEDIGGLDEELDRIREMIEMPLSEPEEFRRLGIDPPSGVLLHGPPGTGKTLIARAVANEVDAYFDTISGPEIVSKYKGESEERLREAFEKAEANAPAILFVDEIDSIAGSRDEDADMENRVVAQLLTLMDGLEDRGRVVVIGATNRVDAIDPALRRGGRFDREIEIGVPGEHGRREIMDVHTRDMPLHDDVDLDRIAAQTHGFVGADLASLTTEAAMAALRTDRDDGDVHQDDFETALATVDPSAMREYVAESPTATFDDVGGLAEVKQTLTETIEWPLSYGELFTATNTDPPSGILLYGPPGTGKTLLARAVAGESDVNFIHVAGPEIMDRYVGESEEAVRELFERARQTAPSIIFLDEIDAIASHRGQGNEVTERVVSQLLAELDGITENPNLVVLAATNRRDMIDDALLRPGRLEQHVEVPNPDRDAREEILAVHTAGKPLAADTDIEDLAEKTDGFSGAELEAVVREASMLAIREVASAYGPEEATENAEEVEITPAHFSEALERERTR

SEQ ID NO: 29711 - protein, 460 aa, Haloarcula marismortui ATCC 43049
MAAIGTDPGLRVPRAHRRLAVAPVRYLRGGVDSMSAVDTVRNRLDALPDVGLVVAFIASIWAVMLVLAIAVGGANWANLAAGFIGSVTVLIGGYAILALALNLQWGYTGLFNIGIAGFMAVGAYTTAVLTAPTDPAAGAVPGLGLPLWVGLIGGMAMAAIIGGLAALPALRLKADYLAIVTVAFSEIIRLVVNWNGLAEVSLFGVPFGTGGATGISFKSANEVASTLINGVGQPLVTAAEGVGVSGPNLANLTYGILLLLVVAASYWVLARITNSPFGRVLKAIREDETVTQSLGKDTRRFKIKTFMIGCALMGLAGVLFRGQAGYVSPQQFRPTITFYVFAALIIGGSGSNTGSIIGAATFSGLLFYLPARLGENVSLGGTRAPSNIVDAIAGLGSLDPLPLLAYTISNVSTLRFVLIGVVLIYIIQNQPDGLLGHRNEPATSVSLDRPQSGSGGEANE

SEQ ID NO: 29712 - protein, 355 aa, Haloarcula marismortui ATCC 43049
MQIQSQETTAEGAERIEVVPETLDDLWHLSYVIEPGDLVSGDTTRRIQRNDDNLRDKGGEREPMWIQIEVTDVEFAKFANRLRVGGEIVDCSREDQLGFHHTLNVEEHTELTVEKHLKPDQADRLEEAVEATENPDVAIATVEEGEAHVHTVAQYGTEERATITSTTGKGEYARPRKELFDELASVLKRQDVDAYILAGPGFTKQDALDHFQDEIPDIAEQITVVDTSAVGDRGVHEVLKRGAVEDVQQQTRIAEEADYIDELMARIGSGSEVAYGPEEVAKAADYGAIETLLVLDERLRLERAGEGDWDIDVDQIIETTEQKGGDVTVFSAEFAPGQQLSNLGGVAALLRYRLD

SEQ ID NO: 29713 - protein, 381 aa, Haloarcula marismortui ATCC 43049
MTFEAADRVDSVPPSGIRRFFELAEEMDDIISLGVGEPDFSAPWSAREAAIASLERGQTSYTANRGKRELRERIADYEAATHNLQYDPDEEILVTAGASEGLDLAFRALLNPGDSIAIAQPCYVSYVPGATFAGIDVIDVPTRAEDEFKLTQEVLESSGAAEADALVYCFPNNPTGATMTAEEMADVAAFCRENDLLVFADEIYADLTYEHDHTSIATLPGMRERTVVFNGFSKAFAMTGFRLGYAMAPPEAVEAMNRIHQYSMLSAPTTAQHAAIEALDNCRDEVTDMAAQYDRRRKYVLTRFEEMGLDCFPAAGAFYAFPECPWDDAGEFAESLLQEKRVAVVPGTAFGEGGSGHLRVSYATGLDDLKEAMARIESFLN

SEQ ID NO: 29714 - protein, 132 aa, Haloarcula marismortui ATCC 43049
MMGPHSPRRYAFIADAVSGGMAFEPEELSPEEVTEQVDSVIEDNEVVLFMKGNELMPQCGYSKKALALLQQHRDDIETVDVLKATDAYREALERHSGRETIPQTFVDGEFIGGSDILEQLDERGELAQKVGQ

SEQ ID NO: 29715 - protein, 364 aa, Haloarcula marismortui ATCC 43049
MQGADADTVADALASDDALPGAGGFAGELDGTLVRDVLGRYPLFVERAVSDEARLDPGQWSHDPTALADPRSFPAGHIRNESGTQQRWSLPSLDPFGDRETAIETVGETVETSIDAVDTDSLAIAFSGGVDSALLAARLDAPLYVAGFPDSHDIEAARSAAELLGTEVRVVELTHDAIERAVPEIARATARTNAMDVQIALPLYLVAERVAGDGFDRLALGQGADELFGGYAKVAKAPEDPRVEADTVRGAQREVIASLPDQLERDVLALRAAGVEPVTPLLHDRVIGAALRLDGDLLVDGETRKVALRAAARESLPDEIADRDKKAAQYGSLAARELDRLARQAGYKRRMDDHVTQYVESLVE

SEQ ID NO: 29716 - protein, 386 aa, Haloarcula marismortui ATCC 43049
MTMDFASRVERVEPSATLAISNKAAELEAEGKDVVDLSVGEPDFDTPENIKDAAKDALDAGHTGYTSSNGIPELKEAIANSLHDDGLTQYGPDNLIVTPGGKQALYEIFQTIIDDGDEVALLDPAWVSYEAMAKLAGGTLTRVNTAAHDFQLEGALDDLADAVSDETELLVVNSPGNPHGAVYSRDALEGVRDLAVEHDITVISDEIYKEITYDGVEAVSLGTLEGMEDRTITLNGFSKAYSMTGWRLGYFAAPEELVSQAGKVHSHSVSCAVNFVQHAGVEAITNTDDAVEEMRQAFAERREFLMGLFEDHGVHVPEPQGAFYMMPEIAPDGDDTEWCDQAISEAQVATVPGTAFGTPGYARISYANSKERLQEAVDRLAEADLI

SEQ ID NO: 29717 - protein, 741 aa, Haloarcula marismortui ATCC 43049
MNEVQLEVAKAYPNDSGRGIARLDPDTLLHLKLSPGDIIEIEGSDTTAAKVWRADRQDWNTDTVRIDGFTRQNADVGIGERVTIRKAEAEKADKLVLAPPEEASVQFGSDAAGMVKRQILKRPVVERDIVPVMSSTNHPFMRSPGQAIPLIAVETEPEGVCLITEDTEVELREEPISGFEKTGGGITYEDIGGLQNEIQRVREMVELPMKHPQIFKKLGIEPPQGVLLHGPPGTGKTLLAKAVANETSASFFSIAGPEIISKYYGESEQQLREIFEDASEESPSIIFIDELDSIAPKREDVTGEVERRVVAQLLTMMDGLESRGQVIVIAATNRVDSVDPALRRPGRFDREIEIGVPDEVGREEILQIHTRGMPLSDDVNLAKLATDTHGFVGADIESLTKEAAMKALRRYLPEIDLDEEDIPPSLIDRMIIKRDDFKGALNEVSPSAMREVLVELPKMSWDNVGGLSGPKEQVQEAVEWPMNSPEKFERMGVTPPSGVLLYGPPGTGKTLMAKAVANETDANFISVRGPQLLSKWVGESEKAIRQTFRKARQVAPTIIFFDELDSLAPGRGGEMGSNVSERVVNQLLTELDGLEEMEDVMVIGATNRPDMIDPALIRSGRFDRLVMIGEPDIEGREQILKIHTDDTPLSPDVSLRELAEVSDGFVGSDLESIAREAAIEALREDDNAEEVEMRHFRQAMDSVRPTITDDIREYYEQMEEEFRGGSSPQRQAGTGGRIGFQ

SEQ ID NO: 29718 - protein, 734 aa, Haloarcula marismortui ATCC 43049
MAKDLERDLGLLSVVAISIGAMVGSGIFILPALAVKDAGAGIIAAYLLAGVLVLPAALSKAEMATAMPEAGGTYVYIERSMGPLLGTVSGLGTWFSLSFKGALALVGGVPYLVLLFDLPIRPVAITLAAVLILVNILGAEQTGRLQIGIVAVMLVAIGWFVAGGGPAVNTATYGGMWEYGVEGIFAATGLVFVSFAGVTKIASIAEEVEDPDRVIPLGMLGSLAFTTLLYVLVVAVVVGVIPLDQLAGSTTPIADAAEATLGTAGVAAVVLAAILALVSTANAGILSSSRYPFAMSRDGLAPDLLSTVSDRFGTPVTAITLTGGVMLLLILFVPILEIAKLASAFKILVFALINVALIGFRESDAPDYDPSFEVPLYPWTPIFGTLTGFALLTQMGLIAIVGAVGIVIASVVWYLGYVRPRVTREGAIKESVRRSIGDRALDRTEETLDETAETSVLVALPEGASRQSEATLLEVGAALSPTDSSLSVVQFDEVPDQQPLDYASGVQSPDDLEFECRTDTLAAALDTPVEYGELVSHHPERAVANAVDERGVDVLLVERGASFEDSLLGDSIDRIRKQADCDTIAVDAQPLDALETITLITTRGPYDPLKVRVGNAVATATGTDLQFLYPLDERQSAEERQQLEAYHDDLLDLCDVPTERTFVDRDDLSAAMDAADNDRTLLIHASNGGLSARTSNDNGTTQSAIQDSNHASMEVDTKRHPGGVVGRLLERLAF

SEQ ID NO: 29719 - protein, 494 aa, Haloarcula marismortui ATCC 43049
MVVALAVGAVAYRLTERTAEDYYLASRTLGTVVLLFTTFATLLSAFTFFGGPNLAFSAGPEWILVMGLMDGIIFAVLWYVLGYKQWLVGKRHGYVTLGEMLGDRFGSTALRVVVAAVSLVWLFPYVMLQQKGAGQAIVGLTNGAVPFWVGAGGITLFMILYVALSGMRGVAWTDTLQGLFMLSLIWVAVAWVLSAVGGAGEATALLASEEPAFVGLGGGLYTPQYIISTAVSIAFGVTMFPQINQRFFAAGSKKVLKRTFALWPVLVLLLFVPAFMLGAWAAGLGVTVPEGGNVIPALLGEYTPTWFTALVIAGAMAAMMSSSDSMLLSGSSYLTRDLYRPLTGRGDASDEETDRREALVARVGVVVFATLSFVASLYTPGTLVQIGDTAFSGFAQLTVPVALALYWQGTTRSGMYAGVVGSQVFYGLHVFPVLATVGGLFGLDVALPTAYLGWTPGIVGILVGLVLTVTVSLMTAPAATEDRTAYAVSGVESD

SEQ ID NO: 29720 - protein, 750 aa, Haloarcula marismortui ATCC 43049
MGLDEDALEYHRSKPPGKIEIATTKPTNTQRDLSLAYSPGVAAPCEEIDKDPEKAFEYTAKGNLVGVVSDGSAVLGLGDIGPEAGKPVMEGKGVLFKRFADIDVFDVELDTDNAEAMIQTVEAMEPTFGGINLEDIAAPECFEVERRLSEKLDIPVFHDDQHGTAIISGAALVNAADIADKELDELEVVFSGAGASAIASAKFYVSLGVSKDNITMCDSSGIITEERANHEELNRFKQEFARDIPEGGLADAMDGADVFVGLSVGGIVDQEMVRSMASDPIIFAMANPDPEIAYEDAKAARDDTVIMATGRSDYPNQVNNVLGFPFIFRGALDVRATEINEEMKVAAARALADLARQDVPDEVVKAYGDQPLQFGPNYIIPKPLDPRVLFEVTPAVAEAAIESGAARTELDTAAYVEELEARLGKSREMMRVVLNKAKSDPQRVVLAEGHDEKMIRAAYQLVEQGIAEPILIGDADQIESTRRKFGLEFDPVVVDPETADVADYADRLYELRQRKGVTRREADELIRDGNYLGSVMVEMGDADAMLTGLTHHYPSALRPPLQVIGTADDADYAAGVYMLTFKNRVIFCADTTVNQDPDTDVLEEVTRHTGELARRFNVEPRAAMLSYSNFGSVDNLGTKKIRRAVSRLQDDDRVDFPVDGEMQADTAVVEDILQDTYEFSELDDPANVLVFPNLEAGNIGYKLLQRLGGAEAIGPMLVGMDKPVHVLQRGDEVKDIVNLAGVAVVDAQQE

SEQ ID NO: 29721 - protein, 850 aa, Haloarcula marismortui ATCC 43049
MSLPPYIYADRRVPDEETVRETLDQRTMTAFGDTEQLERLHRVFYPVFKIDYEYETGKGKLLGTTTKSETAFLDGLWADNDRAVSQYVDDTDAVVRRATSDYDFGRSDPVLGRSVLLQFQVTDDDARSLLPQRVAEYRDQQQDAASGTANVFLRKLRESYGLPGDFDPDGFDGVTGVDRLYLPFWLAEYHSPDSTDVKLVTFRDPDASTEELQRHGWLAEFLSAEPRRLAEYGYEVNPDRLERNIRERIDQSDESGTAGMGGDSGSDSTDGAPSINRERPSDDGTVVQPDGVDMEADGLVDPDPSRSFADVGGMSELLETLNHKVVRPLQDPSAFEEYGIGVVNGVLLHGPPGCGKTHVAGALAGEVDHAFIEVTPADVTSKYMGEPAQKVEELFQIARANAPCILFIDEIDGIAGARDGDSNMNSSEQQLVNQLLTELEGIADEDVVVLGATNLVEDVDDAIRRSGRFDERVEVPPPDPQARKQILEIHLAGRPTADDINLDPVVEETAGFAASDIELLAEDAARKALRADAPIGTDHLLQAATETDTSIPDWVDPEMVAENGVVQPDSVDLQASSLVETDPGRDFADVGGMGELKDRLEDTVLDPLENADAYAEYGIDVLSGLLLYGPPGCGKTHLAGALAGELGHSFVEISPADVTSKWMGEPARNVAEVFEVARANAPCVLFIDEIDGIAGSRRGSMNTSEQQLVNQLLTELEGAAADDIVVVAATNFVEDIDTALRRSGRFDERVEVPPPDAKARRQILEIHLQDRPVAGDIDWDAIVEPTAGYAASDLELVAEDAARHALRDGSEITQEHLEIAVWETHSSIADWDDRDRYQGAEGTADLGLGP

SEQ ID NO: 29722 - protein, 309 aa, Haloarcula marismortui ATCC 43049
MAKLEINNLHAEVAEEDGETILRGVDLEVESGEIHALMGPNGSGKSTTAKIIAGHPAYEVTDGEVLIHLEEDEFGDEEIPEDLRTWNLLDLEPNERAALGIFLGFQYPAEIEGVTMVNFLRTALNAKLEEREELFEDDEEEEAETEGGDTNEDAAGYDTSPMEGNVEEGEIGVAEFQEILQEKMEQLDMDEKFASRYLNAGFSGGEKKQNEVLQAAILEPSVAVLDEIDSGLDIDRLQDVSNGINALRDEQGAGILQITHYQRILDYVEPDHVHVMLDGQIATSGGAELAEKLEDEGYDWVREEAYEAA

SEQ ID NO: 29723 - protein, 206 aa, Haloarcula marismortui ATCC 43049
MQFDRVAAHEPVVVDDEPQEAAVIAPVVTRPAGEAILFTKRADHLSDHPGQMSFPGGGREPEDDDLLRTALREANEEIGLDPLAVNVLGRLDDIRTITRYSVRPFVGRIPDRDYLPSDEEVAEIVTLPVSELTDLDNYESEHRDHPHYGEIRLHFFYVDGYTVWGATARMLVQLLELATDWRVPPEPDRYMEPDDDLPPSVRDEAE

SEQ ID NO: 29724 - protein, 267 aa, Haloarcula marismortui ATCC 43049
MLPGAGADRGAADYAIVGAPLDASTSFRPGARFGPDRIRKFGQQFDDYDHRTDQHFTDCSVYDHGDIGPTADVAEYLTYLQGTLSDFSSDRAVPLVVGGEHTVSVAGVRALAPDVFVCLDAHLDLRESYAGDEYSHATVTNHALSVADEAVVLGARTGSEAEWDRASEADVTVVPPEDVADWSPAFDDERVYLSVDIDAADPGFAPGTGTPEPFGLDPREMHDVVRAVAPQAVGFDVVEVNDRDDGQAATLAAKLLRAFVFAHADQR

SEQ ID NO: 29725 - protein, 695 aa, Haloarcula marismortui ATCC 43049
MVQNLELTISVDEANESIAVPTTVGTRLGLGGNGAVLIRKQRGQVQAATVRQADSVPAETARVGPQTAETLGLRDGDRVTVEAADPAVATHISVAPVPQLSIRGGEGLVRDAVGDRPLLDGDTITVSLFDGSLTVPVRVVSTQPAGPVTLVDDTVIEITDGPAPRRSNSGLDPLAETAVGGYADTVATLETAVSTALLASDDVPGSVRNRAGVLLVGAHGVGKTHLLQHVAWLVNATIHSVDAGRLLSLDQDGARAYLDDVARAAQGSERGIVHIDGLDTVSADGGDKTRLLLRQWLDDISTLDGVAAVGEATSEDDVPVDIVQATRLSRTVTVPEPSRRDRAEILKTVATGAMVSAEADLKATGEQAFGYVAADIVALWLHAVEAAVARDGAGGDPVVVSAADLEAARDAVEPSGIRGTVPEIPSTSFSDIGGLDGPKRELIRAVNWPLTKPDLFDSLDIDPPAGVLLYGPPGTGKTMLARAVASTSDANFIPVNGPELMNKYVGESERAVRRVFDQARSNAPSIVFFDEIDALGTTRSDDNDSGASARTVSQLLTELDGIEGREGVTVIATTNRRDRLDDALLRTGRFDRIVEVSLPDAADRAEIFDTHIGDRITGQVDLEAFAARTAGYSGSDIAAVVREAGLLAIEEHLRAQGDSDRSRKPVSLRESHLEKALQSVESSGADQAGETGHRS

SEQ ID NO: 29726 - protein, 640 aa, Haloarcula marismortui ATCC 43049
MDFDAGSDDDVFEDARERVDRPMLRLFTGYGQGHWGAFVVGLCSSIVARMLDLLPPILLALAIDAIFLQEAEYGLFLIPDAWIPNGQGPQLWLTAGIIAASFGLGAVFHWSRNWGWNKFAQHVQHAVRTDTYETMQRLNMDFFADKQTGEMMSVLSNDVNRLEKFLNDGLNSASRMIIMVVGIATYLFYMNWQLALVALLPVPIIAVFTKRFIDVIQPKYAEVRSTVGKLNSRLENNLSGIQIIKTANTEPYEADRVEDTSEDYLDANWDAIETRITFFPGLRLVSGIGFVVTFIVGGLMVTGQAPGPLTASLSRGQFVAFIIYTQRFVWPMAQFGQIINMYQRAYASAERVFGLMDTPGRLEEAEDAPPLAVTDGRVAYEDVVFSYDGDDEPVLSDISFEADGGETVALVGPTGAGKSTVLKLLLRMYDVDSGTVRIDGQNVQDVQIQSIRRAIGYVSQETFLFYGTVRENIAYGTFDATDEEIVAAAEAAEADQFVRNLPDGYDTMVGERGVKLSGGQRQRIAIARAILKDPEILILDEATSDVDTETEMLIQRSLDDLTADRTTFAIAHRLSTVKDADTILVVEDGRIVERGSHAELLAADGLYANLWAVQAGEIDELPEEFVERAIQRRARTDADD

SEQ ID NO: 29727 - protein, 369 aa, Haloarcula marismortui ATCC 43049
MSTLDVGTYSPREKGVVGLLGALAALLLVAVLTGFLAPAYLLYLIGLSAMYMLLSMGLNVQWGYGGMINFSVAAFFGLGAYGTALLTASGSPISGGVSPVIALFGGLGLAAVLAVIIGYPTLKLRDDYLAIASLGLAEVVRIFILNESQWTAGSAGLTGIPLFFSDWPVLGDLTYPYVFNVGGTPVFNMSQSVVTSLLNVVLVTVIVAAVYLFLRRIHQSPWGRVLRTIRTDEDLAETLGKNTFAFKMQAFVIGSLIMALAGVFYSHLVLFVSPQDLQPITTFYVWVAVILGGTGSDRGAMLGGFTIVAIQQGTRFLTDTGALPIGAAPLRLMLVGLLIIFIVRLRPEGILPPERELIWPDSMGGGRDE

SEQ ID NO: 29728 - protein, 442 aa, Haloarcula marismortui ATCC 43049
MSYTALQVDPNVLAEGVNLLWVLTVSFLIFFMHAGFAMLEAGQVRSKNVANQLTKNLLTWSVGVVVFFLIGSGISSLVGTGSFAPAFGAEAANDYVGWLFGAVFAMTAATIVSGAVAGRAKLRAYITYTFLLAAVIYPVVTGLTWAGAHISLGGVVFKDFAGGMIVHGMGGIAGLTAAYVLGPRMGRYNEDGSANVIPGHSMTFAVLGTLILAFGWYGFNVGTAASVFVVEDGALALGAFATVGRVAMTTTVAMAMGAIGAALVAWLKTGKVDTLYVANGLLAGLVGITAIPDTTTWWGALIVGLLAGGQLPIVFSFMENRMKIDDVCAVFPVHGSAGVLGTIMYPLVATSGTVGSIGSALAVQVVGVAVIAGWTIVTTGLIWYGLKAAGQARVTPEHEQEGLDVSEHGVETYPEFGGGEGVVADGGKVNTNVRTDGGSKDD

SEQ ID NO: 29729 - protein, 588 aa, Haloarcula marismortui ATCC 43049
MAHKKEEYKAELYGDEVREKLEEFAEKGWDSIPEDEREKWFSRFKFWGVFHHRGGQESYFMMRLTNCGGVLEPDQLRAIGEVARDYAKGPAENPEFGNGWIDFTTRQSIQLHWLKLEDIPEIWEKLEAVGVSSRSAGGDTMRNISGCPVAGKAEEYVASRPILDEIQETIRDDNDLSNMPRKFNISVTGCKQGCAQDSINDIGLEPAHKFIDGEEIEGFNVRVGGGLGGREPREARPLDLFIRPEHAVETVRAFVEYYHEAGNRQNRSKNRARFFVDEHGTDAIREELDERLDFEFETAGTDFRGEYTYNAGKSAEHGAHDHVGVYDQQDGKNYVGLSVPVGRLSAEDTIELADLADAYGSGEVRLTRRQNPVIMDVPDGNISNLLNEPLLDKHSPEPNPFVQGAMACTGTEFCSLALTETKARMARLLRWLGDNVDVPDDVDRIKMHFSGCTADCGQAMTADIGLQGMRARKDGQMVEAVDIGVGGGIGAEPTFIEWVRQRVPADEVPGMIANIVEAYAALRSEGQTFREWVDATGHETIVELAEPEEVEGYTDPCLADGKQSWYPFDDGESPAPTDAEGQPISADD

SEQ ID NO: 29730 - protein, 391 aa, Haloarcula marismortui ATCC 43049
MRVVAKFGGTSLGSGDRINRAADSIAAAVQQGHEVAVVASAMGNTTDELLEEINYDADSADRAEIVSMGERTSVRMLKGALAARGIEAVFLEPGSEDWPIITDEYGEVDVEETQKRAHALAGQLKDVVPVITGFLAQDYQGNVTTLVRGGSDTSAVMMGDYMDADEVVIVTDVEGVMTGDPRVVEGARNVGKISVDELRSLSFRGAEVVAPSALSYKSEDLGVRVVHYQHGDLLSGGTSIEGEFQNLIDLQEQPIACVTVAGRAIRNSPGILADLSGAIADEDINIEANSSGMDSLTFYVDEDDAEEAEALLHARIVDDETLSSVTVEDEIAVIRVTGGDPSQSALAHQVVAPLADAHIHLYDVITSATSVSVFVPWEDREQALSLVQDVF

SEQ ID NO: 29731 - protein, 420 aa, Haloarcula marismortui ATCC 43049
MPEGNGTVALAFSGGLDTTVCVSLLKEEYGYDEVIGVTVDVGQPDYEFEEAEETAEALGVEQHVVDATEEFADLCMEAVKANADYQGYPLGTALARPVIAKAILSVAEDEGCSAVAHGCTGKGNDQLRFESVWRDSDLDVIAPVRELGLTREWENEYAAEKGLPVEGGDGGRYSIDTNLWSRSIEGSELEDPSTIPADDIYKWTDNPSDKDAELVEVEFEDGVPVAVDGEELGGVELIEQLNKQAGAHGIGRTDMMEDRMLGLKVRENYEHPAATVLLTAHEALEGLVLTQEERQFKAQVDQEWSQKAYQGLVDAPLTGALEAFIDDTNERVTGTVTVKLEGGHCRPVSRESDYAVYSESAASFNEEDVSGGITQQDATGVAKYHGFQSRLANKILDDAKKGAAVTDGSGDHAASEDTEE

SEQ ID NO: 29732 - protein, 528 aa, Haloarcula marismortui ATCC 43049
MKVLVTDPIADAGLTRLREAGHDVETAYEVEGDALLDAVADANALIVRSGTEVTEEVFAAAPDLIIVGRAGIGVDNIDIDAATDHGVIVANAPEGNVRAAAEHSVAMAFATARSIPQAHDRLKSGEWAKGEFLGTEVNNKTLGVVGFGRVGQQVAKRLGGLGMDIVTFDPYISQERADQFGAELVDDLEDCLAKSDFITIHTPLTPETENMIGEDELALLDGGYVVNCARGGIIDEPALAEAVEDGVLKGAALDVFGEEPLPDDSPLLDVDDIIVTPHLGASTEAAQENVATSTADQIIAAANGQPVANALNAPSLDEATFKQVGPYLDLADTAGRIAVQLFGGHMSEVQVTYAGDIAEEDVEYVTASALKGVFASSDLQVNAVNAPQIAKDRGIDVTESKTRTSEDYQSLITVTVSDGEESVSVCGTQFGGEEPRIVRIDDHRIEAVPHGHMLVVRNRDEPGTIGFIGTVLGEADINIAGMFNGRETIGGEALSVYNLDEQPPQDIIERLNDDSRIIETTYVELGDE

SEQ ID NO: 29733 - protein, 587 aa, Haloarcula marismortui ATCC 43049
MPTKVENWKDEVYGNEIREHLMEFAEQGWDAIPEDEHDAWFERFKWWGLYHQRSGQESYFMMRIGTPNGVIKPGQLEVIGEVAKEYATGPVDNPEFGEAYCDWTTRQSIQLHWIKLEDIPEIFEKLEAVGLGTQQACGDSWRNIVGCPVAGKDKHEHVDAWPVAEDLHETFKGNDDYSNLPRKWKVAIAGCDEGCGQGDINDLAFEPAEKDGELGFNVRIGGGLSRKEPRLARDIDVWVPPEQAADVAHGMSSLFRDYGDREDRFNARIKFLMDEWGPEKMRSVLQEEYVDFELPTAGEDMRDQYSYNTGSQDGHNDHVGIHEQNDGNYYIGLNVLVGRMGADDVLELAELADEYGSGEVRLTQRQNIIVTDVPEENLDAFTSEPLLENYSPDPSPFMRGSIACTGTEYCSLSIVETKNRQVRYARWLKDNVELPEDHKDFHIHLSGCTASCAQPQIADVSLRGMKTRKDGEPVEALDIGLGGGLGDDPRFADWVEMRVPADEVPGAIKNLVNNFEDAREGGETFRDFVADRDEETLADMVEPEETDYHDPYMHNTKMTWYPYAEDDDMQSSPAPTDGSGEPLPSDD

SEQ ID NO: 29734 - protein, 635 aa, Haloarcula marismortui ATCC 43049
MASNKILGIDLGTTNSAFAVMEGGDPEIIVNGEGERTTPSVVAFDDGERLVGKPAKNQAVKNPDETIQSIKRHMGEDDYSVELDGEEYTPEQVSAMILQKIKHDAEEYLGDEIEKAVITVPAYFNDRQRQATKDAGEIAGFEVERIVNEPTAAAMAYGLDDESDQTVLVYDLGGGTFDVSILDLGGGVYEVVATNGDNDLGGDDWDHAIIDYLADEFEAEHGIDLRDDRQALQRLTEAAEEAKIELSSRKETRINLPFIATTDDGPLDLEQKITRAKFESLTEDLIERTVGPTEQALADADYTKSDIDEVILVGGSTRMPQVQDQVEEMTGQEPKKNVNPDEAVALGAAIQAGVLSGDVDDIVLLDVTPLSLGVEVKGGLFERLIDKNTTIPTEESKIFTTAQDNQTQVQIRVFQGEREIAEENELLGAFALSGIPPAPAGTPQIEVSFNIDENGIVNVEAEDKGSGNKEDITIEGGAGLSDDQIEEMQQEAEQHAEEDEQRRERIEARNEAEASVRRAETLLDENEEEIDEDLQSDIEAKIEDVEEVLEDEDATKEDYEAVTETLSEELQEIGKQMYQDQAQQAAGGAAGAGPGGAAGPGGAAGPGGAAGGAAEQGEEYVDADFEDVEESDEDE

SEQ ID NO: 29735 - protein, 373 aa, Haloarcula marismortui ATCC 43049
MTAFSRRVEQVSISGIREVFEAAGEDAINLGLGQPDFPTPEHAREAAVEAIQAGKVDAYTSNKGTEELREAIAAKHERDNDLEVDPGDIIATSGGSEALHIALEAHVDAGQEVIFPDPGFVSYDALTHLAGGTPRPVPLREDLTMAPETVEEAITDDTAAFVVNSPANPTGAVQSPEDMREFARIADEHDVLCISDEVYEHQVFEGEHRSPAEFSETGNVVIVNACSKAYSMTGWRLGWVTGATDRIERMLRVHQYAQACASAPAQYAAEAALTGPQEPVAEMREAFKERRDVLLDGLNEMGLDCPTPKGAFYAMPKVPDGWVDEVIDRGVVVVPGDAFGEHGAGYARISYATDMETLEEAIDIMADATAALR

SEQ ID NO: 29736 - protein, 387 aa, Haloarcula marismortui ATCC 43049
MTDVVLVDGARTAHGELLGRLTDRSAIALGSAAVEGLLNRTSVDEDSVDWVGLGNAVQAGVGQVPARQVVVESSLPDDVAATTLNEASGSGLRAITTAADRIEAGRASVCLAGGMESMSNAPYLVPDMRGGRRHGNSELVDAMIWDSLWDKQYDAHMGTLTEELAAEHDISREAQDEYARRSNHRAGEAIQSGQFTEELVPVETADGLVTEDEGPHPDTTVDKLAALPPAFADGGTITAGNASKLSDGAGAVVLADAETVKREGLGPMAHVEDYAVAYRDPSEFSIAVRDVVSKLLERNDLTVADVDHFELNEAFAAQMVYVADELDIPAEKHNPLGGAVALGHPIGASGGILTTTMLYAMERADHHRGIVGMSVGGGGAIAMSVVR

SEQ ID NO: 29737 - protein, 404 aa, Haloarcula marismortui ATCC 43049
MTDTVDEVDMPYDDDASQQQKIEALQERLEVLESQNEEMRDKLLDANAENNKYQQKLERLTHENKKLKQSPLFVATVQELSSDGVIIKQHGNNQEALTEVTDEMREELEPDDRVAVNNSLSIVKQLDDETDVRARVMQVDQSPDVTFADIGGIEEQMEEVRETVEMPLKSPEMFEDVGIDPPSGVLLHGPPGTGKTMLAKAVANETDATFIKMAGSELVHKFIGEGAKLVRDLFELARQEEPAVVFIDEIDAIAAKRTESKTSGDAEVQRTMMQLLSEMDGFDDRGDIRIIAATNRFDMLDRAILRPGRFDRLIEVPNPDLEGRKQIFQIHTRSMNVADDVDFEALAEDIQDASGADVKAICTEAGMFAIRDDRTEVTMADFHNAWEKIQQEETDDEDVSRTFA

SEQ ID NO: 29738 - protein, 435 aa, Haloarcula marismortui ATCC 43049
MSTGSLQARAEGWLGNNDVRLLIALALAIGGLYALFSVVLGFQLNGTVNTLRRVAFLSAIYAMLALALNLQWGYAGLFNLGAAGFMAIGVYTMGILTAPVTASPPGFGLPLPVAIVGAILVTGIIGGLAALPAIRLRADYLAIVTVAFSEIVRLTLRAPEFANTRIAGVAFGTGGATGLSLPSNPIRILFYTDPATTAPAPNALGAAIFSAVEPLGIEETLVIGWAYVIVLCLCLGLLYCLMIRIGKSPFGRVLKSIREDQQVTQALGKDTRLFKIKTFALGCALMGLIAIFWRLSGGYASPRMFKPIQTFYIFIALFIGGTGSPTGSIVGGALFASLLFEGPSFIRRVVAEYLQLSNAPDTLVSALAELGTLDVTPLLAYSVQDVSISALRLMLLGIVLVYLMQRHPDGLLGHRKAIASSVALSQQATREDDNE

SEQ ID NO: 29739 - protein, 372 aa, Haloarcula marismortui ATCC 43049
MSQYAARVEEMDISGIREVFEAAGEDAINLGLGQPDFPTPEHAREAAMSAIQDGMGDSYTSNKGIPELREAISDRYATDNGQDIPAENIIATAGASEAIHVAIEAHVQPGDEVLCPDPGFLAYEQLVLLAGGEPKRVELRDDLTLDPAAVENAITDNTSLFIVNSPANPTGAVQSKRDMAEFARIADEHEVICLSDEVYEKIVFDGEHHSPAEFANSDRVIQASACSKTYSMTGWRLGWVAASAERIERMLRVHQYVQACASAPSQYAAEAALTGPQEPVREMVSAFEERRNVLLDGLADIGLDTPVPKGAFYAMPHVPDGWTQKMLDNDVIVVPGEAFGPSGKGQARISYATSTAELKEALEVMRTVTNSL

SEQ ID NO: 29740 - protein, 441 aa, Arabidopsis thaliana
MALRTLSTFPSLPRRHTTTRREPNLTVIYRNPTTSIVCKSIANSEPPVSLSERDGFAAAAPTPGERFLENQRAHEAQKVVKKEIKKEKKKKKEEIIARKVVDTSVSCCYGCGAPLQTSDVDSPGFVDLVTYELKKKHHQLRTMICGRCQLLSHGHMITAVGGNGGYPGGKQFVSADELREKLSHLRHEKALIVKLVDIVDFNGSFLARVRDLVGANPIILVITKIDLLPKGTDMNCIGDWVVEVTMRKKLNVLSVHLTSSKSLDGVSGVASEIQKEKKGRDVYILGAANVGKSAFINALLKTMAERDPVAAAAQKYKPIQSAVPGTTLGPIQINAFVGGEKLYDTPGVHLHHRQAAVVHSDDLPALAPQNRLRGQSFDVSLLYYGQISTLPTQSSSSPKGESLNGLYRKHVSHSMDQKLLRFMQYQPKQRLPFTRKNWVCF

SEQ ID NO: 29741 - protein, 222 aa, Gossypium hirsutum
MEESTVTEQSVGCGGGRKRKELSSEDESSKIVSTTTSANELNDSNGKRMKTPVSKNGNTGSKEAEVEASSADGSKPDKNSKPAEPPKQDYIHVRARRGQATDSHSLAERARRERISERMKILQDLVPGCNKVIGKALVLDEIINYIQSLQQQVEFLSMKLEAVNSRINVNPSFEGFHSKDLGLQPIDGAGMIFGSQTAREYAQGLHPEWLQMHVGGNFKRAT

SEQ ID NO: 29742 - protein, 255 aa, Gossypium hirsutum
MCGGAIISDFIAVKRGRKLTAEDLWSELDTFSDLLGLDYGNGKDPFTQFDNTKAGSKAKNLEKVTNESTQKTSRGREKEGKTQRTRKNIYRGIRRRPWGKWAAEIRDPHKGVRIWLGTYNTAEEAARAYDEAAKRIRGDKAKLNFPQTPRLTQPPAKKRCMMAPELTPPSSETKSPPTPQPFMGFGYENGVYRPSEAMESEMELKEQISSLESFLGLEPDEMTTELSGSAEPESVNLWMLDHLVTHHQQQPQLFY

SEQ ID NO: 29743 - protein, 176 aa, Gossypium hirsutum
MAPRSKPSPISPNPDPNSKEIRYRGVRKRPWGRYAAEIRDPRKKTRVWLGTFDTAEEAARAYDAKAREFRGAKAKTNFADNNANDFTRSPSQSSTVESSSPPPLDLTLASPCSSLPVTAQRPVYFFDAFATGGSGCPASGFAQSDSDSSSSVVDFEGGVRRRVFDLDLNQLPAEMD

SEQ ID NO: 29744 - protein, 346 aa, Nocardioides sp. JS614
MENKVTILPFDETLDVEPEESILQAVLRQGRYVKYGCKHGGCSTCRAEVVDGDYRLGDSTSFALSDADRNAGVVLLCSTFAESGHLVVDVSETMDDLTEEQYQAGQHIQEFAATVDRIDALTHDIRWLGLRLNEPETMPFVAGQYVEVGVPGMPDPWRSFSMANSPTESDRVDLIVKVLPGGCFSSVLDQRLSLGDQVQPRGPLGQFGVQLSHRPMIMIAGGSGMAPILGILRELVATGNRREVTFFYGARTAGDLFLVEELGQLARQHDWFTFIPALSDAGADGAAWEGETGLITEVLARHLPSTVGREAYLCGPPPMIDAAVEVLESSGCKPRHIHFDRFVPSG

SEQ ID NO: 29745 - protein, 361 aa, Phormidium lapideum
MEIGVPKEIKNQEFRVGLSPSSVRTLVEAGHTVFIETQAGIGAGFADQDYVQAGAQVVPSAKDAWSREMVVKVKEPLPAEYDLMQKDQLLFTYLHLAAARELTEQLMRVGLTAIAYETVELPNRSLPLLTPMSIIAGRLSVQFGARFLERQQGGRGVLLGGVPGVKPGKVVILGGGVVGTEAAKMAVGLGAQVQIFDINVERLSYLETLFGSRVELLYSNSAEIETAVAEADLLIGAVLVPGRRAPILVPASLVEQMRTGSVIVDVAVDQGGCVETLHPTSHTQPTYEVFGVVHYGVPNMPGAVPWTATQALNNSTLPYVVKLANQGLKALETDDALAKGLNVQAHRLVHPAVQQVFPDLA

SEQ ID NO: 29746 - protein, 615 aa, Streptomyces cinnamonensis
MTEQATGAHHPQPRPRSSGQQSAPVEHVTGAQSLIRSLEEVGADTVFGIPGGAILPAYDPMMDSTRVRHVLVRHEQGAGHAATGYAQATGKVGVCMATSGPGATNLVTPIADAHMDSVPLVAITGQVASKAIGTDAFQEADIVGITMPITKHNFLVTKAEDIPRTIAEAFHIASTGRPGPVLVDIAKDALQAQTTFSWPPQQDLPGYRPVTKPHAKQIREAAKLITAAKRPVLYVGGGVIKAQATAELKVLAELTGAPVTTTLMALGAFPDSHPLHVGMPGMHGAVTAVTALQKADLIVALGARFDDRVTGKLDSFAPFAKIVHADIDPAEIGKNRAADVPIVGDAREVIADLVQAVQTEHTEGHTGDYTAWWSDLNRWRDTYPLGYTQPEDGSLSPQHVIERVGRLAPDDTIFAAGVGQHQMWAAHFIQYEKPATWLNSGGAGTMGYAVPAAMGAKAGQPDRTVWAIDGDGCFQMTNQELTTCALNNIPIKVAIINNGALGMVRQWQTLFYNQRYSNTVLHSGPEDIGPNKGTRVPDFVKLSEAMGCVALRCERPEDLDKVIAEANAINDRPVVVDFIVHEDAQVWPMVAAGTSNDEVMAARGVRPDFGDNEDD

SEQ ID NO: 29747 - protein, 259 aa, Nicotiana tabacum
MAPKQQGGAVAVTAAVGKVNGISKEVHYRGVRKRPWGRYAAEIRDPGKKSRVWLGTFDTAEEAAKAYDAAAREFRGAKAKTNFPPPDEENLKIAQNNLGVKINKNINDDNNRSPSQSSTVESSSRDGLSPAVMVDSSPLDLSLGVKFPFQNHQFRTSPISGGFSGCGFTGATPAVNHHMYYLEALARAGVINLEKHQQRKTVDFLGGNGGHGGSSGGSGSGTQSEFDSSSVIDFMRNDVKPPTRTTFNLDLNFPPPEKV

SEQ ID NO: 29748 - protein, 244 aa, Nicotiana tabacum
MRRGRATAAAKQAAEASPAAGSGGLKDIRFRGVRKRQWGRFAAEIRDPWKKLGWLGTFDSAEEAAKAYDAAARTLRGPKAKTNFPLPPYSHFNQTINPNGPFIDPRLYSQENHPIVIQRPTSSSMSSTVESFSGPRPPPRQQTAVLPSRKHPRSPPVVPDDCRSDCDSSLLLLKMAIVIMIMKMIISFHQLFGNHCLSISTFLHLWMLILMIFTAQHYVFDGIWFRNLDLLIIRKSPIWFPFFI

SEQ ID NO: 29749 - protein, 191 aa, Solanum lycopersicum
AGINISGTNGEVMPGQWESQVGPSVGIEGGDHIWCARYLLERITEQAGVVLSLDPKPIEGDWNGAGCHTNYSTLSMRGEGGFEVIKKAILNLSLRHKEHISAYGEGNERRLTGKHETASIDQFSWGVANRGCSIRVGRDTEKEGKGYLEDRRPASNMDPIVVTGLLAETTILWEPTLEAEALAAQKISLKV

SEQ ID NO: 29750 - protein, 305 aa, Deinococcus radiodurans
MSGPAHLPYGGIPTFARAPLVQPDGDWQADVAALGVPFDIALGFRPGARFAPRALREASLRSVPPFTGLDGKTRLQGVTFADAGDVILPSLEPQLAHDRITEAARQVRGRCRVPVFLGGDHSVSYPLLRAFADVPDLHVVQLDAHLDFTDTRNDTKWSNSSPFRRACEALPNLVHITTVGLRGLRFDPEAVAAARARGHTIIPMDDVTADLAGVLAQLPRGQNVYFSVDVDGFDPAVIPGTSSPEPDGLTYAQGMKILAAAAANNTVVGLDLVELAPNLDPTGRSELLMARLVMETLCEVFDHVL

SEQ ID NO: 29751 - protein, 319 aa, Oryza sativa Japonica Group
MLVARAVALAVVFLAAEAQLSPGYYNATCPGVVSIVRRGMAQAVQKESRMGASILRLFFHDCFVNGCDASILLDDTANFTGEKNAGPNANSVRGYEVIDAIKAQLEASCKATVSCADIITLAARDAVNLLGGPNWTVPLGRRDARTTSQSAANTNLPPPGASLASLLSMFSAKGLDARDLTALSGAHTVGWARCSTFRTHIYNDTGVNATFASQLRTKSCPTTGGDGNLAPLELQAPNTFDNAYFTDLLSRRVLLRSDQELFGSGAGNGTTDAFVRAYAANATTFAADFAAAMVRLGNLSPLTGKNGEVRINCRRVNSS

SEQ ID NO: 29752 - protein, 321 aa, Oryza sativa Japonica Group
MAAVAVAFAVVVAATMSSAQLDPHFYDGLCPAALPTIKRIVEEAVAAEPRMGASLLRLHFHDCFVNGCDGSILLDDTPFFTGEKNAAPNMNSVRGFDVIDRIKDAVNAACRRNVVSCADIVAVAARDSIVTLGGPSYHVPLGRRDARTASQAAANSSIPAPTLNLDGLVSSFAAQGLSVQDLVLLSGAHTLGFSRCTNFRDRLYNETATLDASLAASLGGTCPRTAGAGDDNLAPLDPTPARFDAAYYASLLRARGLLHSDQQLFAGGGLGATDGLVRFYAANPDAFRRDFAESMVRMASLSPLVGSQGEVRVNCRKVNYY

SEQ ID NO: 29753 - protein, 322 aa, Oryza sativa Japonica Group
MASCLSVLLLLCLALAGSVSGQQLSATFYSRSCPRALAIIRAGVRAAVAQEPRMGASLLRLHFHDCFVQASRAGCDASVLLNDTANFTGEQGANPNVGSIRGFNVVDNIKAQVEAACKQTVSCADILAVAARDSVVALGGPSWRVLLGRRDSTTASLALANSDLPPPSFDVANLTASFAAKGLSQADMVALSGAHTVGQAQCQNFRDRLYNETNIDAAFAAALKASCPRPTGSGDGNLAPLDTTTPTAFDNAYYTNLLSNKGLLHSDQVLFNGGAVDGQVRSYASGPSRFRRDFAAAMVKMGNIAPLTGTQGQIRLVCSKVN

SEQ ID NO: 29754 - protein, 313 aa, Oryza sativa Japonica Group
MASSLSVAVLLCLAAAAAAQLSPTFYDTSCPRALATIKSAVTAAVNNEPRMGASLLRLHFHDCFVGCDASVLLADTATFTGEQNALPNKNSLRGFNVVDSIKTQLEGICSQTVSCADILAVAARDSVVALGGPSWTVGLGRRDSTTASMDSANNDLPPPFFDLENLIKAFGDKGFSVTDMVALSAHTIGQAQCTNFRGRIYNETNIDAGYAASLRANCPPTAGTGDSNLAALDTTTPYSFDNAYYSNLLSNKGLLHSDQVLFNGNSTDNTVRNFASNRAAFSSAFSSAMVKMANLGPLTGSQGQIRLSCSKVN

SEQ ID NO: 29755 - protein, 323 aa, Oryza sativa Japonica Group
MASATNSSLSLMLLVAAAMASVASAQLSATFYDTSCPNALSTIKSVITAAVNSEARMGASLLRLHFHDCFVQASFTQPIGCDASVLLSGQEQNAGPNVGSLRGFSVIDNAKARVEAICNQTVSCADILAVAARDSVVALGGPSWTVLLGRRDSTTASEALANTDLPAPSSSLAELIGNFSRKGLDATDMVALSAHTIGQAQCQNFRDRIYNETNIDSAFATQRQANCPRPTGSGDSNLAPLDTTTPNAFDNAYYSNLLSNKGLLHSDQVLFNGGSADNTVRNFASNAAAFSSAFTTAMVKMGNISPLTGTQGQIRLSCSKVNS

SEQ ID NO: 29756 - protein, 317 aa, Oryza sativa Japonica Group
MASPKPFACSAIALLFAANLVSAQLSANFYDKSCPNALPTIRIAVRSAIARENRMGASLLRLHFHDCFVNGCDGSVLLDDTPTFTGEKTAAPNNNSLRGFDVIDNIKAHIEGICPQVVSCADILAVAARESVVALGGPTWVVQLGRRDSTTASLDTANNDIPAPTFDLGDLTKSFSNKGLSATDMIALSGAHTIGQARCVNFRNRIYSETNIDTSLATSLKSNCPNTTGDNNISPLDASTPYAFDNFYYKNLLNKKGVLHSDQQLFNGGSADSQTTTYSSNMATFFTDFSAAMVKMGNINPITGSSGQIRKNCRKVN

SEQ ID NO: 29757 - protein, 353 aa, Oryza sativa Japonica Group
MGDSSGSGSGSGSVSVDVERISFGGKEHQVRTRCGSLSVAIYGDEDKPALITYPDIALNHMSCFQGLLFCPEVASLLLHNFCIYHINPQGHELGAAPIPSDVPVPSVEDLADQVADVLDFFGLGSVMCLGVTAGAYVLTLFATKYRERVIGLMLVSPLCRAPSWSEWLYNKVLLNLIYYYGTRGLVKECLLQRYFSKKVCGSGHYLESDIVQACRNLLDERQGENIWRFLHSINERHDLTDALRKLQCRTLIFVGENSQFHEDAIHMTTKLDKRYCALVEVQGCGSLVTEEQPHAMLMPMEYFLMGYGLYRPYQMNSSPRSPLSPCCISPELLSPESMGVKLKPIKTRIAVDY

SEQ ID NO: 29758 - protein, 141 aa, Streptococcus thermophilus LMG 18311
MQPHDYCFCKWVRPRSTRRVFTEGNLRYIKNFNRRCIMSTYAIIKTGGKQVKVEVGQAIYVEKINAEAGSEVTFNEVVLVGGDKTVVGTPVVEGATVVGTIEKQGKQKKVVTFKYKPKKGSHRKQGHRQPYTKVVINAINA

SEQ ID NO: 29759 - protein, 415 aa, Streptococcus thermophilus LMG 18311
MIEIATLRKYKKRENNMSKEKVILAYSGGLDTSVAITWLKKDYDVIAVCMDVGEGKDLEFIHDKALTVGAVESYVLDVKDEFAEDYVLPALQAHAYYEQKYPLVSALSRPIIAKKLVEIAHKTGATTIAHGCTGKGNDQVRFEVAIAALDPSLKVVAPVREWKWSREEEIEYAKANGVPVPADLDNPYSVDQNLWGRANECGVLENPWNQAPEEAFGITNSPESAPDEAEYVDVTFKEGKPVALNGKEMKLADLIQEMNVIAGKHGVGRIDHVENRLVGIKSREIYECPGAIALLTAHKEIEDLTLVREVSHFKPILENELSNLIYNALWFSPATEAIIAYIKETQKVVNGIAKVKLYKGHAQVVARQSANSLYDENLATYTSADSFDQDAAIGFIKLWGLPTQVNSQVNHPFDK

SEQ ID NO: 29760 - protein, 493 aa, Propionibacterium freudenreichii subsp. shermanii
MSEDQLSIPSAPANDGRTEDPVPRDAPAAGTSQFVVVANRLPVDRVQNDDDSSGWALSPGGLVTALIPVMKDHGGTWVGWVGSADEHIQPFTFDGYGIMPVDLSAQEFNEYYEGMSNATFWPLYHDCVEHPEYHREWWDSYMEVNQRFATAAAEVAAPGATVWVQDYQLQNVPALLRQMRPDLKIGFFLHIPFPPSELFMQLPWRYQVISGLLGSDQIGFQDPGSARNFAHLVRRLAGMRTQGDRIFSPDGRVILARAYPISIDAQGILDLSRTPQARAEAEQLREDLGNPDKIFLGVDRLDYTKGLRHRVRAFGELFTSGQLDPMRNVYLQIATPTREGVARYQVLRSIIDEMVGRINSSVGRIGRSPIEYRHASYPKMALAAMYRAADVMVVTPLRDGMNLVAKEYVASHDSDAGALVLSEFAGASLELKQAYMVNPYDLNGMKNQLLRAAGDTHANHVRRMRSMRKQVFRHDIDAWANSFLTDLGTERSV

SEQ ID NO: 29761 - protein, 87 aa, Oryza sativa Japonica Group
MSSRSSSSSRNSNSVNMDSEWSKKENKLFEEALAYYGEGAPDLFHKVSRAMGGTKTADEVRRHYEILEDDLKLIEARRVPFPKGGSI

SEQ ID NO: 29762 - protein, 245 aa, Hordeum vulgare subsp. vulgare
MSRRWSRTIYVGNLPGDIREREVEDLFYKYGRIVEIDLKVPPRPPGFAFVEFEDPRDAEDAIQGRDGYNFDGNRLRVELAHGGRANSSSLPNSHGGGGRRGGVSRHTEYRVLVTGLPSSASWQDLKDHMRKAGDVCFSEVYREVVGTIGIVDYTNYDDMKYAIRKLDDTEFKNAFSRAPIRVKEYAGKSSRSYSRSRSRSRSGSYSRSPSKSPKKKTSRRSASRSRSRSVSSHSRSPSKGRSPSR

SEQ ID NO: 29763 - protein, 861 aa, Gossypium hirsutum
MASRSCANFLHLASGNLLDIPQTPRGLPRVMTVPGIISDMDSCSSNDGDSDVASSGCRERKIIVANMLPLHAKRDRETSKWRFSWDEDSLLLHLKDEFSPEMEVVYVGSLKVDIDVNEQEEVAQKLLEDFNCVPTFVPHDLQKKFYLGFCKQHLWPLFHYMLPMCPDHGDRFDRILWQAYVSANKIFADKVMEVINPDDDYVWIHDYHLMVLPTFLRKHLNRIKLGFFLHSPYPSSEIYRTLPVRDEILRGLLNCDLIGFHTFDYARHFLSCCSRMLGLDYESKRGHIGLDYFGRTVFIKILPVGVHMGRLESVLNLSSTAARVKEIQKQFEGKKLILGIDDMDIFKGISLKLLAVEQLLQQHPDLQGKIVLVQIVNPARGFGKDVQEAKKETYMTAKKINEVYGSPNYQPVILIDRPVPRYEKSAYYALAECCIVNAVRDGMNLVPYKYIACRQGTPGMDEALGVKPEYPRTSMLVVSELIGCSPSLSGAIRVNPWDIDAVAEALNTAITKPESEKQLRHEKHYRYVSTHDVAYWARSFVMDLDRACQDHYSKRCWGIGLGLSFRVVSLSPSFRRLAIDHICSAYRRTNRRAIFLDYDGTLVPEASIIKTPSPEVICIIKTLCDDPKNTVFIVSGRGRASLSDWLAPCEKLGIAAEHGYFIRWSKDSEWETSPVGADLEWKKIVEPVMSLYREATDGSSIETKEGGLVWHHLDADPDFGSCQAKELLDHLESVLANEPAVVHRGQHIVEVKPQGVSKGLVAEKVLSRMVNGGKPPDFVMCVGDDKSDEDMFQSILTSVSNPSLPVAPEIFACTVGRKPSKARYYLDDTADVLKLLKGLATATISKPRCLPEIKVSFESNA

SEQ ID NO: 29764 - protein, 861 aa, Gossypium hirsutum
MASRPCANFLHLASGNLLDISQTPRGLPRVMTVPGIISDMDSCSSNDGDSDVASSGCRERKIIVANMLPLHAKRDRETSKWRFSWDEDSLLLHLKGGFSPETEVVFVGSLKVDIDVNEQEEAAQKLLEDFNCVPTFLPHDLQKKFYLGFCKQHLWPLFHYMLPMCPDHGDRFDRILWQAYVSANKVFADKVMEVINPDDDYVWIHDYHLIVLPTFLRKHLNRIKLGFFLHSPFPSSEIYRTLPVRDEILRGLLNCDLIGFHTFDYARHFSSCCSRMLGLDYESKRGHIGLDYFGRTVFIKILPVGVHMGRLESVLNLSSTAARVKEIQKQFEGKKLILGIDDMDIFKGISLKLLAVEQLLQQHPDLQGKIVLVQIVNPARGFGKDVQEAKKETYMTAKKINEVYGSPNYQPVILIDRPVPCYEKSAYYALAECCIVNAVRDGMNLVPYKYIVCRQGTPGMDEALGVKPEYPRTSMLVVSEFIGCSPSLSGAIRVNPWDIDAVAEALNTAITMPESEKQLRHEKHYRYVSTHDVAYWARSLVMDLDRACQDHYSKRCWGIGLGLSFRVVSLSPNFRRLAIDHICSAYRRTSRRAIFLDYDGTLVPEASIIKTPSPEVISIIKTLCDDPKNTVFIVSGRGRASLSDWLAPCEKLGIAAEHGYFIRWSKDSEWETSPVGADLEWKKIVEPVMSLYREATDGSSIETKESGLVWHHQDADPDFGSCQAKELLDHLESVLANEPAVVHRGQHIVEVKPQGVSKGLVAEKVLSRMVNGGKPPDFVMCVGDDKSDEDMFQSILTSVSNPSLPVAPEIFACTVGRKPSKARYYLDDTADVLKLLKGLATATISKPRCLPEIKVSFESNA

SEQ ID NO: 29765 - protein, 188 aa, Aspergillus niger
CRDIVEAHYRACLYAGIKISGINAEVMPSQWEYQVGPCDGIEMGDHLWMSRFLLHRVAEEFGVKISFDPKPIKGDWNGAGLHTNVSSASMRAEGGMKVIEAAMKKLEARHVEHIAVYGEGNEERLTGRHETGNIDKFSYGVADRGGSIRIPRQVAKDGKGYFEDRRPASNACPYQITGIIVETLMGGN

SEQ ID NO: 29766 - protein, 325 aa, Streptococcus thermophilus LMG 18311
MEEIMSYTNLKLFALSSNQELAAKVADKIGIELGRSSVREFSDGEIQVNIEESIRGHHVFILQSTSSPVNDNLMEILIMVDALKRASAETINVVMPYYGYARQDRKARSREPITSKLVANMLEVAGVDRLLTVDLHAPQIQGFFDIPVDHLMGAPLIADYFDRAGLTGDDVVVVSPDHGGVTRARKLAQCLKTPIAIIDKRRSVDKMNTSEVMNIIGNVEGKTCILIDDMIDTAGTICHAADALAEAGATNVFASCTHPVLSGPALDNIQKSAIEKLVVLDTIYLPEERLIDKIEQISIADLISEAIIRSHEKRPLSPLFEMGHK

SEQ ID NO: 29767 - protein, 394 aa, Streptococcus thermophilus LMG 18311
MTVMDLTQRFNKNLDKIEVSMIRQFDQSISDVPGIKKLTLGEPDFTTPDHVKEAAKTAIDANQSHYTGMAGLPDLRQAAANFVKEKYNLTYNPDNEILVTIGATEALSASLTAILEPGDTILLPAPAYPGYEPIANLVGAKIVEIDTTANDFVLTPEMLEKAILEQGDKLKAVLLNYPTNPTGVTYSRQQIEDIAEVLKKYDIFVVSDEVYSELTYVDQHVSIAEYLPEQTILINGLSKSHAMTGWRIGLIFAPASLTAQLIKSHQYLVTAAATMAQFAAIEALSAGKDDAQPMKVEYLKRRDYILEKMTELGFKIIKPDGAFYIFAKIPEGYNQDSFKFCQDFAREKAIAIIPGVAFGKYGEGYVRLSYAASMDTIETAMTRLKEFMEEHAEA

SEQ ID NO: 29768 - protein, 267 aa, Streptococcus thermophilus LMG 18311
MLAVYMEKGYTMSVLEIKNLHVSVEDKEILKGLNLTLKTGEIAAIMGPNGTGKSTLSAAIMGNPNYEITEGDILFDGESILDLEVDERARLGLFLAMQYPAEIPGITNAEFIRAAMNAGKEDDEKISVLDFITKLDEKMELLGMREEMAERYLNEGFSGGEKKRNEILQLLMLEPKFALLDEIDSGLDIDALKVVSKGVNAMRGEGFGAMIITHYQRLLNYITPDVVHVMMEGQVVLSGGPELAARLEQEGYAKIAEELGYEYHEEA

SEQ ID NO: 29769 - protein, 330 aa, Streptococcus thermophilus LMG 18311
MKKSFIDQQKEISFVKNTFTQYLIDKLDVVEVQGPILSKVGDGMQDNLNGIENPVTVNVLQIPDATYEVVHSLAKWKRHTLARFGFNEGEGLVVNMKALRPDEDSLDATHSVYVDQWDWEKVIPDGHRNIAYLKETVETIYKVIRLTELAVEARYDIEAVLPKKITFIHSEELVEKYPDLTPKERENAITKEYGAVFLIGIGGVLPDGKPHDGRAPDYDDWTTESEKGYHGLNGDILVWNEQLGHAFELSSMGIRVDEDALKRQVEITGDQDRLKLDWHQALLQGQFPLTIGGGIGQSRMAMFLLRKKHIGEVQTSVWPDAVRETYENIL

SEQ ID NO: 29770 - protein, 452 aa, Streptococcus thermophilus LMG 18311
MKVIKFGGSSLASATQLEKVLNIVKSDPERRFVVVSAPGKRNDEDTKVTDALIKYYKHYIKGADVKADQEWIINRYQAMVDELGFKSKEMVKIAKAITDLATLPIEDNDFLHDTFLAAGEDNNAKLIAEYFRNNDIEARYVHPREAGILVSSEPGNARILPGSYDKLEELRESDEVLIIPGFFGVTSDNQICTFSRGGSDITGSIVAAGVKADLYENFTDVDGIFAAHPGVVYEPHSIPELTYKEMRELAYAGFSVLHDEALLPAYRGKIPLVIKNTNNPDHPGTRIILEHQGATVPVVGIASDDKFVSINMSKYLMNREVGFGRKVLQILEDLNIRWEHMPSGIDDLSIIIRERELTPIKEQEILSYLTRELGVDEVEIEHGLSILVIVGENMRDHIGVTATAAKALSEKNINLEMISQGSSEVSVMFVIETEQEKEAVRALYDAFFRSNN

SEQ ID NO: 29771 - protein, 381 aa, Streptococcus thermophilus LMG 18311
MIYFDNSATTMPYPEALRTYQEVSTKIFGNPSSLHQLGTSATRILEASRKQVADLIGKSADEIFFTSGGTEGDNWVIKGVAFEKEPYGKHIIVSDIEHPAVKESAKWLSEHGFEVSYIPVNAQGFVDVEALAGLLRPDTILVSVMAVNNEIGSIQPIQEISALLANEPTISFHVDAVQAIGKIPVSAYLTDRVDFATFSGHKFHAVRGVGFVYKKAGKKITPFLTGGGQEKDLRSTTENVAGIASMAKALRLVTDKEEFSLPKIAKMKKIIFDELAKYEDITIFSGEGEDFAPNILTFGIKGVRGEVVVHAFEEHQIYISTTSACSSKAGKPAGTLISMGIPTKLAQTAVRISLDDDNDMGQVEQFLTIFKQVYAKTQKVR

SEQ ID NO: 29772 - protein, 299 aa, Streptococcus thermophilus LMG 18311
MTFKSGFVAILGRPNVGKSTFLNHVMGQKIAIMSDKAQTTRNKIMGIYTTDKEQIVFIDTPGIHKPKTALGDFMVESAYSTLREVDTVLFMVPADEPRGKGDDMIIERLKQAKVPVILVVNKIDKVHPDQLLEQIDDFRKQMDFKEIIPISALQGNNVSHLVDVLSDNLEEGFQYFPSDQITDHPERFLVSEMIREKVLQLTREEIPHSVAVVIDSMKRDEETDTVHIRATIMVERDSQKGIVIGKKGAMLKKIGTLARKDIELMLGDKVFLETWVKVKKNWRDKKLDLADFGYNEKEY

SEQ ID NO: 29773 - protein, 393 aa, Streptococcus thermophilus LMG 18311
MTKLSNRVLQMEESVTLAASARAKALKAKGRDILSLTLGEPDFVTPKNIQDAAIASIENGKASFYTVASGLPELKDAVSTYMENFYGYTVKHSEIVVGTGAKFILYAFFATVINPGDEVIIPTPCWVSYVDQVKMVEGVPVTFQTTEANHFKATVEQLEAARTEKTKVVLLNSPSNPTGMIYSKEELQSIGDWAVEHDILILADDIYGRLVYNGNTFTPISSLSDAIRKQTIVINGVSKTYAMTGWRVGFAVGEPEIISGMAKIISQTTSNLTSVSQYAAIEALTGDQSSIEEMRKAFEERLNTIYPLLAEVPGFEVIKPQGAFYLFPNVKKAMEIKGYTDVNDFTNAILEEAEVALVTGAGFGAPENIRLSYATDLDILKEAVRRIKAFMEK

SEQ ID NO: 29774 - protein, 69 aa, Streptococcus thermophilus LMG 18311
MYYMNKGTINWFNADKGCGFIMADDMQDVFAYLISIQGNDFKKYDEGQKVTFDIKMTSRGRYDSNVHKR

SEQ ID NO: 29775 - protein, 88 aa, Streptococcus thermophilus LMG 18311
MFYRFTFRKIRFTILSKGNKYIMANGTVKWFNATKGFGFITSEDGQDLFAHFSSIQSDGFKSLDEDQKVEFDVEVGQRGPQAVNITKA

SEQ ID NO: 29776 - protein, 277 aa, Streptococcus thermophilus LMG 18311
MIFKKILRYLTAVSLVIATVFLITNHKTEAEDTSKLLDSKAVQKIVNRGTLNVGVKQDVPNFGYYSAKTNRYEGMEVDLAKKIADELRVKVNYIPVTTQTREPLMDNGTIDLLIGTYTINDERKASYAISNPYYRDQIGFLVLKDSGINKISDLNGKTIGVAQGASTKAALQEYSSAHNLKFNYVQLGSYPELAVSLYAHRVDAFSVDKSILSGYESKKTKILNEGFKTQDYGIASSKSNQELIDYTNDLIAKWQKDGSLQKLYDKYNLKPAKAENK

SEQ ID NO: 29777 - protein, 247 aa, Streptococcus thermophilus LMG 18311
MGLKFSIPYQIPFYETDITHHVKLPHLLAFSLQVSGMQSESLGNTDKDVFDNYGLVWIVTDYAIEIDRLPRYNEKVTITTEAISYNKIFCYRNFYITDEAGQQIMLFKTTFALMDYETRKVAEVPDEVVAPYGADKIKKLLRGPRYKTLENPLEILYRVRYFDLDMNGHVNNSKYLEWMLDVFDLDFLTEYTPAHIDLKYVKEIHHGSKIYSGYEFDQGSLSSQHQICVDGNVHAQAIIQWKEIGDE

SEQ ID NO: 29778 - protein, 461 aa, Streptococcus thermophilus LMG 18311
MSIFRKKDVGLSQTEMKRHLTLRDVVLLGIGAMVGTGIFTITGTAASTLAGPALIISVLISAVCVGMSAIFFAEFASRYPSAGGVYGYLYASWGEYPAWMGGWLTMIVFMNAVSSVASGWGAYLKGLLASFGLQLPKAISGPFNPSQGTYIDLLPVLVLVLVTALLLMDSKQVLRLNSLLVVLKFSALAVFILVGLFHLNPDNWANFAPFGFGQIYGGKTGIMAGASLMFFGFLGFESISMTVDEIKEPQKNVPRGIILALIIVASLYAVVSLVLTGVVHYTKLNVDDAVAYALRYIGVSWAANYVSVVAIMTLITVCISMAYALSRMVYSLARDGFLPQTFQKVSKTHKVPHYATLLTGILSAISSGIFSLANMASLVNISTLAYLVLLAIALIILRKDKGLPQKDEFKVPFVPVLPILSIIVCLSFMSQYSWQTWSAFGIAVLIGSAIYAFYGYKHSKY

SEQ ID NO: 29779 - protein, 327 aa, Streptococcus thermophilus LMG 18311
MHSLFGELREHISGKGVRIVFPEGNDDRVVRAAARLKFEELVDPIILGDPTEVHKILNDLGFVDFNCTIINPETYEGFEEMKEKFVEVRKGKATIEDADKLLRDVNYFGVMLVKLGLADGMVSGAIHSTADTVRPALQIIKTKPGISCTSGVFLMNREDTNHRLMFADCAINIEPNSQELAEIAINTAETAKVFGIDPKVAMLSFSTKGSAKSPKVDRVVQATNIAKEMRPDLAIDGELQFDAAFVPATAAIKAPDSDVAGQANVFVFPCLQAGNIGYKIAQRLGMFEAIGPILQGLNKPVNDLSRGASAEDIYNLAIITAAQALNN

SEQ ID NO: 29780 - protein, 337 aa, Streptococcus thermophilus LMG 18311
MGFASYFFKGVTIVMVHQKANPKLKLFSLSSNPEIAEKIAENTGLPLGKVSSRQFSDGEIMINIEESVRGDDIYIIQSTSNPVNDHLWELLIMIDACKRASANSVNVVMPYFGYARQDRIAASREPITAKLIANMLVKAGVNRVLTLDLHAVQVQGFFDIPVDNLFTIPLFAEYYNEKGLTGADVVVVSPKNSGVKRARSLAEYLDAPIAIIDYAQDDTGREEGYIIGEVEGKTAILVDDILNTGKTFAEAAKILERGGVNDIYAVASHGLFAGGAGEVLNASPIKEILVTDSVATKENVPTSVKYLSASELIANAITRIFERQPLSPLFAYTANEE

SEQ ID NO: 29781 - protein, 370 aa, Streptococcus thermophilus LMG 18311
MVYLDNAATTPLNTAAISAMTHVMTETFGNPSSLHAYGRQASKELREAREEMAKQFQVPARKLIFTSGGTEGNNTAIKGYALANQARGKHLITTAIEHHSVLHTMAYLEERFGFEVTYIQPVNQVITAQQIAEALRDDTILVSVMYANNETGQLLPIKEIGDLLTNHQAAFHVDAVQVAGKLPIHPEELGVDFLSISAHKFHGPKGVGLLYHNDLHFDNLLHGGEQEEKRRASTENLVGIAGMTAAYKQASKNYQDNYKHVETIRQVFLNSLTVPYEINSVGPSLPHVINISFSGKENGPLLTLLDLAGFAVSTGSACTAGTVDPSHVIQSLYGKDSDKLKTAIRVSLSEENTAEELQALAEKLNQIIGD

SEQ ID NO: 29782 - protein, 264 aa, Streptococcus thermophilus LMG 18311
MKKLFLGAMAFLVAVTLVACGSKKDADESIKENKKLVVAVSPDYPPFEFKTLVDGKDQVVGSDIKLAQAIANELGVKLEVTTMSFDNVLSSLQSGKADLAISGISVTDERKKTFDFSDPYYETQNAIIVRKGQESTYSSLDALKGKKVAVQKGTIEEGLAKKQLKDSIVISLTAMGEAINEVKSGQVDAVDLEKPVAEGYVAQNSDLTLASVALKVDDGDAKAVAMTKGNDKLKEAVNKVIKKLKADGTYDEYIKDASKYTAAE

SEQ ID NO: 29783 - protein, 284 aa, Streptococcus thermophilus LMG 18311
MKLTKKIFALLALVFALVAVTACSSNSSSGKSTAKARTIEEIKKSGELRIAVFADKKPFGYVDNKGAYQGYDIGLGNRLAKDLGVKPKYVSVDAANRAEFLISNKVDITLANFTVTDERKKQVDFALPYMKVSIGVVSPKDKVIKDVKELEGKTLIVTKGTTAETYFEKNYPNIKLQKYDQYSDAYQALLDGRGDAFSTDNTEVLAWALENKGYEVGITSLGDPDTIAPAVQKGNKELLDFINKDIKKLGEENFFHKDYEKTLHPTYGDAAKADDLVVEGGQVK

SEQ ID NO: 29784 - protein, 372 aa, Streptococcus thermophilus LMG 18311
MEELFCIGCGAQIQTEDKEKAGFTPASSIKKAEETGELYCQRCFRLRHYNEIVDVHITDDEFLKLLYEVGDSDALVVNVVDIFDFNGSIIPGLSRFVSGNDVLLVGNKKDILPKSVKDGKVTQWLTERAHEEGMRPVDVMLTSAQNHHAIKELIQRIEALRKGRDVYVVGVTNVGKSTLINAIIKEITGDKDVITTSRFPGTTLDKIEIPLDDGSYIFDTPGIIHRHQMAHYLSAKDLKYVSPKKEIKPKTYQLNAGQTLFLGGLGRFDFIDGDKQGFTAFFDNNLKLHRTKLDGADAFYDKHVGSLLMPPGPKELADFPKLVRHEFTIKDKTDVVFSGLGWIRVQGKTDQPTIVAAWAPEGVGVVVRKAII

SEQ ID NO: 29785 - protein, 268 aa, Streptococcus thermophilus LMG 18311
MKKKLSLSILGTGALLLLSACGHGDVTSQSSGVWERLILTFGKAIQGLSFGGSIGLGIIIFTILIRAVMIPLYNRQIKSSRELQELQPELRRLQSEYPGRENREALAYAQQELYKEHGVNPYASFLPLIIQFPILMALYGALTRVPELREGSFLWVDLGQKDPYFILPILAAAFTFLSTWLTNKVAKDRSAMLIVMNIMLPIFIFWFGTQISSGVALYWTVSNAFQVVQILVFNNPFKIIAERNRLEAEEKERKAKIRRAKKKANKRK

SEQ ID NO: 29786 - protein, 406 aa, Streptococcus thermophilus LMG 18311
MKAFYKEVLMTKTIAINAGSSSLKWQLYEMPEEVVLAKGLIERIGLRDSVSTVKFADHSESQTLDIADHVQAVKILLDDLIRFDIIKSYDEITGVGHRVVAGGEYFKESSLVDEYALAKIEELSALAPLHNPGAASGIRAFKELLPDITSVAVFDTAFHTSMPEVAYRYPVPNRYYTDYQVRKYGAHGTSHQYVSQEAAKLLGKPIEETKIITAHVGNGVSITAVDGGKSVDTSMGLTPLGGVMMGTRTGDLDPAIIPFIIDREPDMADAERIRHVFNKESGLLGISEKSSDMRDIIAGKEAGDEKCTLAYDLYVDRLRKYIAQYFGVMNGADAIVFTAGIGENSADVRASVLDGLTWFGIEVDPEKNVFGRVGDITTADSAVKVFVIPTDEELVIARDVERLKTK

SEQ ID NO: 29787 - protein, 572 aa, Streptococcus thermophilus LMG 18311
MLKEVHVEKIELEEARSGADLILDTLLELGISTIFGYPGGAVLPLYDAIYKNEEINHILSRHEQGSLHEAEGYAKSTGKLGVALVTSGPGATNAITGIADAMSDSVPLLVFTGQVATSGIGKDAFQEADIVGITMPITKYNYQIRDTADIPRIIREAVHIATTGRPGPVVIDLPKDVVAKETTFINDPEINLPSYQPTLRPNEMQINKILKQLGKAKKPVIVAGGGVAYSESAKELVAFAERYQIPVVTSLLGQGTIATSHPLFLGMGGMHGSYAANIAMTDADFMIAIGCRFDDRLTGNPKTFAKNAKVVHIDVDPAEIGKIIAVDLPVVGDAKQALEMLLAEPVVKNNTEKWIEKVKKDKERVRSYDKKERMVQPQAVIERIGELTDGDAVVVTDVGQHQMWTAQYYPYQNERQLVTSGGLGTMGFGVPAAIGAKIANPDKEVILFVGDGGFQMTNQELAILNIYKVSIKVVMLNNHSLGMVRQWQESFYEGRTSESVFNALPDFQLMAQAYGIKSYKFDNPETIDQDLEVIKGDVPMFIEVDISRKEHVLPIVPAGKSNHEMLGVKFNA

SEQ ID NO: 29788 - protein, 325 aa, Streptococcus thermophilus CNRZ1066
MEEIMSYTNLKLFALSSNQELAAKVADKIGIELGRSSVREFSDGEIQVNIEESIRGHHVFILQSTSSPVNDNLMEILIMVDALKRASAETINVVMPYYGYARQDRKARSREPITSKLVANMLEVAGVDRLLTVDLHAPQIQGFFDIPVDHLMGAPLIADYFDRAGLTGNDVVVVSPDHGGVTRARKLAQCLKTPIAIIDKRRSVDKMNTSEVMNIIGNVEGKTCILIDDMIDTAGTICHAADALAEAGATNVFASCTHPVLSGPALDNIQKSAIEKLVVLDTIYLPEERLIDKIEQISIADLISEAIIRSHEKRPLSPLFEMGHK

SEQ ID NO: 29789 - protein, 394 aa, Streptococcus thermophilus CNRZ1066
MTVMDLTQRFNKNLDKIEVSMIRQFDQSISDVPGIKKLTLGEPDFTTPDHVKEAAKTAIDANQSHYTGMAGLPDLRQAAANFVKEKYNLTYNPDNEILVTIGATEALSASLTAILEPGDTILLPAPAYPGYEPIANLVGAKIVEIDTTANDFVLTPEMLEKAILEQGDKLKAVLLNYPTNPTGVTYSRQQIEDIAEVLKKYDIFVVSDEVYSELTYVDQHVSIAEYLPEQTILINGLSKSHAMTGWRIGFIFAPESLTAQLIKSHQYLVTAAATMAQFAAIEALSAGKDDAQPMKVEYLKRRDYILEKMTELGFKIIKPDGAFYIFAKIPEGYNQDSFKFCQDFAREKAIAIIPGVAFGKYGEGYVRLSYAASMDTIETAMTRLKEFMEEHAEA

SEQ ID NO: 29790 - protein, 330 aa, Streptococcus thermophilus CNRZ1066
MKKSFIDQQKEISFVKNTFTQYLIDKLDVVEVQGPILSKVGDGMQDNLNGIENPVTVNVLQIPDATYEVVHSLAKWKRHTLARFGFNEGEGLVVNMKALRPDEDSLDATHSVYVDQWDWEKVIPDGHRNIAYLKETVETIYKVIRLTELAVEARYDIEAVLPKKITFIHSEELVEKYPDLTPKERENAITKEYGAVFLIGIGGVLPDGKPHDGRAPDYDDWTTESEKGYHGLNGDILVWNEQLGHAFELSSMGIRVDEDALKRQVEITGDQDRLKLDWHQALLHGQFPLTIGGGIGQSRMAMFLLRKKHIGEVQTSVWPDAVRETYENIL

SEQ ID NO: 29791 - protein, 452 aa, Streptococcus thermophilus CNRZ1066
MKVIKFGGSSLASATQLEKVLNIVKSDPERRFVVVSAPGKRNDEDTKVTDALIKYYKHYIKGADVKADQEWIINRYQAMVDELGFKSKEMVKIAKAITDLATLPIEDNDFLHDTFLAAGEDNNAKLIAEYFRNNDIEARYVHPREAGILVSSEPGNARILPGSYDKLEELRESDEVLIIPGFFGVTSDNQICTFSRGGSDITGSIVAAGVKADLYENFTDVDGIFAAHPGVVHEPHSIPELTYKEMRELAYAGFSVLHDEALLPAYRGKIPLVIKNTNNPDHPGTRIILEHQGATVPVVGIASDDKFVSINMSKYLMNREVGFGRKVLQILEDLNIRWEHMPSGIDDLSIIIRERELTPIKEQEILSYLTRELGVDEVEIEHGLSILVIVGENMRDHIGVTATAAKALSEKNINLEMISQGSSEVSVMFVIETEQEKEAVRALYDAFFRSNN

SEQ ID NO: 29792 - protein, 299 aa, Streptococcus thermophilus CNRZ1066
MTFKSGFVAILGRPNVGKSTFLNHVMGQKIAIMSDKAQTTRNKIMGIYTTDKEQIVFIDTPGIHKPKTALGDFMVESAYSTLREVDTVLFMVPADEPRGKGDDMIIERLKQAKVPVILVVNKIDRVHPDQLLEQIDDFRKQMDFKEIIPISALQGNNVSHLVDVSSDYLEEGFQYFPSDQITDHPERFLVSEMIREKVLQLTREEIPHSVAVVIDSMKRDEETDTVHIRATIMVERDSQKGIVIGKKGAMLKKIGTLARKDIELMLGDKVFLETWVKVKKNWRDKKLDLADFGYNEKEY

SEQ ID NO: 29793 - protein, 393 aa, Streptococcus thermophilus CNRZ1066
MTKLSNRVLQMEESVTLAASARAKALKAKGRDILSLTLGEPDFVTPKNIQEAAIASIENGKASFYTVASGLPELKDAVSTYMENFYGYTVKHSEIVVGTGAKFILYAFFATVINPGDEVIIPTPCWVSYVDQVKMVEGVPVTFQTTEANHFKATVEQLEAARTEKTKVVLLNSPSNPTGMIYSKEELQSIGDWAVEHDILILADDIYGRLVYNGNTFTPISSLSDAIRKQTIVINGVSKTYAMTGWRVGFAVGEPEIISGMAKIISQTTSNLTSVSQYAAIEALTGDQSSIEEMRKAFEERLNTIYPLLAEVPGFEVIKPQGAFYLFPNVKKAMEIKGYTDVNDFTNAILEEAEVALVTGAGFGAPENIRLSYATDLDILKEAVRRIKAFMEK

SEQ ID NO: 29794 - protein, 72 aa, Streptococcus thermophilus CNRZ1066
MYYMNKGTINWFNADKGYGFIMADDMQDVFAYLISIQGNDFKKYDEGQKVTFDIKMTSRGRYDSNVHKRQMS

SEQ ID NO: 29795 - protein, 277 aa, Streptococcus thermophilus CNRZ1066
MIFKKILRYLTAVSLVIATVFLITNHKTEAEDTSKLLDSKAVQKIVNRGTLNVGVKQDVPNFGYYSAKTNRYEGMEVDLAKKIADELRVKVNYIPVTTQTREPLMDNGTIDLLIGTYTINDERKASYAISNPYYRDQIGFLVLKDSGINKISDLNGKTIGVAQGASTKAALQEYASAHNLKFNYVQLGSYPELAVSLYAHRVDAFSVDKSILSGYESKKTKILNEGFKTQDYGIASSKSNQELIDYTNDLIAKWQKDGSLQKLYDKYNLKPAKAENK

SEQ ID NO: 29796 - protein, 270 aa, Streptococcus thermophilus CNRZ1066
MKKKSIFAIVGIIFIAVIAYFGYQTASGSKTTQTVSKSSSNEKVLRVATTGVSFPGSYKDSNGDLTGFDVEIARAVGKKIGYKVEFITTSFDGLFGLLQSGKVDAVASSIAITDERQKSYDFTTPYATFQYGVVVKKDSSLTNINEIGGHTLAATVGSNQIKVVNAYDPSIQIQTFDDREAALTGVTNGQVDGYSNSKTILSAIIKQKNLDLKILDGELGQENIAIAFNKGKNKDLREKADKSVEELIKDGTVSKLSKKYFSDIDATYKK

SEQ ID NO: 29797 - protein, 461 aa, Streptococcus thermophilus CNRZ1066
MSIFRKKDVGLSQTEMKRHLTLRDVVLLGIGAMVGTGIFTITGTAASTLAGPALIISVLISAVCVGMSAIFFAEFASRYPSAGGVYGYLYASWGEYPAWMGGWLTMIVFMNAVSSVASGWGAYLKGLLASFGLQLPKAISGPFNPSQGTYIDLLPVLVLVLVTALLLMDSKQVLRLNSLLVVLKFSALAVFILVGLFHLNPDNWANFAPFGFGQIYGGKTGIMAGASLMFFGFLGFESISMTVDEIKEPQKNVPRGIVLALIIVASLYAVVSLVLTGVVHYTKLNVDDAVAYALRYIGVSWAANYVSVVAIMTLITVCISMAYALSRMVYSLARDGFLPQTFQKVSKTHKVPHYATLLTGILSAISSGIFSLANMASLVNISTLAYLVLLAIALIILRKDKGLPQKDEFKVPFVPVLPILSIIVCLSFMSQYSWQTWSAFGIAVLIGSAIYAFYGYKHSKY

SEQ ID NO: 29798 - protein, 327 aa, Streptococcus thermophilus CNRZ1066
MRSLFGELREHISGKGVRIVFPEGNDDRVVRAAARLKFEELVDPIILGDPTEVHKILNDLGFVDFNCTIINPETYEGFEEMKEKFVEVRKGKATIEDADKLLRDVNYFGVMLVKLGLADGMVSGAIHSTADTVRPALQIIKTKPGISCTSGVFLMNREDTNHRLMFADCAINIEPNSQELAEIAINTAETAKVFGIDPKVAMLSFSTKGSAKSPKVDRVVQATNIAKEMRPDLAIDGELQFDAAFVPATAAIKAPDSDVAGQANVFVFPCLQAGNIGYKIAQRLGMFEAIGPILQGLNKPVNDLSRGASAEDIYNLAIITAAQALNN

SEQ ID NO: 29799 - protein, 337 aa, Streptococcus thermophilus CNRZ1066
MGFASYFFKGATIVMVHQKANPKLKLFSLSSNPEIAEKIAENTGLPLGKVSSRQFSDGEIMINIEESVRGDDIYIIQSTSNPVNDHLWELLIMIDACKRASANSVNVVMPYFGYARQDRIAASREPITAKLIANMLVKAGVNRVLTLDLHAVQVQGFFDIPVDNLFTIPLFAEYYNEKGLTGADVVVVSPKNSGVKRARSLAEYLDAPIAIIDYAQDDTGREEGYIIGEVEGKTAILVDDILNTGKTFAEAAKILERGGVNDIYAVASHGLFAGGAGEVLNASPIKEILVTDSVATKENVPTSVKYLSASELIANAITRIFERQPLSPLFAYTANEE

SEQ ID NO: 29800 - protein, 264 aa, Streptococcus thermophilus CNRZ1066
MKKLFLGAMAFLVAVTLVACGSKKDADESIKENKKLVVAVSPDYPPFEFKTLVDGKDQVVGSDIKLAQAIANELGVKLEVTTMSFDNVLSSLQSGKADLAISGISVTDERKKTFDFSDPYYETQNAIIVRKGQESTYSSLDALKGKKVAVQKGTIEEGLAKKQLKDSTVISLTAMGEAINEVKSGQVDAVDLEKPVAEGYVAQNSDLTLASVALKVDDGDAKAVAMTKGNDKLKEAVNKVIKKLKADGTYDEYIKDASKYTAAE

SEQ ID NO: 29801 - protein, 284 aa, Streptococcus thermophilus CNRZ1066
MKLTKKIFALLALVFALVAVTACSSNSSSGKSTAKARTIEEIKKSGELRIAVFADKKPFGYVDNKGAYQGYDIELGNRLAKDLGVKPKYVSVDAANRAEFLISNKVDITLANFTVTDERKKQVDFALPYMKVSIGVVSPKDKVIKDVKELEGKTLIVTKGTTAETYFEKNYPNIKLQKYDQYSDAYQALLDGRGDAFSTDNTEVLAWALENKGYEVGITSLGDPDTIAPAVQKGNKELLDFINKDIKKLGEENFFHKDYEKTLHPTYGDAAKADDLVVEGGQVK

SEQ ID NO: 29802 - protein, 372 aa, Streptococcus thermophilus CNRZ1066
MEELFCIGCGAQIQTEDKEKAGFTPASSIKKAEETGELYCQRCFRLRHYNEIVDVHITDDEFLKLLHEVGDSDALVVNVVDIFDFNGSIIPGLSRFVSGNDVLLVGNKKDILPKSVKDGKVTQWLTERAHEEGMRPVDVMLTSAQNHHAIKELIQRIEALRKGRDVYVVGVTNVGKSTLINAIIKEITGDKDVITTSRFPGTTLDKIEIPLDDGSYIFDTPGIIHRHQMAHYLSAKDLKYVSPKKEIKPKTYQLNAGQTLFLGGLGRFDFIDGDKQGFTAFFDNNLKLHRTKLDGADAFYDKHVGSLLMPPGPKELADFPKLVRHEFTIKDKTDVVFSGLGWIRVQGKADQPTIVAAWAPEGVGVVVRKAII

SEQ ID NO: 29803 - protein, 572 aa, Streptococcus thermophilus CNRZ1066
MLKEVHVEKIELEEARSGADLILDTLLELGISTIFGYPGGAVLPLYDAIYKNEEINHILSRHEQGSLHEAEGYAKSTGKLGVALVTSGPGATNAITGIADAMSDSVPLLVFTGQVATSGIGKDAFQEADIVGITMPITKYNYQIRDTADIPRIIREAVHIATTGRPGPVVIDLPKDVVAKETTFINDPEINLPSYQPTLRPNEMQINKILKQLGKAKKPVIVAGGGVAYSESAKELVAFAERYQIPVVTSLLGQGTIATSHPLFLGMGGMHGSYAANIAMTDADFMIAIGCRFDDRLTGNPKTFAKNAKVVHIDVDPAEIGKIIAVDLPVVGDAKQALEMLLAEPVVKNNTEKWIEKVKKDKERVRSYDKKERMVQPQAVIERIGELTDGDAVVVTDVGQHQMWTAQYYPYQNERQLVTSGGLGTMGFGVPAAIGAKIANPDKEVILFVGDGGFQMTNQELAILNIYKVSIKVVMLNNHSLGMVRQWQESFYEGRTSESVFNALPDFQLMAQAYGIKSYKFDNPETIDQDLEVIKEDVPMFIEVDISRKEHVLPIVPAGKSNHEMLGVKFNA

SEQ ID NO: 29804 - protein, 246 aa, Cucumis sativus
MAPREKAVAVKPSVGNVKEVHFRGVRKRPWGRYAAEIRDPSKKSRVWLGTFDTAEEAARAYDSAARDFRGVKAKTNFPLPSDDQLLNLNNKINNINNNQSPSQSSTVESSSREQALMVDSSPLNLNLGHGIGGLTNAGPISFPFQRYQIPMIGEVFTRGIPPSNHVLYFDAALRAGMINSHPNQRLHFDRIREAVSDFRREFAGSGVQSDSDSSSVVDMNGQDLKPRGGSGGRLDLDLNFPPPESA

SEQ ID NO: 29805 - protein, 76 aa, Cannabis sativa
VKGQDGNEVFFRIKRSTQLKKLMNAYCDRQSVEFNSIAFLFDGRRLRAEQTPDELEMEDGDEIDAMLHQTGGASFM

SEQ ID NO: 29806 - protein, 158 aa, Solanum lycopersicum
MQEQATSSIAASSLPSSSERSSSSALHHELKEGMESDDEIRRVPEMGGEATGTTSASGRDGVSAAGQAQPSAGTQRKRGRSPADKENKRLKRLLRNRVSAQQARERKKAYLIDLEARVKELETKNAELEERLSTLQNENQMLRHILKNTTAGAQEGRK

SEQ ID NO: 29807 - protein, 419 aa, Leuconostoc mesenteroides
MAKTMAVNAGSSSLKFQLLEMPAEQVIAQGVIERIGMDDAIVTIKYGAEINAERLVGHSEDDEHITLSKDGKGKKYENVTAIKNHQQAINFMLQKLTDLGIIKDFNEITGVGHRVVAGGEWFNHSVVVTDEVLAKIDRLADYAPLHNPANAMGIRAFQKLLPDALSVAVFDTSFHQTMPDENFLYALPYEYYTRYGARKYGAHGTSHRYVASRAAELLGKDLKSLKLITLHLGAGASITAIKDGKSLDTSMGFSPLAGVAMATRSGDVDASLVYYIQEREGLSNEEMLNILNKKSGLLGISTISSDMRDLLDVQDTNEHADMAIRIFINRVVKYVGQYVAEMGGVDAIVFTAGIGENSVPVRKMIIDKLNYFGVKLDEEKNNVRGKEVEISTNDSKVKALLIPTNEELMIARDVESLKA

SEQ ID NO: 29808 - protein, 284 aa, Thermus thermophilus HB8
MRRVGFIGLGRMGLPMAQNLARAGYEVLAWNRTPKEAEGLVLVGSPKEAAGTGLVITMLADDAATEAVLGEILEGLPEGGLHIAMSTLGVPYSRALEERHKAAGRRYLAAPVFGRPEAAASRALRIVVAGEARDVEEARPILSALGQEVHVVGERPHQAHAVKLGGNFLIAAMLEALSEAYVLVEKNGVKREAFYEVVRAFFRSPVYENYGRILLERRFTPPGFALRLGLKDVRLIHQAADTTHTPMPLAHLLLDRMLEGVARGMGEEDWTAILKLAEAHGGLA

SEQ ID NO: 29809 - protein, 385 aa, Thermus thermophilus HB8 [sequence omitted]

SEQ ID NO: 29810 - protein, 446 aa, Thermus thermophilus HB8
MRKGTLNGIAALGLSGLALAEGVDGADTAWMLVSTALVLLMTPALAFFYGGLVRSKNALNTMMMSFAALAFVGVGWALLGYTLAFGEGGPLLGGLGHLFLRGVGLEAQGTIPHVLFLAFQGTFAIITAALVSGALVERMRFPAYLAFLTLWGLFVYAPLAHWVWGGGFLGALGALDFAGGTVVHINAGVAALVGALVLGARKDYGRQAILPHNVPFTLLGAALLWFGWFGFNGGSALAANASAALAFANTMLAPAATLLVWTLLDLLRTGKATAVGAATAIVVGLVAVTPAAGFVSPLSALLIGALAAFPSYYVLLWRARTRLDDSLDVFAGHGVGGITGALLTGVFAEKAWNGVADGLLFGNPMQLGIQAVAVLAAVVYSALGTFALLKLVGLLTPLRAGPKEEGVGLDVTQHGEEAYTSGEGAILVLSEKAPAVPSLRPQGGEA

SEQ ID NO: 29811 - protein, 517 aa, Thermus thermophilus HB8
MGPERQSMEFKDFPLKPEILEALHGRGLTTPTPIQAAALPLALEGKDLIGQARTGTGKTLAFALPIAERLAPSQERGRKPRALVLTPTRELALQVASELTAVAPHLKVVAVYGGTGYGKQKEALLRGADAVVATPGRALDYLRQGVLDLSRVEVAVLDEADEMLSMGFEEEVEALLSATPPSRQTLLFSATLPSWAKRLAERYMKNPVLINVIKDEPVTYEEEAVPAPVRGRLEVLSDLLYVASPDRAMVFTRTKAETEEIAQGLLRLGHLAQALHGDLSQGERERVLGAFRQGEVRVLVATDVAARGLDIPQVDLVVHYRLPDRAEAYQHRSGRTGRAGRGGRVVLLYGPRERRDVEALERAVGRRFKRVNPPTPEEVLEAKWRHLLARLARVPEKDYRLHLDFAGRLFSEGRVEVVAALLALLLGGAPKEKSLLTGEEGWRTYKATGPRLSLPRLVALLKGQGLEVGKIAEAEGGLYVDLRPEARPEVAGLRLEPARRVEGLLEIPSRTRRPARA

SEQ ID NO: 29812 - protein, 73 aa, Thermus thermophilus HB8
MQKGRVKWFNAEKGYGFIEREGDTDVFVHYTAINAKGFRTLNEGDIVTFDVEPGRNGKGPQAVNVTVVEPARR

SEQ ID NO: 29813 - protein, 369 aa, Thermus thermophilus HB8
MVIGVPKEIKTLENRVALTPGGVESLVRRGHTVLVERGAGEGSGLSDAEYARAGAELVGREEAWGAEMVVKVKEPLPEEYGFLREGLILFTYLHLAADRGLTEAMLRSGVTGIAYETVQLPDGTLPLLVPMSEVAGRMAPQVGAQFLEKPKGGRGVLLGGVPGVAPASVVILGGGTVGTNAAKIALGMGAQVTILDVNHKRLQYLDDVFGGRVITLTATEANIKKSVQHADLLIGAVLVPGAKAPKLVTRDMLSLMKEGAVIVDVAVDQGGCVETIRPTTHAEPTYVVDGVVHYGVANMPGAVPRTSTFALTNQTLPYVLKLAEKGLDALLEDAALLKGLNTHKGRLTHPGVAEAFGLPYTPPEEALRG

SEQ ID NO: 29814 - protein, 400 aa, Thermus thermophilus HB8
MKIVLAYSGGLDTSIILKWLKETYRAEVIAFTADIGQGEEVEEAREKALRTGASKAIALDLKEEFVRDFVFPMMRAGAVYEGYYLLGTSIARPLIAKHLVRIAEEEGAEAIAHGATGKGNDQVRFELTAYALKPDIKVIAPWREWSFQGRKEMIAYAEAHGIPVPVTQEKPYSMDANLLHISYEGGVLEDPWAEPPKGMFRMTQDPEEAPDAPEYVEVEFFEGDPVAVNGERLSPAALLQRLNEIGGRHGVGRVDIVENRFVGMKSRGVYETPGGTILYHARRAVESLTLDREVLHQRDMLSPKYAELVYYGFWYAPEREALQAYFDHVARSVTGVARLKLYKGNVYVVGRKAPKSLYRQDLVSFDEAGGYDQKDAEGFIKIQALRLRVRALVEREGHGA

SEQ ID NO: 29815 - protein, 430 aa, Thermus thermophilus HB8
MKRLLAAFLFLLPALALEVGFKDADVNGDGTPEKVAVTNLMDLAFDEAGQVVGWYVKAYKGTAFGDYARAPNLAANGPVLSPVGFRPLEAEFAVEDGHLLARFRGEEGTLTYRIPKERYTAEVTADFPLVLKLSAQGNPKALLEGAAEPAPSGEGRLVYLAWQTRPKAGYALVAFGEGPLEGRLVGREGEVRLGPGEILRVYGGQNELVRFHVEGLLSFPGLFSPNLWGQLSLGLLWIMEAAYRFTGNWGLAILFLTLVVRLLLWPLMHQQFKSMAEIQRLQPLIQKINEKYKDDPNKRAEATMKLYQEHRVNPAAGCLPLLIQMPILFILWKVIANYEFGQGFLWIPDLALPDPYYILPVLYVASTFLSTWLSAHGNRDLIRQSLFMNLIFVFLVLQFPSGVTLYWVLSTLIGLVQQWLINKSLAPLKA

SEQ ID NO: 29816 - protein, 374 aa, Thermus thermophilus HB8
MRGVYLDYAATTPLDPEVREAMRAVEEVFGNPSSIHRFGQEARKVLEEARERVAEALGARPREVVFTAGGSEADALALLGPALARGRGHVVSTAVEHAAVLGALRLLERLGFAVTLLKPDSLGMVYPEQVEEALRPDTFLVSVMTANNELGNLYPVREIAEVAHRHGALFHTDAVQAVGQVPFRMDEVGADLVSLSAHKFYGPKGVGALLVRQGVELMAVVPGKQEGGRRGGTQSPVLAHGMAVALELALKRLPEEAARLAALRRRLEAGLLAVEGVELNGHPERRLPKLVNVTVKGADGEALLLAMDLLGVAVSSGSACSAGNLEPSHVLLAIGRSYAEAKASLRFSLGRFTTEEEVDRAVAVFREAVARARA

SEQ ID NO: 29817 - protein, 405 aa, Thermus thermophilus HB8
MALVVQKYGGTSVGDLERIHKVAQRIAHYREKGHRLAVVVSAMGHTTDELIALAKRVNPRPPFRELDLLTTTGEQVSVALLSMQLWAMGIPAKGFVQHQIGITTDGRYGDARILEVNPARIREALEQGFVAVIAGFMGTTPEGEITTLGRGGSDTTAVAIAAALGAKECEIYTDTEGVYTTDPHLIPEARKLSVIGYDQMLEMAALGARVLHPRAVYYAKRYGVVLHVRSSFSYNPGTLVKEVAMEMDKAVTGVALDLDHAQIGLIGIPDQPGIAAKVFQALAERGIAVDMIIQGVPGHDPSRQQMAFTVKKDFAQEALEALEPVLAEIGGEAILRPDIAKVSIVGVGLASTPEVPAKMFQAVASTGANIEMIATSEVRISVIIPAEYAEAALRAVHQAFELDKA

SEQ ID NO: 29818 - protein, 548 aa, Thermus thermophilus HB8
MGLVPECFITELVERDLKEGKYAKLVTRFPPEPNGYLHIGHARSIVLNFGLAQDYGGECNLRFDDTNPETEKEEYARAIEEDVRWLGFRPTRVLYASDYFETMYQCALVLIQEGKAYVDDLPEEEMSELRAQGKPSPYRERSVEENLELFERMRRGEFPTGSRVLRAKIDPAHPNFKLRDPVLYRIVHAPHYHVGDRWVIYPMYDFAHPLEDFIEGVTHSLCTLEFENNRTVYDWVIENLKGKCGLPTSPRPHQYEFARLDLSHTVLSKRKLIKLVEGGYVSGWDDPRLPTLRGLRRRGVRPEAIVEFVRKTGISRNEAQIEMDLFEEVVRDDLNPIAPRVLGVVDPLKVVLTNYEGEEWIEAPYWPRDIPKEGTRPLPFSPELYIERTDFSLNPPKGWKRLAPGQRVRLRHAYVIELEDVVEEGGEVRLLKARIVPGTLGANPEDGVRPKGVIHWVSARHALPVEFRLYGRLFRTKDPEEGGDFLQNLNPEALVVKRGFIEPSVAQDPEDTRYQLERLGYFWRDPVDSRPEALVMNRIVPLKEGYRV

SEQ ID NO: 29819 - protein, 396 aa, Thermus thermophilus HB8
MREVYVVAAVRTPIGKFGGVFKDVSPVDLGAHAMREALARAGVEGKALDLYIFGNVLRAGHGQLLPRQAALKAGIPKEVDGYQVDMVCASGMMAALNAVQFLRTGEAHLVLAGGMESMSQAGFYLSHRARWGYKFLLGAPENLQDILLRDGLSDPFTGEAMGEQAERLAQDHGVTRREIDEAAYLSHKRAAEATEKGLFAWEIAPMEVQGRKGPVVVDRDEGIRPETTLESLAALRPAFKKDGVLTAGNSSQISDGAAALLLASEEAVKAHGLKPIAKVLGGAWAAGESWRFPEAPIPAAKRLLDRLGMRVSDFGLFENNEAFALNNVLFSRLLDVPYERLNVFGGAVALGHPIGASGARILVTLLNALRAKGEERGLAAICHGTGGSVAFAVEVV

SEQ ID NO: 29820 - protein, 120 aa, Thermus thermophilus HB8
MKRVMFHAKIHRATVTQADLHYVGSVTVDQDLLDAAGILPFEQVDIYDITNGARLTTYALPGERGSGVIGINGAAAHLVKPGDLVILVAYGVFDEEEARNLKPTVVLVDERNRILEVRKG

SEQ ID NO: 29821 - protein, 349 aa, Thermus thermophilus HB8
MVETLPALEIGEDERLDLENLATGAFFPVKGFMTREEALSVAHEMRLPTGEVWTIPILLQFREKPRVGPGNTVALLHGGERVALLHVAEAYELDLEALARAVFGTDSETHPGVARLYGKGPYALAGRVEVLKPRPRTPLEKTPEEVRAFFRQRGWRKVVAFQTRNAPHRAHEYLIRLGLELADGVLVHPILGAKKPDDFPTEVIVEAYQALIRDFLPQERVAFFGLATPMRYAGPKEAVFHALVRKNFGATHFLVGRDHAGVGDFYDPYAAHRIFDRLPPLGIEIVKVGAVFHCPLCGGIASERTCPEGHREKRTAISMTKVRALLREGKAPPSELVRPELLPILRRGV

SEQ ID NO: 29822 - protein, 585 aa, Thermus thermophilus HB8
MAGLVDRVSGARLDPAAEAEIRYLEAMIARLEAGEEDPEDFRVFRLKNGIYGIRGRPEHHMIRIKLPVGRITPEGLRVLADVAERYAENRLAHVTTRQAVQLHHVHRRDVPKVLRAVNAVGLTTREACGHSIRAITCCPYAGVSPEEPFDVTPYAEAAYRYFLRHPVGQNLPRKFKIAFEGCAADHARTPIHDIGVVAALEGGKRGFRVYVGGGLGAAPMSAELLEAFTPEEDLLPTMLAIVRLFDRYGNRKVLTQARLKFLVKKWGIAAFREAVREERRLVKLTASGEDLEAWAPPPEPEPPRLPSPPKKPFSFAPGFDAWRRTNLFKQKQEGFYTVTVRLPLGDITPEGLRALAAIAETYAAEVRSAISQNLLLRFVPEEALGGLYEALLEAGLALPEAHTLLDITRCPGADTCNLAITRSRGLAQALEAHLATLPLAQDPGAKAIGVKISGCPNSCGQHHIADIGFYGSSRKVGEREVPHYVLLLGGRTREGEARFGQVVGRLPARRVPEAVERILKRYLEERQNGESFQAYLDRVGAASFKPLLQELQEVPPYEEAPEFYQDLGAEGEAFSVQLGRGECAV

SEQ ID NO: 29823 - protein, 384 aa, Thermus thermophilus HB8
MGEPVILEAVRTPIGKRNGALRAYRPDALYAKVLDALLERTGIDPGLIGDVVTGCVTQVGEQGANVGRLGVLLSRLPKEVPAVSLNRMCGSSQQAVHFAAQAIAAGDVDFAIAGGVESMTRVPMFADIGGGFHTLNPELGKRYELVHQGESAERIAERYGFCREELDEWGYLSHKRAARATEEGRFSAQILPLEGLDAEGRPFLLTRDEGVRPDVDYEKMLALKPVFREDGVVTAGNSSQISDGAAALLLGDREKALALGLRPRARFLARVVVAGDPTLQLLEVIPAAKKALERAGLSLRDVDVIEVNEAFASVVLAFLRELGADPEKVNPNGGAIAHGHPLGATGAVLMTKLLYELERTGSEFGLQVMCIGHGQATATVIQRL

SEQ ID NO: 29824 - protein, 311 aa, Thermus thermophilus HB8
MRVLVTRTLPGKALDRLRERGLEVEVHRGLFLPKAELLKRVEGAVGLIPTVEDRIDAEVMDRAKGLKVIACYSVGVDHVDLEAARERGIRVTHTPGVLTEATADLTLALLLAVARRVVEGAAYARDGLWKAWHPELLLGLDLQGLTLGLVGMGRIGQAVAKRALAFGMRVVYHARTPKPLPYPFLSLEELLKEADVVSLHTPLTPETHRLLNRERLFAMKRGAILLNTARGALVDTEALVEALRGHLFGAGLDVTDPEPLPPGHPLYALPNAVITPHIGSAGRTTRERMAEVAVENLLAVLEGREPPNPVV

SEQ ID NO: 29825 - protein, 397 aa, Thermus thermophilus HB8
MREAVIVSAVRSPVARGKKNGALATLHPVDLSAQVMRAAVERVGLDPKELEDVLWGCAMPEAAQGLNIARLALLRAGFPVEVAGATINRFCSSGLQTIAMAAQAVMTGMADAVLAGGVEMMSQVPMSGFHTRLHPDLTPTEWSPETYSTYIGMGFTAERVAERFGISREDQDRWALRSHQKAAQAWAEGRFPEVVPIRVPKVTYRGTKKEVEEVVFDRDETVRPDTSLEALAKLRPAFKKNGTVTAGNSSPYSDGAAAVVVMSREKAEALGLKPLARFVSFAVAGVEPDVMGIGPVKAVPKALQRAGLTLDQIALIEFNEAFAAQVLAVMRVLEMPEEKTNVNGGAIALGHPLGATGAKLTAQLLSELSRRGGGYGLVTMCIGGGMGAAGVFEVYPA

SEQ ID NO: 29826 - protein, 381 aa, Thermus thermophilus HB8
MRLHPRTEAAKESIFPRMSGLAQRLGAVNLGQGFPSNPPPPFLLEAVRRALGRQDQYAPPAGLPALREALAEEFAVEPESVVVTSGATEALYVLLQSLVGPGDEVVVLEPFFDVYLPDAFLAGAKARLVRLDLTPEGFRLDLSALEKALTPRTRALLLNTPMNPTGLVFGERELEAIARLARAHDLFLISDEVYDELYYGERPRRLREFAPERTFTVGSAGKRLEATGYRVGWIVGPKEFMPRLAGMRQWTSFSAPTPLQAGVAEALKLARREGFYEALREGYRRRRDLLAGGLRAMGLRVYVPEGTYFLMAELPGWDAFRLVEEARVALIPASAFYLEDPPKDLFRFAFCKTEEELHLALERLGRVVNSPREAEGGAVSG

SEQ ID NO: 29827 - protein, 521 aa, Thermus thermophilus HB8
MWRVLVSDDMRLGEVRYPGVILDYRPGIGREELLEIIPAYDALITRSRTRVDAELLQRGKRLKVVGRGGVGVDNVDLEAASRLGILVVNVPEANTRSAAELAFGLLLAAARGIALSDRKLRQGEWDRKFLGLELKGKTLGIVGLGRIGSQVARFAKGFEMRVLAYDPYIPKARAESLGVELLENLEDLLRQSHFLTVHTPLTEETRGMIGRRELYLLPRGAVVVNAARGGIIDEKALLEVLEEGHLFAVGLDVFAEEPPPKDHPLIHHPRVVHTAHLGANTLEAQERVGEAILERVVRTLEGDLSYALNTGFDPEALEALKGFLPLGEALGKLLAQITRGRPEALEVRFLGQFEKDPEPIASAVAKGLLARVLGEGAVNLVSARPLLKDRGIHLTTLRSEEAGEYTRLVEARLSTDQEERRARGVVIGGRPRLVGIDDYALEVVPEGYMLVCVNYDRPGVVGQVGTLLGEAGVNIAGMQLGRDVPGGRALFVLTVDQKPSPEVLEALRALPVLERVDLVEL

SEQ ID NO: 29828 - protein, 401 aa, Thermus thermophilus HB8
MPEAWIVEAVRTPIGKHGGALASVRPDDLLAHALSALVDRSGVPKEEVEDVYAGCANQAGEDNRNVARMALLLAGFPVEVAGCTVNRLCGSGLEAVAQAARAIWAGEGKVYIGSGVESMSRAPYAVPKPERGFPTGNLVMYDTTLGWRFVNPKMQALYGTESMGETAENLAEMYGIRREEQDRFALLSHQKAVRAWEEGRFQDEVVPVPVKRGKEEILVEQDEGPRRDTSLEKLAALRPVFREGGTVTAGNSSPLNDGAAAVLLVSDDYAKAHGLRPLARVRAIAVAGVPPRIMGIGPVPATRKALERAGLSFSDLGLIELNEAFAAQALAVLREWSLSMEDQRLNPNGGAIALGHPLGASGARILTTLVHEMRRRKVQFGLATMCIGVGQGIAVVVEGMG

SEQ ID NO: 29829 - protein, 223 aa, Thermus thermophilus HB8
MELYLDTASLEEIREIAAWGVLSGVTTNPTLVAKAFAAKGEALTEEAFAAHLRAICETVGGPVSAEVTALEAEAMVAEGRRLAAIHPNIVVKLPTTEEGLKACKRLSAEGIKVNMTLIFSANQALLAARAGASYVSPFLGRVDDISWDGGELLREIVEMIQVQDLPVKVIAASIRHPRHVTEAALLGADIATMPHAVFKQLLKHPLTDIGLKRFLEDWEKVKP

SEQ ID NO: 29830 - protein, 293 aa, Thermus thermophilus HB8
MRLVFGEKDTPYEEARVVVLPVPYDLSLSFLPGARRGPEAILLASRELEPFLLELGAAPEEVGIHAAEPVPWVAGMAEESHRLIREEALRHLRAGKWVVALGGDHSVTHPLVQAHREALGDFSLLHVDAHADLYPEWQGSVYSHASPFYRLLTEGFPLVQVGIRAMDRDSLRLARKKGVALFPAHRIHREGLPLDEILRALGKRVYISLDFDALDPSLMPSVGTPLPGGLSYRQVVDLLEAVFREKEVVGMDFVELSPNGQFHAEMTAAQLVYHAIGLKGLQAGWLSREVDHI

SEQ ID NO: 29831 - protein, 562 aa, Thermus thermophilus HB8
MKGAEALLRALEREGVEVIFGHPGGAIMPTYDALYDSPIRHILVRHEQGGVHAATAYARASGRVGVVMATSGPGALNLVTGLADAMMDSTPVVAITGNVPRALIGTDAFQEADVTGVTMPITKHNYLVQDVNEIPRVVKEAFHIAATGRPGPVLIDIPKDVQLAEFTGSFDVKLDLPGYKPTLKGHPKQIERALDALEKAERPVLMVGGGAQHAHAELLAFAEKTGLPVITTLMGLGAFPGNHPLWLGMPGMHGTVAANRAIHHADVILAIGLRFDDRVTGKVSRFAPHAHTIIHVDIDPAEIGKVVRTHIPIVGDSRLVLKELLKGAKALRLAAWWRELEEWRTRYPLRYRPKPHLQSQEVIRAFYEATGGHAIVTTGVGQHQMFAAQFFPVTRPRSFLTSGGLGTMGVGLPFAIGAKIARPEELVIDFDGDGSFQMTLQELATVVKYKLDVKVVILNNGYLGMVRQWQDLFHAKRYSEVYLADSNPDFARLAEAYGIKGVRVERKEDLMKGVEAVLNADGPVVAEFKVYQEEGVFPMIPAGGAAEDMILEPPEEKEEVGA

SEQ ID NO: 29832 - protein, 600 aa, Thermus thermophilus HB8
MTEDTYSKAFDRALFARILRYVWPYRLQVVLALLFLLVVTLAAAATPLFFKWAIDLALVPTEPRPLAERFHLLLWISLGFLAVRAVHFAATYGETYLIQWVGQRVLFDLRSDLFAKLMRLHPGFYDRNPVGRLMTRVTSDVDAINQFITGGLVGVIADLFTLVGLLGFMLFLSPKLTLVVLLVAPVLLAVTTWVRLGMRSAYREMRLRLARVNAALQENLSGVETIQLFVKEREREEKFDRLNRDLFRAWVEIIRWFALFFPVVGFLGDFAVASLVYYGGGEVVRGAVSLGLLVAFVDYTRQLFQPLQDLSDKFNLFQGAMASAERIFGVLDTEEELKDPEDPTPIRSFRGEVEFRDVWLAYTPKGVEPTEKDWVLKGVSFRVRPGEKVALVGATGAGKTSVVSLIARFYDPQRGCVFLDGVDVRRYRQEELRRHVGIVLQEPFLFSGTVLDNLRLFDPSVPPERVEEVSRFLGAHEFILRLPKGYQTVLGERGAGLSTGEKQLLALVRALLASPDILLILDEATASVDSETEKRLQEALYKAMEGRTSLIIAHRLSTIRHVDRILVFRKGRLVEEGSHEELLAKGGYYAALYRLQFQEA

SEQ ID NO: 29833 - protein, 431 aa, Thermus thermophilus HB8
MHKVVIVGRPNVGKSSLFNRLLKKRSAVVADVPGVTRDLKEGVVETDRGRFLLVDTGGLWSGDKWEKKIQEKVDRALEDAEVVLFAVDGRAELTQADYEVAEYLRRKGKPVILVATKVDDPKHELYLGPLYGLGFGDPIPTSSEHARGLEELLEAIWERLPVRQIETEPEVAGIRLAIVGRPNAGKSSLLNAILGEERVIVSEEPGTTRDAIDVEFFFGGQRFVLVDTAGIRKRPENLVEELAIRRSLRAMDEADVVLLVVDPFQVGDRELKLANEALDRGKPVLLVITKWDLVDKEDAPKMRRLLREKLAHLDHLPRVFTSALTRQNLDRIFREAVRLHELNQTRVPTAELNRWVAVWTSRVQMPNFKGKPLKILYATQPEVAPPTFVFFVNHPEFVTRAFENYLKNRIGEDLGLREVPFRLVFRGRREE

SEQ ID NO: 29834 - protein, 216 aa, Thermus thermophilus HB8
MKGSPLFHGLAPEEVDLALSYFQRRLYPQGKPIFYQGDLGQALYLVASGKVRLFRTHLGGQERTLALLGPGELFGEMSLLDEGERSASAVAVEDTELLALFREDYLALIRRLPLVAHNLAALLARRLREADLELDLLSFEEARNRVAYALLKLLRQGLGPLFQIRHHELAALAGTSRETVSRVLHALAEEGVVRLGPGTVEVREAALLEEIAFGLA

SEQ ID NO: 29835 - protein, 345 aa, Thermus thermophilus HB8
MEFGVPRERSGGEIPERRVPLTPQGVRELVASGHRVYVERGAGEGAGFPDEAYEEAGARLVGREEAFGRPQVVLKVARPTLEEVGLMRKNAVLMAFLHLAVAESPLVEAMAQKGLTAIGYELVGEEGRRPVLKAMSEIAGRMAPQLAGRLLEAPQGPGILLSGLVGIPPADVVVLGAGVLGRAAARAFLGAGASVHLLDRALPPLEEAAREAPGAITALVTQDRLERYVAFADVLVGAVAVPGERTPLLLTRGLLARMRPGSVLLDFSIDQGGVSETSRPGVYQEMGVTHFCLPNVPALVPRTASHALTLTLLPYLLRIQEDPLALPGLRQGAYLLFGEKGGHLE

SEQ ID NO: 29836 - protein, 1492 aa, Thermus thermophilus HB8
MSWKDAYPDIPLGRDACGIIAMAEKSGKPSHRVVRRTLESLYRMAHRAGAIRGEGDGTGIQTDIPRELWALFLEQAGLDPGLAHNPRFFVGHFFVPKKEAGRLQEFEDLLRREGQRLGVRPVLFRRGEVVSEVLGPVGRRTEPLFLQVAGLSPDGDAPLWELGLRLEASFPVHVVSLSTHSVVYKVRGAAELLKRYYPELSRPEFKSRIALGHNRYSTNTLSTFEQVQPFGLIGHNGEINTIERLRREMDFLGIPRTGGSDSQDLNRMLEGLIYRYGLTLPEAMDLVFPPVLGEIKALPEDLQDLYMALRQRFGPLAQGPAAIVSRHGDEAVFATDAMGLRPLWQFETPYELVFSSERGVFSAEEFVSEPKPLAPGEKVYLRLTPEGAKVLPFDRHQRQVLERVAARTPVEGYRVHLTGPLRQAPPPLAGGSGVEVEEKPAPPPLGLERAFGWDRWDQAYLEALAKTGNEPIGSLGYDGPLAALNPEKPNLSEFFKETVAVVTNPAIDREREVEHFSTRTLLGRRPLPDGRGGGRVEELLLPIVLEEDQALAEAFGTLTLSEVRARFRTKTLVPQFTVEEGLLAGLKRLEEEAVKAVEEGAEVLILSDREAFQGGVWIDVGLAVAAVNRALMKRDAEGVALRRRTSLLVHSGGVRNLHDVAFLLGLGAEAVAPWLMEEKARALEGRKGLAGVLEALKKGLEKVISTMGIHELRGYGRIFSAIGLKPELAEYFGTRNFLGSEKAGYGFLELERTLLEREGFLRAEKVMPAKDFRFNPRIYKAAQEVASGKAPYAHFQEKVRALERENPVAARQLLEVRFPERSDVAPEEVDLSVGAHSLPFVISAMSFGSQGEASFRAYAEAAKRLNMLCINGEGGEIPDMLGKYTPWRGQQVASGRFGVHAYMLNSASVIEIKIGQGAKPGEGGHLPGKKVSPKVAAARNAVPGVDLISPSNNHDLYSIEDLAQLIEELKTVNPKALVSVKVPVIPGIGTIAVGIAKAGADVITLSGFEGGTGAARLHALKYAGLPVELGVRRVHRALVRAGLRDKVEIWADGGLKTAYDVLRMVLLGADRVGMATMAMVAIGCTICRGCQLDTCHVGITTQIETVEEAMAHGLKRFVPQDLDRAVEQLTRFFGAMGEALRELVAALGARSLQELRGRSDLLYQRDHLEELDLSYFFAPVEEPEWLKDTSAHVLRKPLNQLTRTITEVVMAAYAEGSKRLVFQEGPVDSTDRALGAHLAGEIARRRLYGKGFDAEVELRFDAGSVAGNGLAAFNVEGMKVVVEGGAQDGVAKSAFGGTVAVLKGKNPFGAYVDGSVGKSFAYGAIGGLLIVEGVADSRFCIRLSGADVILGGEPERPLRDDLGNLAARAQAKGFAFEYMTRGRALVLGDPGPWICSGMTGGRVYLRHWPEMGLTEEAMKRRLAKGAKVAVKPLDARGVEDVRELLSAYIRVLREAKREEKAKRLEKLLENPAEHFRMVEPVSQQVDQGVSTE

SEQ ID NO: 29837 - protein, 615 aa, Thermus thermophilus HB8
MAKAVGIDLGTTNSVIAVLEGGKPVVLENAEGERVTPSVVAFRDGETLVGRMAKRQAVLNPEGTIFEIKRFIGRRFEEVQEEAKRVPYKVVPGPDGGVRVEVKGKLYTPEEISAMILRKLVEDASKKLGEKITKAVITVPAYFNNAQREATANAGRIAGLEVLRIINEPTAAALAYGLDKKGNETVLVFDLGGGTFDVTILEIGEGVFEVKATSGDTHLGGSDMDHAIVNWLAEEFKKEHGVDLKADRQALQRLIEAAEKAKIELSSTLETTISLPFIALDPASKTPLHLEKKLTRAKFEELIQPLLKRLRGPVEQALKDAGLTPAQIDEVILVGGATRVPAVQQVVRELLGKEPNRSVNPDEVVAMGAAIQAGVLMGEVRDVVLLDVTPLSLGVETKGGVMTVLIPRNTTIPTRKCEIFTTAEHNQTAVEIHVLQGERPMAQDNKSLGRFRLEGIPPMPAGVPQIEVCFDIDANGILHVTAKERSTGREASITIQNTTTLSEEEIQRIIEEAKRHAEEDRRRREHAELKNALDSARVQAERVLQERQGAPEARARLEAAIGKAKELVERDAPDPELKAATEELLKAVEEYEKGAQAASGKGPDDVIDADYKPAD

SEQ ID NO: 29838 - protein, 291 aa, Thermus thermophilus HB8
MERVAVVGVPMDLGANRRGVDMGPSALRYARLLEQLEDLGYTVEDLGDVPVSLARASRRRGRGLAYLEEIRAAALVLKERLAALPEGVFPIVLGGDHSLSMGSVAGAARGRRVGVVWVDAHADFNTPETSPSGNVHGMPLAVLSGLGHPRLTEVFRAVDPKDVVLVGVRSLDPGEKRLLKEAGVRVYTMHEVDRLGVARIAEEVLKHLQGLPLHVSLDADVLDPTLAPGVGTPVPGGLTYREAHLLMEILAESGRVQSLDLVEVNPILDERNRTAEMLVGLALSLLGKRIF

SEQ ID NO: 29839 - protein, 207 aa, Thermus thermophilus HB8
MLQGLSLEARQEALKVFRPLRLRRGAVLFAPGDPVDGVYLVRQGLVGLHRPGPGLEEGVLDVVGPGGVFGEEALGGEARRRAGAEALTYAELYFAPREGLAALRARFAEVEAFFLQALYGRLCSLEERLWEARHLSVAQRLARLLLRMGEDGVAPFSHQDLARMVGASRETVTKLLGEWALKGWVDLGYRRVEVLEPKALARLAEEL

SEQ ID NO: 29840 - protein, 416 aa, Thermus thermophilus HB8
MFQDVLVITVAAGRGGDGAVSFRREKFVPKGGPDGGDGGRGGSVYLRARGSVDSLSRLSKRTYKAEDGEHGRGSQQHGRGGEDLVIEVPRGTRVFDADTGELLADLTEEGQTVLVARGGAGGRGNMHFVSPTRQAPRFAEAGEEGEKRRLRLELMLIADVGLVGYPNAGKSSLLAAMTRAHPKIAPYPFTTLSPNLGVVEVSEEERFTLADIPGIIEGASEGKGLGLEFLRHIARTRVLLYVLDAADEPLKTLETLRKEVGAYDPALLRRPSLVALNKVDLLEEEAVKALADALAREGLAVLPVSALTGAGLPALKEALHALVRSTPPPEMPKPVPRKEVQAGVEVVPVAEGVYEVRAPEVERYLARIKGDLMEAAGYLQEVFRRQGVEAALRAKGVRAGDLVRIGGLEFEYIPEV

SEQ ID NO: 29841 - protein, 250 aa, Thermus thermophilus HB8
MSQLEIRDLWASIDGETILKGVNLVVPKGEVHALMGPNGAGKSTLGKILAGDPEYTVERGEILLDGENILELSPDERARKGLFLAFQYPVEVPGVTIANFLRLALQAKLGREVGVAEFWTKVKKALELLDWDESYLSRYLNEGFSGGEKKRNEILQLLVLEPTYAVLDETDSGLDIDALKVVARGVNAMRGPNFGALVITHYQRILNYIQPDKVHVMMDGRVVATGGPELALELEAKGYEWLKEKVKEGA

SEQ ID NO: 29842 - protein, 511 aa, Cylindrotheca fusiformis
MAEFDNTFILEFCSGGNESSSDVQVLCQVASLANGTSASAGGLTEGINTFFLLFAGALVFIMQAGFAMLCAGSVRQKNVKNIMLKNMLDACGGAIGFWTIGYAFAYADNSSGNKTFIGGKNFFVNQLDESGGAWIGFFFQFAFAATAATIVAGTVAERCKMSAYLCYSIFLTGFVYPVVVHSIWSADGWLTAFRDDPWQGVGVIDFAGSGVVHMCGGATALVAAIVLGPRKGRFYDEDGNALETPASFPAHSVALQVLGTFLLWFGWYGFNPGSALVIDNAASASTSALCAVTTTLAAASGCVTAMFTDTLIEMMATGEASYDLTMAMNGALAGLVAITAGCSVVTPWASLIIGIIGGWVYLGLSKLLIKLKIDDAVDAVPVHFGNGMWGVLAVGFFAEPDAMVTAGYNDVPGVFYKGDGSLLLCQFVAIVWVCAWVFFLMTPFFVVLNILGMFRVDPLEEEVGLDISHHRGSAYDMTTAKKEDVEELMEHRSSKHGKVEIPKEVQKEDTA

SEQ ID NO: 29843 - protein, 126 aa, Populus tremula x Populus tremuloides
MGSLLSSSIKMSKQELDAALKKAKELASSAPVVVFSKTYCGYCNRVKQLLTQVGASYKVVELDELSDGSQLQSALAHWTGRGTVPNVFIGGKQIGGCDTVVEKHQRNELLPLLQDAAATAKTSAQL

SEQ ID NO: 29844 - protein, 640 aa, Piscirickettsia salmonis
MAEIIGIDLGTTNSCVAVLDGDKPRVIESAEGDRTTPSIVAYTNDGVTVGQPAKRQAVTNPNNTLFAVKRLIGRKFSDDTVQRDIERLPYTIAAADNGDAWIDVNGEKLAPPQISAQVLAKMKKTAEDYLGEDVKEAVITVPAYFNDAQRQATKDAGRIAGLDVKRIIDEPTAAALAYGMDKKRGDGVIAVYDLGGGTFDISIIEIAEVDGEHQFEVLATNGDTHLGGEDFDLRLISYLVDEFKKEQGIDLNNDPLALQRLKEASEKAKIELSSTQQTDVNLPYITADATGPKHMNIRVTRAKFESLVEDLVEGTIEPCRVALKDAGLSVNDVTDVILVGGQTRMPKAQAVVKNFFGKEPRRDVNPDEAVAVGAAIQGGVLAGDVKDVLLLDVTPLSLGIETMGGVMTKLIEKNTTIPTKASQTFSTAQDNQTAVTVHVLQGEREVATGNKSLGRFDLADIPPAPRGMPQVEVTFDIDANGILNVSAKDKGTGKEQSIVIRASSGLSDDEVDAMIKDAEDHADDDKKFQELVGARNNAEAMIHATEKGLKEAGDKVAADDKTAIEKAISELKDVVSGNDKAVIDEKVEALTQASAKMAEVLYANQGAEAEAAAAAGAEQAQSQTDEKKDDDVVDAEFEEV

SEQ ID NO: 29845 - protein, 407 aa, Sporothrix schenckii
MSFSSMLSRLHGQPDSYDKKSKYHFGRMLGAGTYGIVREADGPTGKVAIKVILKKNVKGNEQMVYDELNLLQNLKHSHIVRFVDWFESRDKYYIVTELATGGELFDRICEQGKFTEKDASQTIKQVLSAVDYLHKNNVVHRDLKPENLLYLTKQSDSDLVLADFGIAKMLDSKDEVLTTMAGSFGYAAPEVMLKKGHGKPVDMWSMGVITYTLLCGYSPFRSENLPDLIEECTSARVIFHERYWKDVSEDAKDFIIGLLQPNPDDRWSSGDALKHKWLSGESATEHNLLPEIKAYMAKARLRRGIELVKLTNRIEALKMQEDDPENSDMQTDTAAPLQKAAAAAAAQDDGASGSVGAESGPTDKTKQTIQKVKGAIFREVVMAKVREMRQQEEVRKEVEEASKQGSP

SEQ ID NO: 29846 - protein, 201 aa, Lilium longiflorum
ELSVLCDAEVALIIFSNHGRLSEFCSSSSMMKTLERYHKCSYNATEDIIPSKETENSYHEYLKLKTRVDYLQRSQRNLLGEDLGPLSTKELEQLENQLEISLKHIRSTKTQLMLDELSDLKGKEHMLQDANQLLRRKSWKNCSRDSGPSMPSDCQPARPERFFQPLACDSSLQIGFHPVGIDQLNNGVSPQNGDDYAPAWM

SEQ ID NO: 29847 - protein, 249 aa, Fragaria x ananassa
MAYENKPNTDLDADAQRRLGRGKIEIKRIENTTNRQVTFCKRRNGLLKKAYELSVLCDAEVALIVFSNRGRLYEYSNNSSVRETIERYKKACADTSTNGSASEATTQYYQQEAAKLHNQINALQNINRGYMAEGLSNKNIKELKGMERKLERAITRIRSKKNELLFAEIEYMQKRELDLHNNNQLLRAKIAENERQQQSIIAITGGHGSYEIVQPTQPFHEARNYFQVNALQPNIHQYSCHDQVSLQLV

SEQ ID NO: 29848 - protein, 679 aa, Candida tropicalis
MALDKLDLYVIITLVVAVAAYFAKNQFLDQPQDTGFLNTDSGSNSRDVLSTLKKNNKNTLLLFGSQTGTAEDYANKLSRELHSRFGLKTMVADFADYDWDNFGDITEDILVFFIVATYGEGEPTDNADEFHTWLTEEADTLSTLRYTVFGLGNSTYEFFNAIGRKFDRLLSEKGGDRFAEYAEGDDGTGTLDEDFMAWKDNVFDALKNDLNFEEKELKYEPNVKLTERDDLSAADSQVSLGEPNKKYINSEGIDLTKGPFDHTHPYLARITETRELFSSKERHCIHVEFDISESNLKYTTGDHLAIWPSNSDENIKQFAKCFGLEDKLDTVIELKALDSTYTIPFPTPITYGAVIRHHLEISGPVSRQFFLSIAGFAPDEETKKTFTRLGGDKQEFATKVTRRKFNIADALLYSSNNTPWSDVPFEFLIENIQHLTPRYYSISSSSLSEKQLINVTAVVEAEEEADGRPVTGVVTNLLKNIEIAQNKTGEKPLVHYDLSGPRGKFNKFKLPVHVRRSNFKLPKNSTTPVILIGPGTGVAPLRGFVRERVQQVKNGVNVGKTLLFYGCRNSNEDFLYKQEWAEYASVLGENFEMFNAFSRQDPSKKVYVQDKILENSQLVHELLTEGAIIYVCGDASRMARDVQTTISKIVAKSREISEDKAAELVKSWKVQNRYQEDVW

SEQ ID NO: 29849 - protein, 185 aa, Pharus virescens
EMRRIENKINRQVTFAMRRNGLLKKAYELSVLCDAEVALIIFSNRGKLYEFCSGQSMTKTLERYQKCSYGGPETAIQNKENELVQSSRNEYLKLKARVENLQRTQRNLLGEDLGSLGIKELEQLEKQLDSSLRHIRSTRTQQMLDQLTDLQRREQMLCEANKCLRRKLEESNQVHGQQVWEHGAN

SEQ ID NO: 29850 - protein, 235 aa, Streptochaeta angustifolia
EMRRIENKISRQVTFAERRNGLPKKAYELSLLCDAEVALIIFSSGRLFEFSSASCMYRTLERYRTCNYRSHEAAAPIETESNYQEYLKLKTRVEFLQTTQRNLPGEDLGPLNMKELEQLENQIESSLKNIRSTKNQTLLDQLFDLRHKQQQLQDLNKDLRRKLQEVGGHDNALQVWEDGGPSGSAGHEHLQGLLQPSEIDPSLQIGYHQAYLDQLNNGQIAQYPNGHLPSSAPWI

SEQ ID NO: 29851 - protein, 222 aa, Chasmanthium latifolium
ELRRIENKISRQETFAKRRNGLLKKAYELSVLCDAEVAHIIFSSRGRLYEFSTSSCIYKTLERYRSCSYASEASAPMEAELSNYQGYLKLKTRVEFLLTTQRNLLGEDLGPLSAKELEQFENQVEISLKHIRSTKSRQLLDQLFELKRKEQQLQDANKDLRRKIQDTSGENMLRMTCKDIGSSGSSSGHARDAKHQELPHSGVCDPSLRIGYQAYMDQLNNE

SEQ ID NO: 29852 - protein, 221 aa, Pennisetum glaucum
  misc_feature (12)..(12): Xaa can be any naturally occurring amino acid
  misc_feature (202)..(202): Xaa can be any naturally occurring amino acid
  unsure (1)..(221): unsure at all Xaa locations
EMRRLENKISRXVTSAKRRNGLLKKAYEVAVLCDAEVALIIFSSRGRLFEFSTSSCMYETLEQYRSCNFTSEASSAPIEAELSNYEEYLKLKTRIEFLQTTQRNLLGEDLGPLSTKELEQLENQIEISLKHIRSSKNQQMLDQLFELKRKEQQLQDSNKDLRKKIQETSEENVLRPTFQDLGACGSSGHPRDANQEYLRQLXCDPTLRIGYQSYIDHLSNE

SEQ ID NO: 29853 - protein, 180 aa, Oryza sativa Japonica Group
MSSANSLVLGRVIGDVVDLFSPEVTLRVMYNGVRVVNGEDLRPSAVSARPSVEVGGDLHQFYTIVMVDPDAPNPSNPTLREYLHWLVTDIPGTTDANYGREVVCYESPRPAAGIHRVAVVLFRQMARGGVDQPPLLRHNFSTRGFADDHALGAPVAAAFFTCKPEGGTGGRRFRPPSRHS

SEQ ID NO: 29854 - protein, 561 aa, Oryza sativa Japonica Group
MDADEAAGSSRRMDLNLYLGLPRAPRPRRSDLGSDLALSTPMPSSPSSSAASVDAPPPPPELSHPPYSPSHADLSPPLQEVYSLYNPDDPPASETHLPPYAPPPAPVVSELPDDLEFGLHPPPPLVRASELLGWEDRPSSSTASSSFLPDTAARYWRLLEQTGSRWLRARRFRSDLPPLSSEAYPAGRDAAAVPVLQHEPMNDTVEHNKVAADGAEVGASEESEEQGRSAATFECNICFDMASEPVVTSCGHLFCWPCLYQWLNVYSNHKECPVCKGEVTEANITPIYGRGNSCLDAEKAVEGGKQTGPTIPPRPHGNRLESFRQQFHHLRPISRRLGEAHGLLSSWRRLLDQQIMNTASRFEGPPESAVQEMVDTAHAQHTSRLSRLASRMRARRLLREADNPNPPDGGSTSPDSGLIRNNASDPSRNGPSSLLPDGIDWLRGLTLLGYEDTERFASAMSDFRRITGPSQYGASASSSNPPNLESTFDRTHVVAAPSADQASNSSTAAVIQGDAGISESAGEPSNAGSSRSLRRRGRSSALGSLDADGGGLQRNKRRRIN

SEQ ID NO: 29855 - protein, 356 aa, Populus tomentosa
MFHTKKPSTMNSHDRPMCVQGDSGLVLTTDPKPRLRWTVELHERFVDAVTQLGGPDKATPKTIMRVMGVKGLTLYHLKSHLQKFRLGKQPLKDFSDHSIKDASALDLQRSAASSSGMMSRSMNEMQMEVQRRLHEQLEVQRHLQLRTEAQGKYIQSLLEKACQTLAGDQNLASGSYKGLGNQGIPGMGAMKEFGSLNFPAFQDLNIYGGDQLDLQHNMDRPSLDGFMANNDNICLGKKRPSPYDGSGKSPLIWPDDLRLQDLGSGPACLEPQDDPFKGDQIQMAPPSMDRGTDLDSISDMYEMKPALQGDGLDEKKFEASAKLKRPSPRRSPLAAERMSPMINTGAMPQGRNSPFG

SEQ ID NO: 29856 - protein, 648 aa, Xanthium sp.
MAAIPHTNPSITTKPPSSPPRPTFLARFTFPITSTSHKRHRLHISNVLSDSKPTITHSPLPTESFISRYAPDQPRKGADVLVEALEREGVTDVFAYPGGASMEIHQALTRSTTIRNVLPRHEQGGVFAAEGYARASGLPGVCIATSGPGATNLVSGLADALLDSVPMVAITGQVPRRMIGTDAFQETPIVEVTRSITKHNYLVLDVEDIPRIVREAFYLASSGRPGPVLIDVPKDIQQQLVVPKWDEPIRLPGYLSRLPKTENNGQLEHIVRLVSEAKRPVLYVGGGCLNSGDELRRFVELTGIPVASTLMGLGAYPASSDLSLHMLGMHGTVYANYAVDKSDLLLAFGVRFDDRVTGKLEAFASRAKIVHIDIDSAEIGKNKQPHVSICGDIKVALQGLNKILEVKNSVTNLDFSNWRKELDEQKVKYPLSFKTFGEAIPPQYAIQVLDELTGGNAIISTGVGQHQMWAAQFYKYNKPRQWLTSGGLGAMGFGLPAAIGAAVARPDAVVVDIDGDGSFIMSVQELATIRVENLPVKILLLNNQHLGMVVQLEDRFYKANRAHTYLGNPSKESEIFPNMLKFAEACDIPAARVTRKADLRAAIQKMLDTPGPYLLDVIVPHQEHVLPMIPAGGGFMDVITEGDGRMKY

SEQ ID NO: 29857 - protein, 648 aa, Xanthium sp.
MAAIPHTNPSITTKPPSSPPRPTFLARFTFPITSTSHKRHRLHISNVLSDSKPTITHSPLPTKSFISRYAPDQPRKGADVLVEALEREGVTDVFAYPGGASMEIHQALTRSTTIRNVLPRHEQGGVFAAEGYARASGLPGVCIATSGPGATNLVSGLADALLDSVPMVAITGQVPRRMIGTDAFQETPIVEVTRSITKHNYLVLDVEDIPRIVREAFYLASSGRPGPVLIDVPKDIQQQLVVPKWDEPIRLPGYLSRFPKTENNGQLEQIVRLVSEAKRPVLYVGGGCLNSGDELRRFVELTGIPVASTLMGLGAYPASSDLSLHMLGMHGTVYANYAVDKSDLLLAFGVRFDDRVTGKLEAFASRAKIVHIDIDSAEIGKNKQPHVSICGDIKVALQGLNKILEVKNSVTNLDFSNWRKELDEQKVKYPLSFKTFGEAIPPQYAIQVLDELTGGNAIISTGVGQHQMWAAQFYKYNKPRQWLTSGGLGAMGFGLPAAIGAAVARPDAVVVDIDGDGSFIMNVQELATIRVENLPVKILLLNNQHLGMVVQWEDRFYKANRAHTYLGNPSKESEIFPNMLKFAEACDIPAARVTRKADLRAAIQKMLDTPGPYLLDVIVPHQEHVLPMIPAGGGFMDVITEGDGRMKY

SEQ ID NO: 29858 - protein, 299 aa, Geobacillus kaustophilus HTA426
MKLAKEIAEVMGIELGKCSVSRFSDGEIQINIEESIRGDDVFVIQSTSVPVNEHLMELLIMIDALKRASARTINIVMPYYGYARQDRKARSREPITAKLVANLLETAGASRVITLDLHAPQIQGFFDIPIDHLMGVPILADYFKSKQLEDIVVVSPDHGGVTRARKLADRLKAPIAIIDKRRPKPNVAEVMNIVGQVAGKTAILIDDIIDTAGTITLAANALAENGAKEVYACCTHPVLSGPAIERIQNSRIKELVVTNSIALPEEKKIDKIVELSVAPLIAEAISRVYEMKSVSVLFD

SEQ ID NO: 29859 - protein, 214 aa, Gossypium hirsutum
MRLCGRCYKSTNQLNKGRSETIQKTSRVTKNVEKTQRTRKNFYRGIRQRPWGKWAAEIRDPQKGVRVWLGTHNTAEEAARAYDEAAKRIRGDKAKLNFPQTPTKNQAASPALIQLPPAKKRCIVPELTQPSFQTDSPPYPMGLGSGRSEDYKPIEVVESELELKEQIWSLESFLGLEPDETTTELSGSAEPDSVDLWMLDDLVTHHQQQPQLFY

SEQ ID NO: 29860 - protein, 666 aa, Thellungiella halophila
  misc_feature (492)..(492): Xaa can be any naturally occurring amino acid
  unsure (1)..(666): unsure at all Xaa locations
MGSTPFCYSINPSPSKLDFTRTHVFSPVAKQFYLDLSSCAGKSGGGLSGFRSRRALVGVRAATALVEEEKREIAKEKKKPRVLVAGGGIGGLVFALAAKKKGFDVLVFEKDLSAIRGEGQYRGPIQIQSNALAALEAIDIDVAEEVMEAGCITGDRINGLVDGVSGTWYVKFDTFTPAASRGLPVTRVISRMTLQQILARAVGEEVIRNESNVVDFEDSGDKVTVVLENGERYEGDLLVGADGIWSKVRNNLFGRSEATYSGYTCYTGIADFVPADIESVGYRVFLGHKQYFVSSDVGGGKMQWYAFHEEPAGGVDAPNGMKKRLFDIFEGWCDNVLDLLHATEEEAILRRDIYDRTPSFNWGKGRVTLLGDSIHAMQPNMGQGGCMAIEDSYQLALELEEAWERSVETNAPVDVVSSLRRYEESRRLRVAIIHGMARMAAIMASTYKAYLGVGLGPLSFLTKFRVPHPGRVGGRFFIDIAMPLMLNWVLGXNSEKLEGRPPSCRLTDKADDRLREWFEDDDALERTINGEWYLIPYGNECSVSETLCLTKDEDQPCIIGSEPDQDFPGMHIVIPAPQVSKMHARVTYKDGAFFLMDLRSEHGTYVTDNEGRRYRVTPNFPARFRSSDIIEFGSDKKAAFRVKVIRTTPKSTSKNKESNGKLLQAV

SEQ ID NO: 29861 - protein, 372 aa, Pisum sativum
MQHPSSNPNSGSIPNPHNANTASKFPPPPPPSTAATTAACKASMLPRSGGNGGSLHRRAHSEVSFRLPDDMMDLSPSDPFTGGSSTASLDEIGSEDDLFSTYIDMDKLGGSNDMGDAGADPGRNDEAEKNQGRSRHRHSSSVDGSSSFGEIMDGKKAMPPDKLAELWSIDPKRAKRILANRQSAARSKERKARYIHELERKVQTLQTEATTLSAQLTLYQRDTTGLSNENTELKLRLQAMEQQAHLRDALNDALKKEVERLKVATGDIRSHTESFNLGMHQMPFTESNYLPISPQSGHPGHRNTQLPLFGHSPILAWQLINWQPNKILIHFQNYAKWIQIGRFQGLDISSKGTTIVKSEDPSLSASESSTTF

SEQ ID NO: 29862 - protein, 218 aa, Pisum sativum
MGRGGATTAAAAVEPVFFKEPRYRGVRKRPWGRFAAEIRDPLKKARVWLGTFDTAEEAARAYDTAARNLRGPKAKTNFPLAQPFYQNPEAGNPFGELRFYAGGAGEGFQDHRRPTSSGMSSTVESFGGPRPVRPPMPPSAVTGRRYPRTPPVAPGDCRSDCDSSSSVVDDADNDNAASSTMLSFKRQPLPFDLNAPPLEEGDVANGLGEDLHCTLLCL

SEQ ID NO: 29863 - protein, 504 aa, Escherichia coli
MKNEKRKTGIEPKVFFPPLIIVGILCWLTVRDLDAANVVINAVFSYVTNVWGWAFEWYMVVMLFGWFWLVFGPYAKKRLGNEPPEFSTASWIFMMFASCTSAAVLFWGSIEIYYYISTPPFGLEPNSTGAKELGLAYSLFHWGPLPWATYSFLSVAFAYFFFVRKMEVIRPSSTLVPLVGEKHAKGLFGTIVDNFYLVALIFAMGTSLGLATPLVTECMQWLFGIPHTLQLDAIIITCWIILNAICVACGLQKGVRIASDVRSYLSFLMLGWVFIVSGASFIMNYFTDSVGMLLMYLPRMLFYTDPIAKGGFPQGWTVFYWAWWVIYAIQMSIFLARISRGRTVRELCFGMVMGLTASTWILWTVLGSNTLLLIDKNIINIPNLIEQYGVARAIIETWAALPLSTATMWGFFILCFIATVTLVNACSYTLAMSTCREVRDGEEPPLLVRIGWSILVGIIGIVLLALGGLKPIQTAIIAGGCPLFFVNIMVTLSFIKDAKQNWKD

SEQ ID NO: 29864 - protein, 102 aa, Anaplasma marginale str. St. Maries
MSMFAVVEAGGKQYKVKESYVIKVELMDVSVGEKVKLDSLATFGGKKKDAVLQRQSSAVTAEVVARCRNDKIIVFKKRRRKNYRRKIGHRQELVVLRVLKVG

SEQ ID NO: 29865 - protein, 632 aa, Geobacillus kaustophilus HTA426
MKPQASEEIRTMVKPKPILKWAGGKQQMLDVLLPQVPKQYNRYIEPFFGGGALFFALTPKDAIIADSNPELINLYRVVADNVEELISILKEMKNDESFYYEVRGLDPDLLSPVERAARTIYLNRTCYNGLYRVNRKGQFNVPYGKYKNPKICDEENLRAASNALQDVLIVEGDYKDVLREHARPGDFIFLDPPYLPVGKYSDFKRYTKEQFYEEDHIELAQEVDRLHELGCYVILTNSNHPLVHELYGKYAISVHKTRRNINSDASKRTGEDVMVKVEPKQRIFIVPEPVKLPSQMDKYPPTRFMGSKQNLLEHIWSVASHFQFDSVLDLFSGSGVVSYMFKTQGKQVFSNDYMAFSHYFTKAMVENSFVTLTDQDIELLFDKSTPRDNFVSETFKDLYFNDEDNEFIDTIRANLDRLKNEYKRAIAISALVRACLKKRPRGIFTYTGYRYDDGRRDLTLTLQQQFLEAVTQVNGAVFDNGKMSKSRYGDAMDCRQKADLVYIDPPYYSPLSDNDYVRRYHFVEGIARNWKGVEMQWHTKTKKFKSYPTPFSSIKGAHDAFDLLFKRHQNSILIVSYSSNSLPTKDEMLALMAKYKKRIEVVSIDHRYSFGNQGHKVGDNNNQVQEYLFVGF

SEQ ID NO: 29866 - protein, 133 aa, Pennisetum glaucum
MEHQGQHGHATNQANEYGTPVTAGVGAAGEQQVQPMRDDHKTDGLLRRSGSSSSSSSEDDGMGGRRKKGIKEKIKEKLPGGNKDGNQQHTTTGDAIGQQEHAGAAGAGAPGVESTGEKKGLMDKIKEKLPGQH

SEQ ID NO: 29867 - protein, 923 aa, Sesbania rostrata
MMELPDIWILRLAVACALCLYIFLRSASASEEFESIACCADSNYTDPLTTLNYTTDYSWFSDKRSCRQIPEAGLNNRSNENVRLFDIDEGKRCYNLPTIKNKVYLIRGTFPFDSTNSSFYVSIGITQLGAVRSSRLQGLEVEGVFRATKDYIDFCLVKGEVNPFISQLELRPLPEEYLHDLPTSVLKLISRNNLGGSKDDIRFPADRSDRIWKATSSPSSAFPLSFNVSNVDLQANVTPPLQVLQTAITHPERLEFIHNGLETEDYGYRVFLYFLEINRTLKAGQRVFDIYVNNEIKKEKFDVLDGGSNYGYTVLNVSANGSLNVTLVKASESEFGPLLNAYEILQVRSWVEETNQTDVEVIQKMREELLLQNQENKALESWTGDPCILFPWKGIACDGSNGSTVITKLDLSLSNLKGPIPSSVTEMTNLKILNLSHNSFDGYIPSFPLSSLLISIDLSYNGLRGTLPESITSPLHLKSLYFGCNQHMSEEDPANLNSSLINTDYGRCKSKEHKFGQGIVIGAITCGSLLVTLAVGILFVCRYRQKLLPWEGFGGKNYPMATNVIFSLPSKDDFFIKSVSIQTFTLEYIEVATERYKTLIGEGGFGSVYRGTLNDGQEVAVKVRSATSTQGTREFDNELNLLSAIQHENLVPLLGYCNENDQQILVYPFMSNGSLQDRLYGEPAKRKVLDWPTRLSIALGAARGLAYLHTFPGRPVIHRDVKSSNILLDHSMCAKVADFGFSKYAPQEGDSNVSLEVRGTAGYLDPEYYKTQQLSEKSDVFSFGVVLLEIVSGREPLNIQRPRNEWSLVEWAKPYIRASKVEEIVDPGIKGGYHAEAMWRVVEVALQCLEPFSAYRPCMVDIVRELEDALIIENNASEYMKSIDSLGGSNRYSIVIEKRVLPSTTSTAESTITAQSLSHPQPR

SEQ ID NO: 29868 - protein, 505 aa, Salmonella enterica subsp. enterica serovar Paratyphi A str.
MKNEKKKSGIEPKVFFPPLIIVGILCWLTVRDLDAANVVINAVFSYVTNVWGWAFEWYMIVMLFGWFWLVFGPYAKKRLGDEKPEFSTASWIFMMFASCTSAAVLFWGSIEIYYYISTPPFGLEPNSTGAKEIGLAYSLFHWGPLPWATYSFLSVAFAYFFFVRKMDVIRPSSTLVPLVGEKHAKGLFGTIVDNFYLVALIFAMGTSLGLATPLVTECMQWLFGIPHTLQLDAIIITCWIILNAICVACGLQKGVRIASDMRSYLSFLMLGWVFIVSGASFIMNYFTDSVGMLLMHLPRMLFYTDAIGKGGFPQGWTVFYWAWWVIYAIQMSIFLARISRGRTVRELCFGMVMGLTASTWILWTVLGSNTLLLMDKNILNIPQLIEQHGVARAIIETWAALPLSTATMWGFFILCFIATVTLINACSYTLAMSTCREVRDGEEPPLLVRIGWSVLVGIIGIVLLALGGLKPIQTAIIAGGCPLFFVNIMVTLSFIKDAKVHWKDK

SEQ ID NO: 29869 - protein, 574 aa, Salmonella enterica subsp. enterica serovar Paratyphi A str.
MEMLSGAEMVVRSLIDQGVKQVFGYPGGAVLDIYDALHTVGGIDHVLVRHEQAAVHMADGLARATGDVGVVLVASGPGATNAITGIATAYMDSIPLVILSGQVATSLIGYDAFQECDMVGISRPVVKHSFLVKQTEDIPQVLKKAFWLAASGRPGPVVVDLPKDILNPAKKMPYAWPETVSMRSYNPTTSGHKGQIKRALQTLASAKKPVVYVGGGAISAACYAPLRHIIETFNLPVVSSLMGLGAFPATHRQSLGMLGMHGTYEANMTMHNADVIFAVGVRFDDRTTNNLAKYCPNATVLHIDIDPTSISKTVNADIPVVGDARLVLEQMLELLAQDAPSQPQDDIRDWWQQIEIWRARQCLKYDAESESIKPQAVIETLWRLTKGDAYVTSDVGQHQMFAALYYPFDKPRRWINSGGLGTMGFGLPAALGVKMALPKEMVVCVTGDGSIQMNIQELSTALQYELPVLVLNLNNRYLGMVKQWQDMIYSGRHSQSYMQSLPDFVRLAEAYGHVGLQINRPDELESKLSEALEHVRNNRLVFVDVTVDGSEHVYPMQIRGGGMDEMWLSKTERT

SEQ ID NO: 29870 - protein, 713 aa, Salmonella enterica subsp. enterica serovar Paratyphi A str.
MNIIAIMGPHGVYYKDEPIKELERALQSLGFQIIWPQNSVDLLKFIEHNPRICGVIFDWDEYSLDLCSEINQLNEHLPLYAFINTNSTLDVSVHDMRMALWFFEYALGLAEDIATRIHQYTNEYLDNITPPFTKALFTYAKEGKYTFCTPGHMAGTAYQKSPPGCLFYDFFGGNTLKADVSISVTELGSLLDHTGPHLEAEEYIARTFGAEQSYMVTNGTSTSNKIVGMYAAPAGSTLLIDRNCHKSLAHLLMMSDVVPLWLKPTRNALGILGGIPRREFTRASIESKIEETPQAQWPVHAVITNSTYDGLLYNTNWIKQMLDVPSIHFDSAWVPYTHFHPIYQGKSGMSGDRVPGKVIFETQSTHKMLAAFSQASLIHIKGEYDEETFNEAFMMHTSTSPSYPIVASIETAAAMLRGNPGKRLINRSVERALHFRKEVQRLREESDSWFFDIWQPEEVDEAECWPVTPGETWHGFTDADDDHMFLDPVKVTILTLGMDEQGNMSEEGIPAALVAKFLDERGVVVEKTGPYNLLFLFSIGIDKTRAMGLLRGLTEFKRAYDLNLRVKNMLPDLYAEDPDFYRNMRIQDLAQGIHKLIRQHDLPGLMSRAFEVLPEMIMTPHQAWQRQIKGEVETVALDQLPGRVSANMILPYPPGVPLLMPGERITQQSRAVLDFLLMLCSIGQHYPGFETDIHGAKRNEDGVYQVRVLKHAC

SEQ ID NO: 29871 - protein, 301 aa, Salmonella enterica subsp. enterica serovar Paratyphi A str.
MSTDKTYCGFIAIVGRPNVGKSTLLNKLLGQKISITSRKAQTTRHRIVGIHTEGPYQAIYVDTPGLHMEEKRAINRLMNKAASSSIGDVELVIFVVEGTRWTPDDEMVLNKLRDGKAPVILAVNKVDNVQEKADLLPHLQFLASQMNFLDIVPISAETGMNVDTIAGIVRKHLPEAIHHFPEDYITDRSQRFMASEIIREKLMRFLGAELPYSVTVEIERFVTNERGGYDINGLILVEREGQKKMVIGNKGAKIKTIGIEARKDMQEMFEAPVHLELWVKVKSGWADDERALRSLGYVDDL

SEQ ID NO: 29872 - protein, 396 aa, Salmonella enterica subsp. enterica serovar Paratyphi A str.
MLDAQTIATVKATIPLLVETGPKLTAHFYDRMFTHNPELKEIFNMSNQRNGDQREALFNAIAAYASNIENLPALLPAVEKIAQKHTSFQIKPEQYNIVGTHLLATLDEMFNPGQEVLDAWGKAYGVLANVFIHREAEIYHENASKDGGWEGTRPFRIVAKTPRSALITSFEFEPVDGGTVAEYRPGQYLGVWLKPEGFAHQEIRQYSLTRKPDGKGYRIAVKREDGGQVSNWLHHHASVGDVVHLAAPAGDFFMNVAADTPVSLISAGVGQTPMLAMLDTLAKEQHTAQVNWFHAAENGDVHAFADEVSELGRTLPRFTAHTWYREPTEADRAQRVFDSEGLMDLSQLEAAISDPAMQFYLCGPVGFMQFAAKQLVSLGVNNENIHYECFGPHKVL

SEQ ID NO: 29873 - protein, 759 aa, Salmonella enterica subsp. enterica serovar Paratyphi A str.
MDEQLKQSALDFHEFPVPGKIQVSPTKPLATQHDLALAYSPGVAAPCLEIEKDPLAAYKYTARGNLVAVISNGTAVLGLGNIGALAGKPVMEGKGVLFKKFAGIDVFDIEVDELDPDKFINVVAALEPTFGGINLEDIKAPECFYIEQKLRERMNIPVFHDDQHGTAIISTAAILNGLRVVEKNISDVRMVVSGAGAAAIACMNLLVALGMQKHNIVVCDSKGVIYKGREPNMAETKAAYAVDDSGKRTLDEVIDGADIFLGCSGPKVLTQEMVKKMARAPMILALANPEPEILPPLAKEVRPDAIICTGRSDYPNQVNNVLCFPFIFRGALDVGATAINEEMKLAAVRAIAELAHAEQSEVVASAYGDQDLSFGPEYIIPKPFDPRLIVKIAPAVAKAAMDSGVATRPIADFDAYIDKLTEFVYKTNLFMKPIFSQARKDPKRVVLPEGEEARVLHATQELITLGLAKPILIGRPSVIEMRIQKLGLQIKAGVDFEIVNNESDPRFKEYWSEYYQIMKRRGVTQEQAQRAMIGNHTAIGAIMVQRGEADAMICGTIGDYHEHFSVVKAVFGYRDGVHTAGAMNALLLPSGNTFIADTYVNEDPTPEQLAEIAVMAAETVRRFGIEPKVALLSHSNFGSSNSLSASKMRETLERVRERAPDLMIDGEMHGDAALVESIRNDRMPDSPLKGAANILVMPNMEAARISYNLLRVSSSEGVTVGPVLMGVSKPVHVLTPIASVRRIVNMVALAVVEAQTTPL

SEQ ID NO: 29874 - protein, 338 aa, Salmonella enterica subsp. enterica serovar Paratyphi A str.
MIIERARELAVRAPARVVFPDALDERVLKAAHYLQQYGLARPVLVASPFALRQFALSHRMAMDGIQVIDPHSNLSMRQRFAQRWLARAGEKTPPDAVEKLSDPLMFAAAMVSAGEADVCIAGNLSSTANVLRAGLRVIGLQPGCKTLSSIFLMLPQYAGPALGFADCSVVPQPTAAQLADIAIASADTWRAITGEEPRVAMLSFSSNGSARHPNVANVQQATELARERAPQLLVDGELQFDAAFVPEVAAQKAPDSPLQGRANVMIFPSLEAGNIGYKIAQRLGGYRAVGPLIQGLAAPLHDLSRGCSVQEIIELALVAAVPRQADVSRERSLHTLVE

SEQ ID NO: 29875 - protein, 550 aa, Salmonella enterica subsp. enterica serovar Paratyphi A str.
MQNPYTVADYLLDRLAGCGIGHLFGVPGDYNLQFLDHVIDHPTLRWVGCANELNAAYAADGYARMSGAGALLTTFGVGELSAINGIAGSYAEYVPVLHIVGAPCSAAQQRGELMHHTLGDGDFRHFYRMSQAISAASAILDEQNACFEIDRVLGEMLAARRPGYIMLPADVAKKTAIPPTQALTLPVHEAQSGVETAFRYHARQCLMNSRRIALLADFLAGRFGLRPLLQRWMAETPIAHATLLMEKGLFDEQHPNFVGTYSAGASSKEVRQAIEDADRVICVGTRFVDTLTAGFTQQLPAERTLEIQPYASRIGETWFNLPMAQAVSTLRELCLECAFAPPPTRSAGQPVRIDKGELTQESFWQTLQQYLKPGDIVLVDQGTAAFGAAALSLPDGAEVVVQPLWGSIGYSLPAAFGAQTACPDRRVILIIGDGAAQLTIQEMGSMLRDGQAPVILLLNNGGYTVERAIHGAAQRYNDIASWNWTQIPPALNAAQQVECWRVAQAIQLAEVLERLARPQRLSFIEVMLPKADLPELLRTVTRALEARNGG

SEQ ID NO: 29876 - protein, 400 aa, Salmonella enterica subsp. enterica serovar Paratyphi A str.
MSSKLVLVLNCGSSSLKFAIIDAVNGDEYLSGLAECFHLPEARIKWKMDGSKQEAALGAGAAHSEALNFIVNTILAQKPELSAQLTAIGHRIVHGGEKYTSSVVIDESVIQGIKDSASFAPLHNPAHLIGIAEALKSFPQLKDKNVAVFDTAFHQTMPEESYLYALPYSLYTEHGVRRYGAHGTSHFYVTQEAAKMLNKPVEELNIITCHLGNGGSVSAIRNGKCVDTSMGLTPLEGLVMGTRSGDIDPAIIFHLHDTLGMSVDQINKMLTKESGLLGLTEVTSDCRYVEDNYATKEDAKRAMDVYCHRLAKYIGSYTALMDGRLDAVVFTGGIGENAAMVRELSLGKLGVLGFEVDHERNLAARFGKSGFINKEGTRPAVVIPTNEELVIAQDASRLTA

SEQ ID NO: 29877 - protein, 397 aa, Salmonella enterica subsp. enterica serovar Paratyphi A str.
MTHVTSAIIVGGGIGGAATALSLARQGIKVMLLEKAHEIGEIGAGIQLGPNAFSALDSLGVGDVARQRAVFTDHITMMDAVNAEEVVCIETGQAFRDHFGGPYAVIHRVDIHATVWGAVLTHPGVEYRTSTHIVDIRQTPDDVTVFDEQGNSWTADILVGCDGVKSVVRQSLLGDAPRVTGHVVYRAVIDCDDMPDDLRINAPVLWAGPHCHLVHYPLRGGQQYNLVVTFHSRQQEEWGVKDGSKEEVLSYFAGIHPRPRQMLDKPTSWRRWSTADREPVAKWGTERITLVGDAAHPVAQYMAQGACMALEDAVTLGKALERCDGDAQQAFALYESVRIPRTARIVWSTREMGRLYHAAGVERQVRNLLWKGKSQEAFYRGIEWLYGWKEDNCLEPR

SEQ ID NO: 29878 - protein, 576 aa, Salmonella enterica subsp. enterica serovar Paratyphi A str.
MSSITMTDNKTFLNELARLVGHSHLLTDPAKTARYRKGFRSGQGDALAVVFPGSLLELWRVLNACVNADKIILMQAANTGLTEGSTPNGNDYDRDIVIISTQRLDKLHLLDNGQQVLAWPGTTLYALEKALKPLGREPHSVIGSSCIGASVIGGICNNSGGSLVQRGPAYTEMSLFARIDEQGKLQLVNHLGIDLGHTPEQILSKLDDERIKDEDVRHDGRHAHDHDYVTRVRDINADTPARYNADPDRLFESSGCAGKLAVFAVRLDTFAAEKNQQVFYIGTNQPAVLTEIRRHILVNFDNLPVAGEYMHRDIYDIAEQYGKDTFLMIDKLGTDKMPFFFTLKGRTDAMLEKVKFFRPHFTDRAMQKFGHLFPSHMPQRMKNWRDKYEHHLLLKMAGDGVAEAQRWLNEFFKSAEGGFFTCTPEEGSKAFLHRFAAAGAAIRYQAVHADEVEDILALDIALRRNDTDWFEHLPPEINSQLVHKLYYGHFMCHVFHQDYIVKKGVDVHALKAQMLELLQARGAQYPAEHNVGHLYKAPETLTRFYRQNDPTNSMNPGIGKTSKRKFWQENTPDETH

SEQ ID NO: 29879 - protein, 404 aa, Salmonella enterica subsp. enterica serovar Paratyphi A str.
MSYKIMAINAGSSSLKFQLLEMPQGDMLCQGLIERIGMADAQVTIKTHNQKWQETVPVADHRDAVTLLLEKLLGYQIINSLRDIDGVGHRVAHGGEFFKDSTLVTDETLAQIERLAELAPLHNPVNALGIHVFRQLLPDAPSVAVFDTAFHQTLDEPAYIYPLPWHYYAELGIRRYGFHGTSHKYVSGVLAEKLGVPLSALRVICCHLGNGSSVCAIKNGRSVNTSMGFTPQSGVMMGTRSGDIDPSILPWIAQRESKTPQQLNQLLNNESGLLGVSGVSSDYRDVEQAANTGNRQAKLALTLFAERIRATIGSYIMQMGGLDALVFTGGIGENSARARSAVCHNLQFLGLAVDEEKNQRNATFIQTENALVKVAVINTNEELMIAQDVMRIALPATEGLCVPA

SEQ ID NO: 29880 - protein, 192 aa, Salmonella enterica subsp. enterica serovar Paratyphi A str.
MDTSRLTLDHFLSRFQLLRPQITHETLNQRQAAVLIPVVRRPQPGLLLTQRAIHLRKHAGQVAFPGGAVDSTDASLIAAALREAQEEVAIPPQAVEVIGVLPPVDSVTGFQVTPVVGIIPPNLPWRASEDEVSAVFEMPLAQALQLGRYHPLDVYRRGNSHRVWLSWYEHYFVWGMTANILRELALQIGVKP

SEQ ID NO: 29881 - protein, 315 aa, Salmonella enterica subsp. enterica serovar Paratyphi A str.
MPDMKLFAGNATPELAQRIANRLYTSLGDAAVGRFSDGEVSVQINENVRGGDIFIIQSTCAPTNDNLMELVVMVDALRRASAGRITAVIPYFGYARQDRRVRSARVPITAKVVADFLSSVGVDRVLTVDLHAEQIQGFFDVPVDNVFGSPILLEDMLQLNLDNPIVVSPDIGGVVRARAIAKLLNDTDMAIIDKRRPRANVSQVMHIIGDVTGRDCVLVDDMIDTGGTLCKAAEALKERGAKRVFAYATHPIFSGNAANNLRNSVIDEVVVCDTIPLTDEIKALPNVRTLTLSGMLAEAIRRISNEESISAMFEH

SEQ ID NO: 29882 - protein, 337 aa, Salmonella enterica subsp. enterica serovar Paratyphi A str.
MRNHKQSDRVLNLPAGYFGIVLGTIGMGFAWRYASQIWAISHWPGDIMVILAMIIWALLTLAFLSRLARFPHSVMAEVRHPVMSSFVSLFPATTMLVAIGFVPWYRPLAVALFSVGVVIQLAYAAWQTAGLWRGAHPEEATTPGLYLPTVANNFISAMACGALGYNDAGLVFLGAGVFSWLSLEPVILQRLRSCGELPAVLRTSLGIQLAPALVACSAWLSVNGGEGDTLAKMLFGYGLLQLLFMLRLMPWYLSQPFNASFWSFSFGVSALATTGLHLGHGSESGLFHILAVPLFIFTNAIIALLLVRTFLLLVQGTLLIRTERAALLKTEEKNDRS

SEQ ID NO: 29883 - protein, 509 aa, Salmonella enterica subsp. enterica serovar Paratyphi A str.
MRIGIPKERLPNETRVAATPKTVEQLLKLGFSVAIESGAGQLASFDDKAFAQAGADIVDGNAIWQSEIILKVNAPEEDEIALLNPGTTLVSFIWPAQNPGLMEKLAERKVTVMAMDSVPRISRAQSLDALSSMANIAGYRAIVEAAHEFGRFFTGQITAAGKVPPAKVMVIGAGVAGLAAIGAANSLGAIVRAFDTRPEVKEQVQSMGAEFLELDFKEEAGSGDGYAKVMSEAFIKAEMALFAAQAKEVDIIVTTALIPGKPAPKLITRDMVDSMKAGSVIVDLAAQNGGNCEYTVANQVVTTDNGVKVIGYTDLPGRLPTQSSQLYGTNLVNLLKLLCKEKDGNIDVDFDDVVIRGVTVIRDGDITWPAPPIQVSAQPQAAPKAAPAPKEPEKPASPWRKYALMALAIILFGWLADVAPKEFLGHFTVFALACVVGYYVVWNVSHALHTPLMSVTNAISGIIVVGALLQIGQGGWVSFLSFIAVLIASINIFGGFTVTQRMLKMFRKN

SEQ ID NO: 29884 - protein, 447 aa, Salmonella enterica subsp. enterica serovar Paratyphi A str.
MKKVKKLSLTDLVLYGLVFMVPIAPVSLYGVVYNLSHGMVALVYIIGAIAMFFTAYSYSTLSQHISSSGSAYAYAGVCINPAVGFLTGWILLLDYLLFPTLVAVLGGVAVHAILPQIPVWVWPLIYVAIGTGVNYLGIQQTAKFDKLLVFIQLGILAIFVLLIVRLMMQDSSQITLSFRPFFDSQWFTPGLIATAISVAALNFLGFDAISTLSEESEGGGRAVSKATLLALVLATVLFIIVVAFAAFATGNVDRFAEGNATNEAFFTIAGNVGGIWLKVAFSIIVAFVCAVGNIITAQTAVSRVLFSMGRDRMLPAFLAHVHTTRKTPNYAILFTGGVTLLLSYLFSGKIESISTLVNFGALFAFFVVNLCVFILFNFRMKAQRRIFAHVISPIMGMIVIGYVCLNMNIHALILGISWAAIGIAILCYRKAHNQNIAIDLEGKKLLD

SEQ ID NO: 29885 - protein, 70 aa, Salmonella enterica subsp. enterica serovar Paratyphi A str.
MSRKMTGIVKTFDCKSGKGLITPSDGRKDVQFHISACRLHETEALIPGIRVEFCRINGLRGPTAANVYLS

SEQ ID NO: 29886 - protein, 582 aa, Salmonella enterica subsp. enterica serovar Paratyphi A str.
MHNDKDLSTWQTFRRLWPTIAPFKAGLIVAGIALILNAASDTFMLSLLKPLLDDGFGKTDRSVLLWMPLVVIGLMILRGITSYISSYCISWVSGKVVMTMRRRLFGHMMGMPVAFFDKQSTGTLLSRITYDSEQVASSSSGALITVVREGASIIGLFIMMFYYSWQLSIILVVLAPIVSIAIRVVSKRFRSISKNMQNTMGQVTTSAEQMLKGHKEVLIFGGQEVETKRFDKVSNKMRLQGMKMVSASSISDPIIQLIASLALAFVLYAASFPSVMDSLTAGTITVVFSSMIALMRPLKSLTNVNAQFQRGMAACQTLFAILDSEQEKDEGKRVIDRATGDLEFRNVTFTYPGREVPALRNINLKIPAGKTVALVGRSGSGKSTIASLITRFYDIDEGHILMDGHDLREYTLASLRNQVALVSQNVHLFNDTVANNIAYARTEEYSREQIEEAARMAYAMDFINKMDNGLDTIIGENGVLLSGGQRQRIAIARALLRDSPILILDEATSALDTESERAIQAALDELQKNRTSLMIAHRLSTIEQADEIVVVEDGIIVERGTHSELLAQHGVYAQLHKMQFGQ

SEQ ID NO: 29887 - protein, 285 aa, Salmonella enterica subsp. enterica serovar Paratyphi A str.
MKADNPFDLLLPAAMAKVAEEAGVYKATKHPLKTFYLAITAGVFISIAFVFYITATTGTGAMPYGMAKLIGGICFSLGLILCVICGADLFTSTVLIVVAKASGRITWGQLAKNWLNVYFGNLIGALLFVLLMWLSGEYMTANGQWGLNVLQTADHKMHHTFIEAVCLGILANLMVCLAVWMSYSGRSLMDKAFIMVLPVAMFVTSGFEHSIANMFMIPMGIVIRDFATPEFWTAVGSSPESFSHLTVMSFITDNLIPVTIGNIIGGGLLVGLTYWVIYLRGNEHH

SEQ ID NO: 29888 - protein, 453 aa, Salmonella enterica subsp. enterica serovar Paratyphi A str.
MSFDSLGLNPDILRAIAEQGYREPTPIQQQAIPAVLEGRDLMASAQTGTGKTAGFTLPLLQHLITHQPHAKGRRPVRALILTPTRELAAQIGENVRDYSKYLNIRSLVVFGGVSINPQMMKLRGGVDVLVATPGRLLDLEHQNAVKLDQIEILVLDEADRMLDMGFIHDIRRVLAKLPAKRQNLLFSATFSDDIKALAEKLLRNPLEIEVARRNTASEQVTQHVHFVDKKRKRELLSQMIGQGNWQQVLVFTRTKHGANHLAEQLNKDGIRSAAIHGNKSQGARTRALADFKSGDIRVLVATDIAARGLDIEELPHVVNYELPNVPEDYVHRIGRTGRAAATGEALSLVCVDEHKLLRDIEKLLKKEIPRITTPGYEPDPSIKAEPIQNGRQQRGGGGRGRGQNQGGAGRSQQPRRQDSGAAKAKPKPRTGEGKPAGDKARPPRRPRRITPAQ

SEQ ID NO: 29889 - protein, 362 aa, Salmonella enterica subsp. enterica serovar Paratyphi A str.
MNHTEIRVVTGPANYFSHAGSLERLTDFFTPEQLSHAVWVYGERAIAAARPYLPEAFERAGAKHLPFTGHCSERHVAQLAHACNDDRQVVIGVVGGALLDTAKALARRLALPFVAIPTIAATCAAWTPLSVWYNDAGQALQFEIFDDANFLVLVEPRIILQAPDDYLLAGIGDTLAKWYEAVVLAPQPETLPLTVRLGINSACAIRDLLLTSSEQALADKQQRRLTQAFCDVVDAIIAGGGMVGGLGERYTRVAAAHAVHNGLTVLPQTEKFLHGTKVAYGILVQSALPGQDDVLAQLITAYRRFHLPARLSELDVDIHNTVEIDRVIAHTLRPVESIHYLPVTLTPDTLRAAFEKVEFFRI

SEQ ID NO: 29890 - protein, 292 aa, Salmonella enterica subsp. enterica serovar Paratyphi A str.
MKLGFIGLGIMGSPMAINLARAGHQLHVTTIGPVADELLSLGAVNVETARQVTEFADIIFIMVPDTPQVEEVLFGEHGCAKTSLQGKTIVDMSSISPIETKRFAQRVNEMGADYLDAPVSGGEIGAREGTLSIMVGGEQKVFDRVKPLFDILGKNITLVGGNGDGQTCKVANQIIVALNIEAVSEALVFASKAGSDPVRVRQALMGGFASSRILEVHGERMINRTFEPGFKIALHQKDLNLALQSAKALALNLPNTATCQELFNTCAANGGSQLDHSAMVQALELMANHKLS

SEQ ID NO: 29891 - protein, 456 aa, Salmonella enterica subsp. enterica serovar Paratyphi A str.
MESNNKLKRGLSTRHIRFMALGSAIGTGLFYGSADAIKMAGPSVLLAYIIGGVAAYIIMRALGEMSVHNPAASSFSRYAQENLGPLAGYITGWTYCFEILIVAIADVTAFGIYMGVWFPAVPHWIWVLSVVLIICAINLMSVKVFGELEFWFSFFKVATIIIMIVAGIGIIVWGIGNGGQPTGIHNLWSNGGFFSNGWLGMIMSLQMVMFAYGGIEIIGITAGEAKDPEKSIPRAINSVPMRILVFYVGTLFVIMSIYPWNQVGTNGSPFVLTFQHMGITFAASILNFVVLTASLSAINSDVFGVGRMLHGMAEQGSAPKIFAKTSRRGIPWVTVLVMTIALLFAVYLNYIMPENVFLVIASLATFATVWVWIMILLSQIAFRRRLPPEEVKALKFKVPGGVVTTIAGLIFLVFIIALIGYHPDTRISLYVGFAWIVLLLIGWIFKRRRDRQLAQA

SEQ ID NO: 29892 - protein, 270 aa, Salmonella enterica subsp. enterica serovar Paratyphi A str.
MAVKTPLKWVGSKARLMPKLRQHLPEGKRLVEPFAGSCAVMMNTDYDEYLIADVNPDLVNLYKAMAYHTDALLNELESLFTAGSLGDEESRAVFYYAVRDAFNLSGKSFGSESVEAAARFLYLNRHCFNGLCRYNRRGQFNVPFGKYKKPYFPADEICAFAEKAKRATFITADYSETLDLVRDGNDVVYCDPPYLTDSDNFTAYHERGFSHMDQGRLARKLRRLAERGVQVVASNSDLEIVHYLYAGFEALKVNAPLLVRQLQARKWRQN

SEQ ID NO: 29893 - protein, 392 aa, Salmonella enterica subsp. enterica serovar Paratyphi A str.
MKEVVIVGALRTPIGCFQGTLARHSAVELGSMVVKALIERTGVDANAIDEVILGQVLTAGAGQNPARQSAIKGGLPTTVSAITINDVCGSGLKALHLATQAIQCGEADIVIAGGQENMSRAPHVLNDSRSGALPDADNLVDSLVHDGLWDAFNDYHIGVMAENLAREYGISRELQDAYALSSQQKARAAIDTGRFKDEIVPIVTQRNGQTAIVDTDEQPRADASAEGLALLHPAFDSLGSVTAGNASSINDGAAAVMMMSEAKAQALGLPVLARIRAFASVGVDPALMGIAPVYATRRCLERAGWQLTEVDLIEANEAFAAQALSVGKMLEWDERRVNVNGGAIALGHPIGASGCRILVSLVHEMVKRDARKGLATLCIGGGQGVALTIERD

SEQ ID NO: 29894 - protein, 402 aa, Salmonella enterica subsp. enterica serovar Paratyphi A str.
MNEFPVVLVINCGSSSIKFSVLDVATCDVLMAGIADGMNTENAFLSINGDKPINLAHSNYEDALKAIAFELEKRDLTDSVALIGHRIAHGGELFTQSVIITDEIIDNIRRVSPLAPLHNYANLSGIDAARHLFPAVCQVAVFDTSFHQTLAPEAYLYGLPWEYFSSLGVRRYGFHGTSHRYVSQRAYELLDLDEKNSGLIVAHLGNGASICAVRNGQSVDTSMGMTPLEGLMMGTRSGDVDFGSMAWIAKETGQTLSDLERVVNKESGLLGISGLSSDLRVLEKAWHEGHERARLAIKTFVHRIARHIAGHAASLHRLDGIIFTGGIGENSVLIRQLVIEHLGVLGLTLDVEMNKQPNSHGERIISANPSQVICAVIPTNEEKMIALDAIHLGNVKAPVEFA

SEQ ID NO: 29895 - protein, 103 aa, Salmonella enterica subsp. enterica serovar Paratyphi A str.
MYAVFQSGGKQHRVSEGQTVRLEKLDIATGETIEFAEVLMIANGEEVKIGIPFVDGGVIKAEVVAHGRGEKVKIVKFRRRKHYRKQQGHRQWFTDVKITGISA

SEQ ID NO: 29896 - protein, 1486 aa, Salmonella enterica subsp. enterica serovar Paratyphi A str.
MLYDKSLEKDNCGFGLIAHIEGEPSHKVVRTAIHALARMQHRGAILADGKTGDGCGLLLQKPDRFFRIVAEERGWRLAKNYAVGMIFLNKDPELAAASRHIVEEELQQETLSIVGWRDVPTNEGVLGEIALSSLPRIEQIFVNAPAGWRPRDMERRLFIARRRIEKRLQDDKDFYICSLSNLVNIYKGLCMPADLPRFYLDLADLRLESAICLFHQRFSTNTVPRWPLAQPFRYLAHNGEINTITGNRQWARARTYKFQTPLIPDLQSAAPFVNETGSDSSSLDNMLELLLAGGMDIIRAMRLLVPPAWQNNPDMDQDLRAFFDFNSMHMEPWDGPAGIVMSDGRFAACNLDRNGLRPARYVITKDKLITCASEVGIWDYQPDEVVEKGRVGPGELMVIDTRGGRILHSAETDDDLKSRHPYKAWMEKNVRRLVPFEELPDEEVGSRELDDDLLASYQKQFNYSAEELDSVIRVLGENGQEAVGSMGDDTPFAVLSSQPRIIYDYFRQQFAQVTNPPIDPLREAHVMSLATSIGREMNVFCEAEGQAHRLSFKSPILLYSDFKQLTTMSEHHYRADWLDITFDVTETTLDATVKALCDKAEQMVRNGTVLLVLSDRNIDKNRLPVPAPMAVGAVQTRLVDQSLRCDANIIVETGSARDPHHFAVLLGFGATAIYPYLAYETLGRLIDTQAIAKNYRTVMQNYRNGINKGLYKIMSKMGISTIASYRCSKLFEAVGLHDDVINLCFQGVVSRIGGASFDDFQQDLLNLSKRAWLARKPISPGGLLKYVHGGEYHAYNPDVVRTLQQAVQSGEYSDYQEYAKLVNERPAATLRDLLAIHPDGEAVTIDEVEPASELFKRFDTAAMSIGALSPEAHEALAEAMNSLGGNSNSGEGGEDPARYGTNKVSRIKQVASGRFGVTPAYLVNADVIQIKVAQGAKPGEGGQLPGDKVTPYIAKLRYSVPGVTLISPPPHHDIYSIEDLAQLIFDLKQVNPKAMISVKLVSEPGVGTIATGVAKAYADLITIAGYDGGTGASPLSSVKYAGCPWELGLVETQQALVANGLRHKIRLQVDGGLKTGVDIIKAAILGAESFGFGTGPMVALGCKYLRICHLNNCATGVATQDEKLRKNHYHGLPFKVTNYFEFIAREVRELMASLGVTRLVDLIGRTDLLKELEGFTAKQQKLALSRLLETAEPHPGKALYCTENNPPFDNGVLNAQLLQQAKPFVDARQSKTFWFDIRNTDRSVGASLSGYIAQTHGDQGLASDPIKAHFSGTAGQSFGVWNAGGVELYLTGDANDYVGKGMAGGLIAIRPPVGSAFLSHKASIIGNTCLYGATGGRLYAAGRAGERFGVRNSGAITVVEGIGDNGCEYMTGGIVCVLGKTGVNFGAGMTGGFAYVLDEDGEFRKRVNPELVEVLDVDSLAIHEEHLRGLITEHMQHTGSQRGEEILSRWSSFSTQFALVKPKSSDVKALLGHRSRSAAELRVQAQ

SEQ ID NO: 29897 - protein, 269 aa, Salmonella enterica subsp. enterica serovar Paratyphi A str.
MFTDTINKCAANAARIARLSANNPLGFWVSSAMAGAYVGLGIILIFTLGNLLDPSVRPLVMGATFGIALTLVIIAGSELFTGHTMSLTLGVKAGTISHGQMWAILPQTWLGNLVGSVFVALLYSWGGGSLLPVDTSIVHSVALAKTTAPATVLFFKGALCNWLVCLAIWMAIRTEGTAKFLAIWWCLLAFIASGYEHSVANMTLFALSWFGHHSDAYTLSGIGHNLLWVTLGNTLSGVVFMGLGYWYATPKSERPVPQKTNQIKVTANH

SEQ ID NO: 29898 - protein, 278 aa, Salmonella enterica subsp. enterica serovar Paratyphi A str.
MKKNRAFLKWAGGKYPLLDDIKRHLPKGECLVEPFVGAGSVFLNTDFSRYILADINSDLISLYNIVKLRTDEYVQASRELFMPETNQAEVYYQLREEFNTCQDPFRRAVLFLYLNRYGYNGLCRYNLRGEFNVPFGRYKRPYFPEAELYHFAEKAQNAFFYCESYADSMARADKSSVVYCDPPYAPLSATANFTAYHTNSFSLTQQAHLAEIAENLVSNRIPVLISNHDTALTREWYQLAKLHVVKVRRSISSNGGTRKKVDELLALYRPGVATPARK

SEQ ID NO: 29899 - protein, 421 aa, Salmonella enterica subsp. enterica serovar Paratyphi A str.
MKPMHIAMALFSAAMFFVLAGVFMGVQLELDGTKLVVDTAADIRWQWIFIGTAVVFFFQLLRPMFQKAVKHVSGPKFILPAIDGSTVKQKLFLMALLVIAVAWPFMVSRGSVDIATMTMIYIILGLGLNVVVGLSGLLVLGYGGFYAIGAYTFALLNHYYGLGFWTCLPLAGLVSAAAGFLLGFPVLRLRGDYLAIVTLGFGEIVRILLLNNTEITGGPNGISQIPKPTLFGLEFSRNTREGGWDTFSNFFGVKYDPSDRVIFLYLVALLLVVLSLFVINRLLRMPLGRAWEALREDEIACRSLGLSPTRIKLTAFTISAAFAGFAGTLFAARQGFVSPESFTFAESAFVLAIVVLGGMGSQFAVILAAVLLVVSRDFNEYSMLMLGGLMVLMMIWRPQGLLPMTRPQLKLKSGQAKGEQA

SEQ ID NO: 29900 - protein, 324 aa, Salmonella enterica subsp. enterica serovar Paratyphi A str.
MKPSIILYKTLPDDLLHRLEAHFTVTQVPNLHPETVARHAQAFASAQGLLGASETVNRALLEKMPALRAASTISVGYDNVEVDALTARKIVLMHTPAVLTETVADTVMALMLATARRVVDVAERVKAGEWTESIGPAWFGVDVHHKTLGIVGMGRIGMALAQRAHFGFTMPVLYHARRRHQEAEDRFNARYCDLDTLLQEADFVCVILPLTTETRHLFGTTQFARMKSSAIFINAGRGPVVDENALIAALQNGEIYAAGLDVFEHEPLSVDSPLLNMSNVVAVPHIGSATHETRYNMMACAVDNLIDALQGKIEKNCVNPQAAG

SEQ ID NO: 29901 - protein, 401 aa, Salmonella enterica subsp. enterica serovar Paratyphi A str.
MFELDTLSTLVAATLVLLLGRKLVQSVSLLKKYTIPEPVAGGLLVAVALLVLKKSVGWEVNFDMTLRDPLMLAFFATIGLNANLASLRKGGRVVGVFLVVVVGLLLMQNAIGIGMASLLGLDPLMGLIAGSITLSGGHGTGAAWSKLFVERYGFANATEVAMACATFGLVLGGLIGGPVARYLVKHSTTPDGMPDDQAVPTAFEKPDVGRMITSLVLIETIALIAICLTVGKIVAQLLAGTVLELPVFVCVLFVGVILSNGLALVGFYRVFERAVSVLGNVSLSLFLAMALMSLKLWELASLALPMLAILVVQTIFMALYAIFVTWRMMGKNYDAAVLAAGHCGFGLGATPTAIANMQAITDRFGPSHMAFLVVPMVGAFFIDIVNALVIKLYLMLPIFAQ

SEQ ID NO: 29902 - protein, 548 aa, Salmonella enterica subsp. enterica serovar Paratyphi A str.
MDSQRNLLVIALLFVSFMIWQAWEQDKNPQPQTQQTTQTTTTAAGSAADQGVPASGQGKMITVKTDVLDLTINTRGGDVEQALLPAYPKELGSNEPFQLLETTPQFIYQAQSGLTGRDGPDNPANGPRPLYNVEKDAFVLADGQNELQVPMTYTDAAGNTFTKTFVFKRGDYAVNVNYSVQNTGEKPLEVSTFGQLKQSVNLPPHRDTGSSNFALHTFRGAAYSTPDEKYEKYKFDTIADNENLNVSSKGGWVAMLQQYFATAWIPRNDGTNNFYTANLGNGIVAIGYKAQPVLVQPGQTGAMTSTLWVGPEIQDKMAAVAPHLDLTVDYGWLWFISQPLFKLLKWIHSFVGNWGFSIIIITFIVRGIMYPLTKAQYTSMAKMRMLQPKIQAMRERLGDDKQRQSQEMMALYKAEKVNPLGGCFPLIIQMPIFLALYYMLMGSIELRHAPFALWIHDLSAQDPYYILPILMGVTMFFIQKMSPTTVTDPMQQKIMTFMPVIFTVFFLWFPSGLVLYYIVSNLVTIIQQQLIYRGLEKRGLHSREKKKS

SEQ ID NO: 29903 - protein, 330 aa, Salmonella enterica subsp. enterica serovar Paratyphi A str.
MKTAYIAKQRQISFVKSHFSRQLEERLGLIEVQAPILSRVGDGTQDNLSGCEKAVQVKVKALPDAQFEVVHSLAKWKRQTLGQHDFSAGEGLYTHMKALRPDEDRLSPLHSVYVDQWDWERVMGDGERQFSTLKSTVEAIWAGIKATEAEVHKQFGLAPFLPDQIHFVHSQELLARFPDLDAKGRERAIAKELGAVFLVGIGGKLSDGHRHDVRAPDYDDWSSASELGYAGLNGDILVWNPVLEDAFELSSMGIRVDADTLMRQLALTGDEDRLQLEWHQALLRGEMPQTIGGGIGQSRLTMLLLQLPHIGQVQCGVWPAQVRESIPAIL

SEQ ID NO: 29904 - protein, 548 aa, Salmonella enterica subsp. enterica serovar Paratyphi A str.
MNGAQWVVHALRAQGVKTVFGYPGGAIMPVYDALYDGGVEHLLCRHEQGAAMAAIGYARSTGKTGVCIATSGPGATNLITGLADALLDSVPVVAITGQVSAPFIGTDAFQEVDVLGLSLACTKHSFLVQSLAELPRIMAEAFEVANAGRPGPVLVDIPKDIQLASGELEPWFTTVDNEATFPQADVEQARQMLEQAKKPMLYVGGGVGMAKAVPALRKFIEVTQMPVTCTLKGLGAVEADYPYYLGMLGMHGTKAANFAVQECDLLIAVGARFDDRVTGKLNTFAPNASVIHMDIDPAEMNKLRQAHVALQGDLNSLLPALQQPLKIDAWRQSCAELRAEHAWRYDHPGETIYAPLLLKQLSERKPADSVVTTDVGQHQMWSAQHMTYTRPENFITSSGLGTMGFGLPAAVGAQVARPNDTVICISGDGSFMMNVQELGTVKRKQLPLKIVLLDNQRLGMVRQWQQLFFQERYSETTLTDNPDFLMLASTFGIPGQHITRKDQVEAALDTMLASEGPYLLHVSIDELENVWPLVPPGASNSEMLEKLS

SEQ ID NO: 29905 - protein, 298 aa, Salmonella enterica subsp. enterica serovar Paratyphi A str.
MAVIAFIGLGQMGSPMASNLLKQGHQLSVFDVNPDAVQRLVDKGAQPASSPAQATIGAEFVITMLPNGDLVRSVLFGEQGVCETLSREALVIDMSTIHPLQTDKLIADMQSKGFSMMDVPVGRTSDNAITGTLLLLAGGTTEQVERATPVLMAMGNELVNTGGPGMGIRVKLINNYMSIALNALSAEAAVLCEALGLSFDVALKVMSGTAAGKGHFTTTWPNKVMKGDLSPAFMIDLAHKDLGIALDVANQLHVPMPLGAASREVYNLARAAGRGREDWSAILEQVRISAGLTANVKK

SEQ ID NO: 29906 - protein, 810 aa, Salmonella enterica subsp. enterica serovar Paratyphi A str.
MSVIAQAGAKGRQLHKFGGSSLADVKCYLRVAGIMAEYSQPDDMMVVSAAGSTTNQLISWLKLSQTDRLSAHQVLQTLRRYQCDLISGLLPADAADDLTSAFISDLERLAALLDGGVTDAVYAEIVGHGEIWSARLMSAVLNQQGLDAAWLDARAFLRAERAAQPQVDEGLSYPLLQQLLAQHPGKRLVVTGFISRNHDGETVLLGRNGSDYSATQIGALAGVSRVTIWSDVAGVYSADPRKVKDACLLPLLRLDEASELARLAAPVLHARTLQPVSGSDIDLQLRCSYTPDQGSTRIERVLASGTGARIVTSHDDICLIEFQVPASQDFRLAHKELDQILKRAQARPLAVGVHRDRQLLQFCYTAEVADSVLKLLDDVGLPGELRLRQGLALVAMVGAGVTRNPLHCHRFWQQLKGQPVEFTWQSEEGISLVAVLRTGPTESLIQGLHQSVFRAEKRIGLMLFGKGNIGSRWLELFAREQSTLSARTGFEFVLAGVVDSRRSLLNYEGLDASRALAFFDDEAVEQDEESLFLWMRTHPYDDLVVLDVTASEQLADQYLDFASHGFHVISANKLAGASASDKYRQIHDAFEKAGRYWLYNATVGAGLPINHTVRDLIDSGDTILSISGIFSGTLSWLFLQFDGTVPFTDLVDQAWQQGLTEPDPRVDLSGKDVMRKLVILAREAGYDIEPDQVRVESLVPAHCEEGSIDHFFENGDALNEQMVQRLEAARELELVLRYVARFDANGKARVGVEAVRPEHPLAALLPCDNVFAIESRWYRDNPLVIRGPGAGRDVTAGAIQSDINRLAQLL

SEQ ID NO: 29907 - protein, 367 aa, Salmonella enterica subsp. enterica serovar Paratyphi A str.
MDRIIQSPGKYIQGANVIARLGDYLKPMANNWLVVGDKFVLGFAEETLRKSLTGAGLSVEIAPFGGECSQNEIDRLRAVAEKSQCGAVLGIGGGKTLDTAKALAHFMNVPVAIAPTIASTDAPCSALSVIYTDAGEFDRYLLLPHNPNMVIVDTQIVAGAPARLLAAGIGDALATWFEARACSRSGATTMAGGKCTQAALALAELCYNTLIEEGEKAMLAAEQHVVTPALERVIEANTYLSGVGFESGGLAAAHAIHNGLTAIPDAHHYYHGEKVAFGTLTQLVLENAPVEEIETVAALCHSVGLPITLAQLDIKQDIPAKMRTVAEASCAEGETIHNIPGGATPDEVYAALLVADQYGQRFLQEWE

SEQ ID NO: 29908 - protein, 441 aa, Salmonella enterica subsp. enterica serovar Paratyphi A str.
MIRGKIDILVVDDDVSHCTILQALLRGWGYNVALAYSGHDALAQVREKVFDLVLCDVRMAEMDGIATLKEIKALNPAIPILIMTAFSSVETAVEALKAGALDYLIKPLDFDRLQETLEKALAHTRETGAELPSASAAQFGMIGSSPAMQHLLNEIAMVAPSDATVLIHGDSGTGKELVARALHACSARSDKPLVTLNGAALNESLLESELFGHEKGAFTGADKRREGRFVEADGGTLFLDEISDISPLMQVRLLRAIQEREVQRVGSNQTISVDVRLIAATHRDLAEEVSAGRFRQDLYYRLNVVAIEMPSLRQRREDIPLLADHFLRRFAERNRKAVKGFTPQAMDLLIHYDWPGNIRELENAIERAVVLLTGEYISERELPLAIAATPIKTEYSGEIQPLVDVEKEVILAALEKTGGNKTEAARQLGITRKTLLAKLSR

SEQ ID NO: 29909 - protein, 449 aa, Salmonella enterica subsp. enterica serovar Paratyphi A str.
MTEIVVSKFGGTSVADFDAMNRSADIVLSDANVRLVVLSASAGITNLLVALAEGMEPGERFATLDAIRKIQFDILDRLRHPNVIREEIERLLENITILAEAASLATSAALTDELVSHGELMSTLLFVEILRERDVQAHWFDVRKVMRTSDRFGRAEPDVAALAELAAQQLLPRLSETLVITQGFIGSESKGRTTTLGRGGSDYTAALLAEALHAARVDIWTDVPGIYTTDPRVVPVAQRIDEIDFEEAAEMATFGAKVLHPATLLPAVRSDIPVFVGSSKDPQAGGTLVCNKTQNPPLFRALALRRNQTLLTLHSLNMLHSRGFLAEVFGILARHNISVDLITTSEVSVALTLDTTGSTSTGDTLLTQSLLMGLSALCRVEVEEGLALVALIGNNLSKACGVGKEVFGVLEPFNIRMICYGASSHNLCFLVPGDDAEKVVQKLHQNLFE

SEQ ID NO: 29910 - protein, 750 aa, Anaplasma marginale str. St. Maries
MGDFSERDREALEFHCKRRPGKVSLLPTKPLMTQGDLSLAYSPGVAVPCLRIASDPDTVYDYTARGNYVAVISNGTAVLGLGNIGPLASKPVMEGKAVLFKRFADIDAVDIEVDTEDVEEFINAVKHLGLSWGGINLEDIRAPECFIIERRLGELMDIPVFHDDQHGTAIITLAGIINALDITGRNLKSVKIVVNGAGAAGIACVEMLKFVGIPNDNIVLCDQNGVIYKGRQLGMNEWKLKHAIETKERDLKDAMKGADIFIGLSVRDVLSKEMLLSMNKDPVIFALANPYPEVNPEFAREVRPDAIIATGRSDYSNQINNVMGFPYIFRGALDVRAKSVNNEMKLAAAEALAMLAREVVSDEVLEAYGGRGMGYGKEYIIPTPFDPRLLSVVSPAVAKAAINSGVARKKIDDWDRYALELNSRISPTSNILNLMYGSVKSSPKRVIFPEGEEVRVIKAALQWYGQGYGTPILVGRVDKIKESLDLIGVDSLEGITIANAAISSRNDVYIDYLYSKLQRMGRLHRSCVRDVKTDRNVFAACMLACGDGDTLVTGITRGYSESLSDIRKVIDARGEVFGLSVVVMEERTLFIADTAINELPTAQQLADIAIKSAAAARSMGHEPRVAFVSFANFGSHSQKESDRVRQCMDIVASRNVDFEYDGEMSVDVALKPESLSMYPFCRLSKPANVLIMPSLYSASISSKLLREVGGTTVVGPILMGMEKPVQIVQMTASVSEILNLAVLATLSHPI

SEQ ID NO: 29911 - protein, 110 aa, Anaplasma marginale str. St. Maries
MSSDPVADRIRNEIETSDVVLYMKGTADAPQCGFSGVVVEALRNVGVQFRDVDVLKDPELREGIKKFADWPTIPQLYVKGEFIGGCDIVREMYHSGELHALLKSKGIIAG

SEQ ID NO: 29912 - protein, 582 aa, Anaplasma marginale str. St. Maries
MALESNRCAMKALLSYIRPHFLYFLLSYLAVITSSGAILALGHSMNALVDAVGATSDSRPLTVIFFLIATMSTSSFLRVWLSGRGAELVVRDLRKQIYDKIVVLSQSVLENTSTSVLMSRLTTDMAMLQAILSGSMLVIFRNTTVLIGSATMLAHTNIKLTGYIVCMLPILWAIVALLGRRVRHFSRLLRGRVEQLAHFGEETCRGIGVIQAFTAEDHARAKFANLLDENFRIAGKYLLWRALLVTLILSAAAGSVGVVLCMGIKEVSVQSMSAGSLLSFVFYAVLAAGAVNGIGDNIQDLQKAARIAEDVLQLLCIDVGMSDAEDCVDINTVKGAVEMHNVTFFYPSKTDTPALRNVSLTMHSGERVAIVGYSGAGKSTITDLLLRFYDVSSGSITIDGVDIRKISLRSLRSLFCVVPQSPVIFSGTILDNIAYGADRTYTNRQLEEAAERASIADFIHTLPNKFDTFVGEKGICLSEGQKQRIVIARAILRNPEVLILDEATSALDSDNESKVQAALCELMQGKLMITIAHRLSTVANSDKIVVLDDGAIKEVGTHDSLIQDENSLYARLVKLQLLQYRG

SEQ ID NO: 29913 - protein, 348 aa, Anaplasma marginale str. St. Maries
MSFVDEAKIHVKGGKGGDGCVSFRREKFIEFGGPDGGNGGNGGSVIFIASSAVNTLLYFRYNQHIRAENGKAGSGKGKFGAAGRNRVVEVPVGTQLYDEDGNTLIADLNNIGQQYTVAAGGRGGIGNAQYKSSTNRAPTYFTYGTLGEEHCVLLKLKIVSDVGIIGMPNAGKSSLLSRCTASKTKVSDYPFTTLEPHLGVAYANGCELVLADIPGLIENASSGAGLGHKFLKHIERCVILLHLVDCSLPDIVSAYELVRQELKLHSQELAGKQEVVILNKCDLLSEGEVREKQKLLESSTKKEVITLSMGDELDSLIVFLHAQVKKAVVTEPSDTSFDPFLYVHYNKK

SEQ ID NO: 29914 - protein, 408 aa, Anaplasma marginale str. St. Maries
MTGSKGVQPPVFFDYQATTRVDDRVLEVMFPYFRQFSNPHSRSHSFGWRAESAVEVAREQIAESIGADPKEVIFTSGATESNNLAIKGLARFYKNKGNHIITLKTEHKCVLDSCRHLETEGFEVTYLDVRGDGILEVDKLEAAIRDDTILVSVMTVNNEIGVIQPIGEIGKICRNKGVFFHTDAAQALGKVAIDVNSMNVDLLSISGHKIYGPMGVGALYVRRRNPRVRLVPLLSGGGQERGMRSGTVPTPLVVGLGEAAKIAVQEMETENERIRGLRDVLYNKIKGELPNVVLNGSYSQRIPGNLNLSFSYVEGESVIMAINDLAVSSGSACTSASLEPSYVLRALNVEQDLEHSSIRFGIGRFTTLAEVEYAADLVIRSVRKLREMSPLWEMVQEGTDLKTINWDA

SEQ ID NO: 29915 - protein, 520 aa, Anaplasma marginale str. St. Maries
MLMTTRLRYAVMFMVGLLNQGQPGGAFQPKRASSIADKQSLSEGYLERVITSLKNKGLVKSTRGPGGGYSLGMPPEHITLDLLLDSVGDKVRMVRCGNEREGCLPFPGVRCNSHNLWDGIEKYVMHYLKNTSILDVFNNNLRVVNSDDGYIYADYNATAAVSAQVRHKLGNELLFGGFYNPSSVHRLGQKTRGVIEDARRTVVNKLDAAGYDVVFTSSGTEANNLVFRSSAGYVHIISAIEHPSVMNAATDPMVIPVNGSGVVSLDALDGILSSLGGKKALVSVMLANNEVGTIQPVQEVVKLARKYGAVVHTDIVQACGKIPVSVLGLGADFVTISSHKIGGIPGAGALLFNGKNVQVEPMIFGGLQERGLRAGTENVVAICSLSIALEDIQACVGRMSAVRQMRDLLEKKIGELVPECVIFGRDVDRLPNTTCVSMPGVSKELQVMGFDSHKVAIGVGSACSSGKPGASHVLSALGVSDECAQSAVRISLGPGVTEAQVCKIADCWYGIYNGFRMTVN

SEQ ID NO: 29916 - protein, 219 aa, Anaplasma marginale str. St. Maries
MKIFLDTVDTESMSVLCKTGIVDGVTTNPLLLSRAEKPSRELLAEICKLVAGPVSVEVIATDADGMVNEGLQLAQIAENVVVKLPMTFDGICACKTLSSVHKVKVNVTLCFSVTQAILAAKAGAYFVSPFMGRIDDLGGSGASLIEDISCVYSQYGFATQILAASVRSPMHVVEAAKAGADIVTVPVAVFKQLFLHPLTDRGLEDFLKAWGNSGKSYLA

SEQ ID NO: 29917 - protein, 297 aa, Anaplasma marginale str. St. Maries
MMGRDSEKCSLVAVVGATNAGKSTLINELVGFKASIVTPKVHTTRVRMNAVRNDGNVQLVFTDTPGVFAPKTVLEKFLVKNAWMSIRGADVVVLVLEARNYLCSQVARVVATVKHSHIPAVAVLNKTDLLQECRIRGILAHVQSMHEFTGVFAISALHGLGTEALLTHLRESADYCPWLYPGTQRTDATVEFFVAEITREKLFLALRQELPYSLSVVTEKFEDRGRSVIIKQVVYVIKESQKTIVVGKNAALIKGVSTAAREEIERILGKKAHLFLFVKVRKFWQDHLDECVGYTQC

SEQ ID NO: 29918 - protein, 645 aa, Anaplasma marginale str. St. Maries
MGVIMAAERIIGIDLGTTNSCVAVMEAGTAKVIENSEGSRTTPSVVAFTENERLVGELAKRQANINAQNTIYASKRIIGRRYDDMRDVKCPYEVFPAKNGDAWIRARGEGYSPVQIGAFVLEKIKETAERYFGAPVKKAVITVPAYFNDAQRQATKDAGTIAGLDVVRIINEPTAAALAYGLDKGDKQRTIVVYDLGGGTFDVSVLEIAEGVFEVKATNGDTKLGGEDFDNAVMEHMMESFKQETGIDLHNDPMAVQRIKEAAEKAKIELSSRLETDITLPFISSDSTGAKHLSLKLTRAKFEGLVSELIERTIEPCKKALDDAGIKDTSKIDEVVLVGGMTRMPKVIQRVKDFFGGKEPCKGVNPDEVVAIGAAIQGGILTGDVRDVLLLDVAPLSLGIETLGGVFTPLIERNTTIPTKKSQVFSTAEDGQTAVTIKVYQGERKMAVDNKLLGQFSLEGIPSAPRGIPQIEVTFDIDANGIVHVSAKDKASGKEQTIKIQSSGGLSEEEIKKMVQDAQDRAEEDEKRKKRVELKNSAEALIHSTEKSLNDYGDKISSADKSGIEAAIKELRECLSNDDSSSDVIQQKYDALMQLSMKLGEAAYSAQKDSGTSTDSTASDTSGNPEERVVDSEYQEIKKDDEDKK

SEQ ID NO: 29919 - protein, 328 aa, Anaplasma marginale str. St. Maries
MSFRREKFIEFGGPDGGNGGNGGSVIFVASSAVNTLLYFRYNQHIRAENGKAGSGKGKFGAAGRNRVVEVPVGTQLYDEDGNTLIADLNNIGQQYTVAAGGRGGIGNAQYKSSTNRAPTYFTYGTLGEEHCVLLKLKIVSDVGIIGMPNAGKSSLLSRCTASKTKVSDYPFTTLEPHLGVAYANGCELVLADIPGLIENASSGAGLGHKFLKHIERCVILLHLVDCSLPDIVSAYELVRQELKLHSQELAGKQEVVILNKCDLLSEGEVREKQKLLESSTKKEVITLSMGDELDSLIVFLHAQVKKAVVTEPSDTSFDPFLYVHYNKK

SEQ ID NO: 29920 - protein, 872 aa, Anaplasma marginale str. St. Maries
MDLNKFTEKAKGFIMNAQMFAVSSGHQSLLPEHLLNVMLEEENDMVGNLISSCGAEVSKITGALSTMLSKLPVVSGSGSGHLSLSREMAKILDEAASLAKRNQDVYVTAERLLQALVVVESSVSRMLLNEGVTTQKLNALIERMRDGVRAESENAEQQFDALRKYTQDLTELAAKGKMDPVIGRSDETRRLIQVLSRRTKNNPALIGEPGVGKSAIVEGLVQAMISGNVPMWLRDAKVLALDLASLIAGTKYRGEFEERLKAVITKIVASNGKIILFIDELHMLVGAGATGGSMDASNILKPVLARGEIRCIGATTLDEYREHIEKDPALARRFQPVFVAEPTTGDTISILRGLKEKYELHHGIRITDSAIVAAATLSNRYITDRFLPDKAIDLIDEAASRARIEIDSKPEIIDSIDRRIMQLKIESEVLKNEKNEASQQRLAVINAELNELSSEAADLNSKWQAEKIKISKMQELTEKLDGARIELEQAQRSGNLSRAGELMYGVIPSLEQELKQHEEVAGTMLRKEIGVNDIAAIVSRWTGIPVENVMNSEKEKLLNMEAEIGKSVIGQESAVRAVSNAVRRSRAGVQDAQKPMGSFLFLGPTGVGKTELTKALSEFLFDSRSALLRFDMSEFMEKHSVAKLIGAPPGYVGYEQGGMLTEAVRRRPYQVVLFDEIEKAHPDIFNILLQVLDEGRLTDSKGKLVDFKNTILVLTSNIGQEILVNGATGESAEVTRQKVLEVLNMHFRPEFLNRLDDIIIFNRLAKEHIGRIVDVQMSYLQKIISDKGLTITLLPEAKSWIAERGYDVTYGARPLKRLIQHNIQDQLAELLLSGKVSAGDSLEGFVLDGALAIRRKETPTTRAESGANSYSP

SEQ ID NO: 29921 - protein, 412 aa, Anaplasma marginale str. St. Maries
MGRILVKKFGGTSLKDVECILRVANIVRQSVERGHKLVVVVSAMGRFTDEAVTTAQEVSELASEAQLSEYDVVVSSGEQVSCGLLALALQRIDIKATSIMGWQIPINTTGEHSRARIIEIKPDRILSLLNEHDVVIVAGFQGIHNARITTLGRGGSDISAVAIAAALRLDACYMYTDVAGVYTANPCLVPSARKLDHVTYNDMVEISASGRAILNVRSVEMAMRCGVRIHVMSSSQEAKGTLVSFGCEREMESRIITGIAISKKIASVSLGGVPAVPGIAAALLPIAEGNIDVDMIMQTVDGELRNITFTVQEEDLQKTQDILLQHKHNILYESLAVTDSLAKVSLVGACMISRPGVASRVFSALASGGIAVLAVSTSEIKITVLMHEQSAAPALSLLHEEFALDRESVLCT

SEQ ID NO: 29922 - protein, 259 aa, Anaplasma marginale str. St. Maries
MVSMVIVPGSTATALAASLSSVTGFPVVTPCISRFADGEINVEFPSGAAEAPYKNVVLLQSLCKPANDSLMELLLLADVVRRTCAPDRVTAVVPYMCYSRQDRVTSRVAGEYGAVTSALSSKVVAKLLGASGIDHLITVDLHSSQAAGFFEMPLTNLPVAGLFIEEIGDSHILDKLAVVAPDCGSLPRVRGFVRALSEGRKVNSVQVAVIDKYRESPGVSEVVHVIGSVKDRHCVILDDIVDSGGTLCNAAAALKRGGP

SEQ ID NO: 29923 - protein, 477 aa, Geobacillus kaustophilus HTA426
MDQTKTPLYDALVHHWARRPVSFHVPGHKYGALFSKRGRDMFAPLLALDATEISGLDDLHQPESVIAEAQALAAELYGVRETFFLVNGSTAGNLAMIAAVCDGKRKKVIVQRNCHKSVMHALQLMEATPVLLAPEFDRDVCVASHIRPEAVKEALALYDDVAAVVLTNPNYYGMAADLTEIVRLVHEHGIPVLVDEAHGAHFVVGPPFPTSALRYGADVVVQSAHKTLPAMTMGAFLHVNSERVDLERLKYFLQLFQSSSPSYPIMASLDLARSYVAQLSKSDAAAIVAEIEKFKAALADIDGVAVVCSRHFGVQTDPLKVMVQTRCSLTGYELQRWLEREGVFVELADRMNVLFVCPLAVTGRLQEAAEKIKRAWRDLPDGEAPVCNASPFLGPPLSVLVPYNELRHLRTKAVALEEAEGHIAAETVIPYPPGVPLVWVGERIGRGHIEQIRQLLCQRAHIQGGSRLKDGQLVVYE

SEQ ID NO: 29924 - protein, 632 aa, Geobacillus kaustophilus HTA426
MNRIFRNTIFYLLIFLVVIGVVSFFNGTNQRTEPMTYDAFITHLENGDVKSFSIKPERGVYEIKGQLKTYSEGQYFSTYVMNSDKVLDRIDAAAARTRVEVVPADETSGWVTFFTSIIPFVIIFILFFFLLNQAQGGGSRVMNFGKSRARLYTDDKRKVRFRDVAGADEEKEELVEIVEFLKDPRKFAELGARIPKGVLLVGPPGTGKTLLARAVAGEAGVPFFSISGSDFVEMFVGVGASRVRDLFETAKKNAPCIIFIDEIDAVGRQRGAGLGGGHDEREQTLNQLLVEMDGFNGNEGIIIIAATNRPDILDPALLRPGRFDRQITVDRPDVKGREAVLRVHARNKPLDESVDLKTIAMRTPGFSGADLENLLNEAALVAARRNKKKIDMSDIDEATDRVIAGPAKKSRVISEKERRIVAFHEAGHTVIGMVLADAEMVHKVTIVPRGQAGGYAVMLPKEDRYFMTKAELMDKITGLLGGRVAEEIVFNEVSTGAHNDFQRATNIARRMVTEFGMSEKLGPLQFGQPSGQVFLGRDLHNEQNYSDKIAYEIDLEIQRIIKECYEKAKQILTQHRDKLDLIANTLLEVETLDAEQIKHLFEHGTLPKDRNGREESGKSDGDVKINIQKKEE

SEQ ID NO: 29925 - protein, 467 aa, Geobacillus kaustophilus HTA426
MTTFQELGLSQEVMKAIERMGFEETTPIQAKTIPLSLQNKDVIGQAQTGTGKTAAFGIPIVEKVNVKNSAVQALVVAPTRELAIQVSEELYKIGAVKRVRVLPIYGGQDIERQIRALKKHPHVIVGTPGRIIDHINRGTLRLEHVHTVVLDEADEMLNMGFIEDIEAILSHVPAERQTLLFSATMPDPIRRIAERFMNEPELVKVKAKEMTVPNIQQYYLEVHEKKKFDILTRLLDIQAPELAIVFGRTKRRVDELAEALNLRGYAAEGIHGDLSQAKRLSVLRKFKEGAIEILVATDVAARGLDISGVTHVYNFDIPQDPESYVHRIGRTGRAGKTGVAMTFVTPREIGQLHHIERTTKRKMERMKPPTLDEALEGQQRIAIEKLLNVVETENLSFYKRAAEELLEEHDSVTIVAACLKMLTREPDTTPVQLTEEPPLAVKREKKRGGRPDGSARSRTKKRRITAH

SEQ ID NO: 29926 - protein, 551 aa, Geobacillus kaustophilus HTA426
MKRTMRHITVAQAIVECFKQEQIRYVFGVPGESYLPLLDAIYDEPSIEFISARHEGGASFMAEGYAKASRKCGVVLATRAVGGANLTIGVHTARQDSTPMVVFLGQVNSRFLGREGFQEVDMEAFFRPIAKWVVEIREAERVPELVQRAFRTAKTGRPGPVVVSLPEDVFSKTITEAVMAETYVPKPAPRQEDIRNIKERLERAKRPLVIAGGGVKWSGAEQLLRLWAEKYALPVMAAFRRHDVFPHNHPCYVGHLGLGTPKEVMETAEQADVVIALGTRLSEVTTQDYRLLSPTQTLIHIDIDSDGLGKVYAPDIAVWADCREALSRLLDIAVQPSWQEWAAERRERYEQTAALPLEKRTLHEAVMASLGHHLPKNAVITNDAGNFAGWLHAFFPFGDGHTYIGPTSGAMGYGMPAAIGAKLAFPDRTVVSLSGDGGFMMTVQELETAARYDIPIISIVFNNHMYGTIRMHQELQFPGRVIGTDLGRVSFARLAECLNSCGFQVQTEQQFTEALLLALEAKKPTVIEVLTDPNHISVAATIQDLRAKRKS

SEQ ID NO: 29927 - protein, 615 aa, Geobacillus kaustophilus HTA426
MCGITGWVHFGRNLRRERTVIDSMTETLAKRGPDDTNTWLDTHVAFGHKRLVVVDPAGGKQPMVRQKNGHRYTIVYNGELYNTEDIRKELLRQGYRFDGHSDTEVLLAAYMEWKEKCVDWLNGIFAFAVWDGERELLFMARDRLGVKPLFYREDGGGLLFGSEVKAILAHPDVKAEVNYEGLAEVFGLGPSRTPGHGVFDGIRELRPAHALTFSRSGLRIWRYWNVESDVHRDSFEETVEKLRFLLTDAVTRQLVSDVPVCTFLSGGVDSSAITGIAANAFAADGKGPLHTYSIDYEGNDQYFKANDFQPNTDAPFIEQVSNKFQTVHHRCVITQEELFRHLHEAVIVRDVPGMADVDSSLLWFCKQIRERFVVSLSGECADEIFGGYPWFHRPDDLSRKGFPWMRSVDARMGLLKDEWRQKLRLDDYVQMRYEQTLAEVPRLEGESAEEAKRRELFYLNMIWFMTTLLDRKDRMSMGASLEVRVPFADHRIVEYVWNIPWDMKMYGGREKGLLRKALEGLLPEEVLYRKKSPYPKTHHPLYTKLVKQWLEQLLHDRSSVLHEFFDREKLLALIETEGKSFQVPWFGQLMTGPQLLAYLGQVHVWFDHYGIRIKE

SEQ ID NO: 29928 - protein, 230 aa, Geobacillus kaustophilus HTA426
MANHWMKDRLKAVPLFRELSDYELDSLVAISHVRVYKPRTFVFMQGDPLERVYFIHSGTVKIYKTDFSGKEQIVSILQTGEMFPHAGFFLKGTYPAHAEVVEEATLIAIPIHDFEQVLMASPELCIKLFRVMGEKIVDLQNRLEAQVLHNTYEQIVLLLLRLTRTNAVKQGKWHRLTAHVTNRELANMIGTARETVSRTLSQLKRKGLIDVDEHGFYLIDREGLEQEIFF

SEQ ID NO: 29929 - protein, 232 aa, Geobacillus kaustophilus HTA426
MEAAVNGYFPHLRSLLQSSKKVIPLRKHSFLFQEGMPANELYLILSGKVQVSKICPDGKEMCFRICGSGEIVGELTLFTNDARYLLTAKVIEPGEAAVINKEELEQQLLINPPLTLEYMLWISKHVRRTQTKFRDLIMHGKKGALYSTLIRLCNSYGVPLEDGSIFIDVTLKNQDLANFCGTTRESVNRMLNALKQEGIISMKRGKITVHDLNYLKTEIQCEDCPADICCIE

SEQ ID NO: 29930 - protein, 228 aa, Geobacillus kaustophilus HTA426
MNEIESREWQKWLTSLGRDLRLEKGTYLFQEGEKADDIYYIQSGKIQISKMDMDGRELALRICSEGDLIGELTLFCPGARYMLTAKALEDSVVSAIPRERLEQELANNPTLAIELMKWMSLHFRKTQTKFRDLILHGKKGALYSTLIRLCNSYGVMKEDGILINVPLTNQELANFCGTAREVVNRMLSDLRKKGVISVEKGKICVHNLQYLRDEIACEGCPPELCRID

SEQ ID NO: 29931 - protein, 635 aa, Geobacillus kaustophilus HTA426
MCGFIGCIHDRPRAIEQTWKTTLVEMNRLITHRGPDDEGYFFDDYVSFGFRRLSIIDLEAGHQPLSYENDRYWIIFNGEIYNYLELREELAAKGYSFATHSDTEVIVALYSAEKEKAVEKLRGMFAFVIWDKQEKTVFAARDPFGIKPFFYAEQGDRTFFASEKKSILLALRQESPNGDSLQHYLTFQYVPEPLTMSAGIYKLEPGHYLKKKVGKPLTIHRYWKASFEPIRQSEEELVKKIRDALFDSVNVHMRSDVPVGAFLSGGIDSSFIVAIAKQFHPHLKTFSVGFEREGFSEIDVAKETAEKLGVDNISYVISPQEYMEELPKIMWHMDDPLADPAAVPLYFVAREARKHVTVVLSGEGADELFGGYNIYREPESLRLFARMPNIVKAVLRVIAKMLPDGMKGKSFLERGTTPLEERYVGNAKIYSEKEKAALLKTYQEGREYTAVTAPFYRETLHYPPVNRMQYIDLHTWLRGDILVKADKMTMAHSLELRVPFLDKKVFEVARQIAPDMKTANGTTKYILRKAAEGIVPDHVLNRKKLGFPVPIRHWLKNEMYDWARQLINESETDHLFHKDVLYRLLDEHARHKADHSRKLWTVLAFMVWHQVYVEKKYDFAQSVQNEKRPASVLEA

SEQ ID NO: 29932 - protein, 471 aa, Geobacillus kaustophilus HTA426
MNLFRKKPIQLLMKESGAKGASLRKELGAFDLTMLGIGAIIGTGIFVLTGVAAAEHAGPALVLSFILSGLACVFAALCYAEFASTVPVSGSAYTYSYATFGELIAWILGWDLILEYGVASSAVAVGWSGYFQGLLSGFGIELPKALTSAYDPAKGTFIDLPAIIIVLFITFLLNLGAKKSARFNAVIVAIKVAVVLLFLAVGVWYVKPENWTPFMPYGFSGVATGAATVFFAYIGFDAVSTAAEEVRNPQRDMPIGIIVSLLVCTLLYIAVSLVLTGIVPYEQLNVKNPVAFALNYIHQDWVAGFISLGAIAGITTVLLVMMYGQTRLFYAISRDGLLPKVFARISPTRQVPYVNTWLTGAAVAVFAGIIPLNKLAELTNIGTLFAFITVSIGVLVLRKTQPDLKRAFRVPFVPVVPILAVLFCGYLVLQLPAMTWIGFVSWLLIGLVIYFIYGRKHSELNEMARTEEKAG

SEQ ID NO: 29933 - protein, 395 aa, Geobacillus kaustophilus HTA426
MTMEIPFSELLEQLPKQFFASLVAKVGEKIKAGCDVINLGQGNPDQPTPKHIVEAMQRAAANPKYHKYSPFQGYFFLKEAIAAFYAREYGVNVDPDREVAILFGGKAGLVELPLCLVNPGDVVLVPDPGYPDYWSGIALARARMEMMPLSSENGFLPDYEAIPESVADRAKLMFLNYPNNPTGATATKEFFAETVAFAAKHGIAVVHDFAYGAIGFDGRKPVSFLEADGAKDVGVEIYTFSKTYNMAGWRVAFAVGNERIIRALELLQDHLYVSLFGAIQEAAAAALLGPQDCVTELVALYEARRNAFIAALCEIGWEAPAPYGSFFAWLPLPKGISSAEFADMLLERAHVAVAPGIGFGEHGEGYVRVGLLTDEARLREAAERIGRLGLFEKNF

SEQ ID NO: 29934 - protein, 288 aa, Geobacillus kaustophilus HTA426
MKTIGFIGLGVMGKSMARHLLKAGYPLLAYTRTKEKAEDLLQEGAVWKETVADLAREADVVMTMVGDPRDVEQVYFGEGGILENARPGTYVIDMTTSTPTLAQSIYEAAKQKGIHALDAPVSGGDIGAREGTLTIMVGGDEDVFLACKPILERLGTNIVRQGGAGAGQHTKMCNQIAIATNMIGVCEAMAYAKRAGLDPFKVLESIAKGAAGSWSLSNLAPRMLSGDFAPGFYVKHFIKDMKIALEEAERMNLPLPGLALAKQLYEELAQAGEENSGTQALYKRYVKA

SEQ ID NO: 29935 - protein, 385 aa, Geobacillus kaustophilus HTA426
MKHLIQPRVQAIQLSGIRQFFNLVADRPGLVSLTIGQPDFPTPDHVKAAAQEAIAADFTTYTANAGLLELRQAACQFVADKYGLRYTPDEVIATVGASQALDITFRTILEEGTEVLLPAPVYPGYEPLIRLCGAKPVYIDTRPNGFRLSAELIAPYLTEKTRCLVLPYPSNPTGTALSAEELENIASLLKGRPIWIVSDEIYSELVYHGRHHSIAEWLPEQTIVINGLSKSHSMTGWRIGFVFAPAFAVEQMVKVHQYSVSCTSSISQKAAVEALTAGKHDAEAMRAAYAERLEYAYHRLTAMGLPVEKPDGAFYLFPSIAAFGMSSFDFALDVVENAGVALVPGSAFSEYGEGHVRLSYAYSLDVLKEGLDRLERYIQTKRRRP

SEQ ID NO: 29936 - protein, 490 aa, Geobacillus kaustophilus HTA426
MSQLETPLFTGLLEHMKKNPVQFHIPGHKKGAGMDPEFRAFIGDNALAIDLINISPLDDLHHPKGMIKRAQELAAEAFGADYTFFSVQGTSGAIMTMVMSVAGPGDKIIVPRNVHKSVMSAIVFSGATPIFIHPEIDKELGISHGITPQAVEKALRQHPDAKGVLVINPTYFGIAGDLKKIVDIAHSYNVPVLVDEAHGVHIHFHEDLPLSAMQAGADMAATSVHKLGGSLTQSSILNVREGLVSAKHVQAILSMLTTTSTSYLLLASLDVARKQLATKGRELIDKAIRLADWTRRQINEIPYLYCVGEEILGTEATYDYDPTKLIISVKELGLTGHDVERWLRETYNIEVELSDLYNILCIITPGDTEREASLLVEALRRLSKQFSHQAEKGIKPKVLLPDIPALALTPRDAFYAETEVVPFHESAGRIIAEFVMVYPPGIPIFIPGEIITEENLKYIETNLAAGLPVQGPEDDTLQTLRVIKEYKPIR

SEQ ID NO: 29937 - protein, 417 aa, Geobacillus kaustophilus HTA426
MKLIVQKFGGTSVRDERGRNLARRHIERALEDGYKVVAVVSAMGRCGDPYATDTLLSLIGGVHHHVTKREQDMLMACGEIISSVVFSNLLNEHGIKATAFTGAQAGFCTNSDHTNAKILEMRCDRLLEALRQYDVVVVAGFQGMAENGDITTLGRGGSDTSAAALGAALNAEWVDIFTDVDGVMTADPRIVESARPLDVVTYTEICNMAYQGAKVIHPRAVEIAMQAKVPLRIRSTYSDAPGTLVTSSVRGRKGSDVKERLVTGITYVADVTQIKVLAKEGHYELQSDVFQAMAHEGISVDFINISPYGVVYTVSGDMTEKAVAALRRIGYEPAVTPRCAKVSVVGAGIAGVPGVTAKIVTALSEQGIQILQSADSHTTIWVLVKQDDMEKAVNALHDAFCLSEADAGEDEAIWSEE

SEQ ID NO: 29938 - protein, 382 aa, Geobacillus kaustophilus HTA426
MREAVIVEAVRTPVGKRNGVFRDVHPVHLAAVVLDEVVRRAGMDKGAVEDIVMGCVTPVAEQGYNIGRLAALEAGFPIEVPAVQINRMCGSGQQAIHFAAQEIRSGDMDVTIAAGVESMTKVPILSDGNERTIPPSLHEKYEFIHQGVSAERIAKKYGLTREELDAYAYESHQRALAALREGKFRAEIVPVKGLDRDGREILVTDDEGPRADTSPEALAALKPVFQEDGLITAGNASQMSDGAAAVLLMEREAARRFGLKPKARIVAQTVVGSDPTYMLDGVIPATRQVLKKAGLSIDDIDLIEINEAFAPVVLAWQKEIGAPLEKVNVNGGAIALGHPLGATGAKLMTSLVHELERRGGRYGLLTICIGHGMATATIIERE

SEQ ID NO: 29939 - protein, 579 aa, Geobacillus kaustophilus HTA426
MRVFRDLFWFFRQEKKAYITGIFVLVIVAFLETVPPKVIGLLVDHVKNGTMTKEVLIRWIAVLAAVAAALYGLRYAWRIFIFGSAVKLARQLRNELYQHFTNMSPSFYQRKRIGDLMAHATNDLQAIQQTAGSGILTLVDSVTLGGFVLATMAFSISWKLTLISLLPMPVMAAATSRYGTMLHRRFLTAQAAFSSLNDKVQESVNGIRVIKAFGYEEHDVEAFRRQSEDVVAKNVAVAKIDALFDPTIGLLVGLSFFLAVAFGSQMVLAGELTIGELVSFTTYLGLLIWPMLAFGWLFNIVERGRASYDRVRALLAEQDEINERPDALHIAPQGDIEYDVRQFAYPGEAKPALRGIRFQLKRGATLGVVGKTGAGKTTLLRLLLREFDGYDGEIRFGGRDIRDYTLFALRSAIGYVPQDHFLFSASIRDNIAFAKPEAGEDEVVRAARLADIHDDILQFPDGYETVIGERGVSLSGGQKQRLSIARALLIDPEVLIFDDALSAVDAKTEARILAALKQERRGKTTIIAAHRLSAVEHADWILVLDGGRIVQAGTHEQLMAEGGWYRDMHRRQQLEALAE

SEQ ID NO: 29940 - protein, 66 aa, Geobacillus kaustophilus HTA426
MQRGKVKWFNNEKGYGFIEVEGGSDVFVHFTAIQGEGFKTLEEGQEVSFEIVQGNRGPQAANVVKL

SEQ ID NO: 29941 - protein, 436 aa, Geobacillus kaustophilus HTA426
MRKMDEKTLTLGLDALWVMLSAVLVIGMQAGFALLEAGSTRMKNSGHVAGKQILSFAIASLAFWAFGFAITFGAGNSFIGTEGWFLKEGKGTFDSLSWANVPLELKFLFQLGFAGVSLAIAWGGFAERAKLSVYFLFGTIFTIAIYPVIGHWVWGGGWLGKMGMQDFAGSTVVHLQGAIAALVATILLGPRIGKFNKDKTPNVIPGHNQVYTVIGGLILWIGWFGFNAGSTMAVGDGFFGYVALTTNLAAAAGAIAAIVTAKILVGKADIPAMVNGVLAALVAITAACAFVEPWAAVVIGAVAGSFTFWTSIYFERKGIDDPIYAFSVHGVAGIIGTISTGFFASPRLVEITGIGKAGLFYGGGFDQLIVQTVGVLGAAVYVAAVSFVILYALKKTIGLRVTAEQEISGLDISEHGSYGYPEQLDPAYQPKTLAQQ

SEQ ID NO: 29942 - protein, 298 aa, Geobacillus kaustophilus HTA426
MTRVGFIGLGVMGSRMARRLLEAGFNVTVYNRTTEKAVPLVNLGARQAATVAELAGEADIICTCLSMPDDVIEVYTGEGGVLSAAHPGTICLDFTTVGPKTSRFVARRADEHGVAYLDAPVSGGPEGAEQGALTIMVGGAKEAWERVRPLLRVLGKTVEYLGESGAGSAAKAINQYLVAVHSVAAAEAMVAGVAYGLHAGKLYRLLKESYGDSRMLRRHMEQFVLPRRFTPGGAVKYVHKDVRLANELMDEIGLGRRLGIQAEEAFAAAIAAGLADLDMAAVIQPLEQRVGVVVEETE

SEQ ID NO: 29943 - protein, 602 aa, Geobacillus kaustophilus HTA426
MMSLRHSPHGARLGASPQRAKNSVGTLRRLWAFIAPQKRKLFAAMAMVVVSSALALAGPYVIGWTVDVYIIERRTDGFLATLVLLLAIYMALGAATFLQNYWMIDVGQRTVHAIRERLFRHFHELPISFFDRRQQGELMSRITNDIDNMSQTFNSTVVQVVSSTLTLMGAIVVMLSQSVVLTIVTLVVVPLMYVGMRWITNRTRVRFREQQRALGEMNGFIEEVISGQKVVKLFSQEERMESELARKNAELKQAGFWAQTYSGFIPKLMNFLNNVSFALIAGVGGWLAAKGAISVGTIVVFVEYARQFTRPLNDLANQWNTLLSALAGAERVLEILDLPKEEEDEREAAALDRLDGRIEFRQVVFSYDKQRPALDGVTFSIAPGETVALVGPTGAGKTTVLQLLTRFYDPDRGVILIDGRDSRTIKRASLRRHMAFVLQDTFLFAGTIRDNIRYGRLEATDEEVEEAARQANAHSFIMKLPDGYDTVLAPGGGGISQGQRQLLAIARAMIADPAILILDEATSNIDTVTEVRIQEALARLMNGRTCLVIAHRLNTIQHADRILVLNEGKVIEQGTHEELLAAKGFYFQLYCRYWKRSMHAAR

SEQ ID NO: 29944 - protein, 389 aa, Geobacillus kaustophilus HTA426
MRRDAVIVSAVRTAIARQGDALATMPAHIYGAEVIKEAMRRANIGPEHVDDVIMGNVLSGGGNIARLTALQTGLSLELTGVTVDRQCGSGINAVNLAAQAIWAGDGDVYIAGGVESMSRAPYLMDRPEKPYSSTPPSFRKSQLSPKEIGDPPMGITAENLAKKYGISREEQDAFALRSQQRMARAMQEGRFDEQIVPIAVPVKKGEPFVFDTDEHPRPNTTMEALSKLPPAFLEGGTVTAGNSSGLNDAASALVIMSREKAEELGVKPLAVIRAHAVAGVDPNIMGIGPVPATRKVLEKAGLTLDEMDIIEINEAFAAQVIACDRELEMDPEKVNINGGAIAHGHPLGATGAILITKAVYELKRRSGKYALITACIGGGQGIATIIERE

SEQ ID NO: 29945 - protein, 411 aa, Geobacillus kaustophilus HTA426
MTTTTKLHPKTIEIVKSTVPVLETHGEQITKRFYELMFSNHPELLHIFNHANQKQGRQQRALAAAVYAAARYIDQLDAILPVVRQIGHKHRSLGIKPEQYPIVGKHLLLAIKDVLGDAATDEVITAWAEAYEAIASVFIQVEKELYDEAAAKHGGWRDFRRFVVVKKVKESGVITSFYLEPEDGKAISDYLPGQYVSVKLSIPGETYTHIRQYSLSDAPGKGYYRISVKREAATADKPAGIVSNYLHDHVQEGDVLELSAPAGDFTLDLSKTTPVVFISGGVGITPLLSMAHTLAIRQPTRPAAFLHAALNGRVHAFDKELRMLAERPSFSYRICYESPSDEDRRHPHFGKEGRIDLAWMQSVIPTKDADFYFCGPMPFMKTVYRALKQWSVPEEHIHYEFFGPAGDLTKD

SEQ ID NO: 29946 - protein, 334 aa, Geobacillus kaustophilus HTA426
MDRFKVVVTDYEFQTLAPEQEVLSSLNVEFVATQCRTEEEVISACRDADAIINQYAPISAEVIAQLEKCKIISRYGVGVNTVDVDAATEKGIIVANVTDYSIDEVSDHALALLLSLARKIVKLNHEVKSGTWNFNVGKPIYRLRGRTLGLVGLGRIPQALAKKAQAFGLRVIAYDPYVPAKVADELNVQLLGLNDVFRQSDYISVHAPLTKETKGMISDEQFNLAKKELIIVNTARGPVIDESALIRALQEGKISGAGLDVTECEPIQPDNPLLKMENVVITPHVAWYSEESEKELKRKTAQNVADVLSGYYPTYLVNHNVKEKMRLKEKGLYV

SEQ ID NO: 29947 - protein, 281 aa, Geobacillus kaustophilus HTA426
MRKKAWKWWIAVALTALLSAVALTGCSTTDKGEGGTSSETAKATNTLEKIKQRGKLIVGVKYDLNLFGLKNPETGKVEGFDIDIAKGLAKKILGDENKIELKEVTSKTRIPMLNNGEIDAIIATMTITEERKKEVDFSDVYFMAGQSLLVKKDSPINSVKDLKKGMTVLTAKGSTSAENIRKVAPQVNVLEFENYAEAFTALKAGQGDALTTDNALLWGMAKQDPNYRVLDETFTEEPYGIAVRKGDKELLQVINEYLKEIKENGEYDKIYEKWIGKKPQQ

SEQ ID NO: 29948 - protein, 403 aa, Geobacillus kaustophilus HTA426
MGREVVIVDAVRTPIGRYKGALKEVRPDDLAAVVIRALIERNPNVPVEQIDDVVFGNANQAGEDNRNVARMAALLAGLPIEVAGVTVNRLCGSGLDAVNYAARAILANEADIMIAGGVESMTRAPFVMAKPSSDFPRGNIEMYDTTIGWRFINPKMHEMYGTDSMPQTAENVAKRFGITREAQDEFAYESQMKAKQAIETNRFADELVPVVYHDRKGNRVVVDKDEHPRPDTTLEKLAKLPPLFENGTVTAGNSSGVNDGAAALLVMSAEKAKELGLKPLAVYVTSAVAGVEPAVMGIGPIFATRKALRRAGLSLDDIGLVELNEAFASQALECIRQLELDRAKVNVNGGAIALGHPLGASGARILTTLIYEMRKRGVTYGLATMCIGVGQGIATIVKNADER

SEQ ID NO: 29949 - protein, 393 aa, Geobacillus kaustophilus HTA426
MKLAKRVASLTPSATLAITAKAKELKAAGYDVIGLGAGEPDFNTPEHIIAAAIKAMNEGHTKYTPSGGLPALKEEIIKKFARDQGLSYEPAEIIVCVGAKHALYTLFQVLLDEGDEVIIPTPYWVSYPEQVKLAGGVPVYVEGLEENDFKMTSDQLKQAITPKTKAVIINSPSNPTGMIYTAEELKALGEVCLAHGVLIVSDEIYEKLIYGGAKHVSIAELSPELKEQTIIINGVSKSHSMTGWRIGYAAGPKDIIQAMTDLASHSTSNPTSIAQYAAIAAYSGPQEPVEQMRQAFEKRLDIIYDKLVQIPGFTCIKPQGAFYLFPNARKAADMAECRTVDEFVAVLLEEAKVALVPGSGFGAPDYVRLSYATSLEALETAIERIRRFMEARA

SEQ ID NO: 29950 - protein, 127 aa, Geobacillus kaustophilus HTA426
MFRTLMNAKIHRARVTEANLDYVGSITIDEDILDAVGIVANEKVQVVNNHNGARFETYVIPGERGSGVFCLNGAAARLVQKGDVIIVISYVLVPEEKIAAHRPKIAIMDENNRIVQLIAEEPAHTVL

SEQ ID NO: 29951 - protein, 510 aa, Geobacillus kaustophilus HTA426
MAPLCASAQIDIVQKKTTEAEEELHTFDALLVRSATKVTEELLEKMPNLKIIGRAGVGVDNIDVDAATKRGIVVINAPNGNTISAAEHTFAMMAALVRRIPQAHISVKSREWNRSAFVGNELFGKKLGIIGFGRIGSEVAKRARAFGMSVHVYDPFLTKERAEKLGVSIHSLDEVLTVADIITVHTPLTKETRGLLGTENLAKTKKGVYLINCARGGIIDEQALIPFLESGHVAGVALDVFEQEPPGDHPLLAFDNVIVTPHLGASTVEAQLNVATQVAEELLHFFEGRPVTSSINLPALSKDVYEKIQAFYHLGQKLGLIASQFMNIPVQELSVTYAGTVADLETTYITRSLLAGFLRPRVASTVNEVNAAMVAKERGITYGEKFSDETHGYANCISLTVHGENKTFTIKGTHVPNYGDRIVHFDGVAIDFAPEGHLLYIQHQDRPGMIGKVGNVLGAHDVNIATMQVGRQEAGGKAMMILSLDKPVDDEVLQALAQIDDIETVKRLEA

SEQ ID NO: 29952 - protein, 454 aa, Geobacillus kaustophilus HTA426
MAQLETNTSVESLGYKQELKRSLTFVDLLIYGMVFMVPIAPFGIYGYVAQGSKGMVALAYLIGMVGMIFTALSYARMAEAFPIAGSVYSYAQRGMNEYVGFMAGWVILLDYIFVPALLYLVSAAALADIVPQVPISVWLVLFIAMNTVINILGIEMTAKANKVIVVLELIVLAVFVITGIIAIIKGVNGAQFTFKPLYDPNHFSAETVMGAVSVAVLSFLGFDAVSTLAEETRDGKSSIGKAIIFALLVVGALFIVQTWVAALIWPDYTTFKNADVAFYQIAELAGGPWLKWTTIVATALSWGIANALVAQAAISRILYSMGRDRKLPSVLAKVHPKFQTPYVSTLLVAVISLIVTTVFASQIDKLASLVNFGALTAFLFLHVSVMNYFLRKQKSNDYINHLLFPLIGFVIIGYVWMNLDPLSKKLGLIWIAIGLVYLVFLRLTNKDSRLSGEL

SEQ ID NO: 29953 - protein, 370 aa, Geobacillus kaustophilus HTA426
MEEQKFRILTINPGSTSTKIGVFENERPLLEKTIRHEADVLRQYKTIADQYEFRKQTILQALDEEGINLSKLSAVCGRGGLLRPIEGGTYRVNEAMLEDLRRGYSGQHASNLGGILAHEIASALNIPAFIVDPVVVDELDPIARISGFPLIERRSIFHALNQKAVARRVAKQLGKRYDELNLIVAHMGGGITVGAHKQGRVVDVNNGLDGEGPFSPERAGTVPAGDLVALCFSGEYYREEIMNMLVGGGGLVGYLGTNDAVKVEKMIEAGDEKAKLVYEAMAYQVAKEIGAASAVLSGKVDAIILTGGLAYGKSFVEQITRRVQWIADVIVHPGENELQALAEGALRVLRGEEEEKVYPGKAVSPVPARR

SEQ ID NO: 29954 - protein, 299 aa, Geobacillus kaustophilus HTA426
MKLESLVQEARQCQDRTVAVAAAEDEEVIEAVAMALEHRLGRFVLYGDRERLGRLLKEKGCARFSDVDVVHANSIGQAAELAVRAVHLNEADALMKGHVPTATLLKAVLNKEYGLRAGKVLSHVAVFEVPEFERFVIVTDAAMNIAPDLEQKVQIVNNAVSIARSIGIERPKVAALAAVETVNPAMPATLDAAALAMMQKRGQIEHCLVDGPLALDNAVSLAAAKHKRIESEVAGQADILLVPDIESGNMLYKSLVYFANARVGAVIAGAKAPIVLTSRADSAESKLYSLALAICSAAK

SEQ ID NO: 29955 - protein, 302 aa, Geobacillus kaustophilus HTA426
MRKEGYKSGFVAIIGRPNVGKSTFLNRVIGQKIAIMSDKPQTTRNKIQGVYTDDDAQIIFIDTPGVHKPKHKLGDFMMKVALNALREVDLILFMVNAEEGFGRGEAFIIERLKEVDTPVFLVINKIDRVHPDELLPLIDRYKDLYPFAEIVPISALEGNNVDRLLEQIKERLPEGPQYYPPDQITDHPEQFIIAELIREKALHLTREEVPHSIAVVVERIERREGSPTVYISAVIVVERDSQKGIIIGKQGRMLKEIGQRARADIEALLGSRVFLELWVKVQKDWRNRLSQLRDFGFREDEY

SEQ ID NO: 29956 - protein, 607 aa, Geobacillus kaustophilus HTA426
MSKIIGIDLGTTNSCVAVLEGGEVKVIPNPEGNRTTPSVVAFKNGERLVGEVAKRQAITNPNTIISIKRHMGTDYKVEIEGKQYTPQEISAIILQYLKSYAEDYLGEPVTRAVITVPAYFNDAQRQATKDAGRIAGLEVERIINEPTAAALAYGLDKEEDQTILVYDLGGGTFDVSILELGDGVFEVKATAGDNHLGGDDFDQVIIDYLVNQFKQEHGIDLSKDKMALQRLKDAAEKAKKELSGVTQTQISLPFISANENGPLHLEMTLTRAKFEELSAHLVERTMGPVRQALQDAGLTPADIDKVILVGGSTRIPAVQEAIKRELGKEPHKGVNPDEVVAIGAAIQGGVIAGEVKDVVLLDVTPLSLGIETMGGVFTKLIERNTTIPTSKSQVFTTAADNQTTVDIHVLQGERPMAADNKSLGRFQLTGIPPAPRGVPQIEVTFDIDANGIVHVRAKDLGTNKEQSITIKSSSGLSEEEIQRMIKEAEENAEADRKRKEAAELRNEADQLIFMTDKTLKEVEGKVSADEIKKAQDAKEALKAALEKNDIDDIRKKKDALQEAVQQLSIKLYEQAAKQAQSAGSQGGAANHKDNVVDAEFEEVNDDK

SEQ ID NO: 29957 - protein, 369 aa, Geobacillus kaustophilus HTA426
MEPQLRCIGCGAAIQFDDPKKAGYAPKSVLEKDEEEIICQRCFRLKHYNEVQDVPLDDSDFLNMLHRIGESKALVVNIVDIFDFNGSWIPGLPRFAAENPILLVGNKADLLPRSVKYPKLLRWMRRMAEELGLRPVDVCLVSAAKGIGMAKVMEAINRYREGGDVYVVGCTNVGKSTFINRIIEEATGKGNVITTSYFPGTTLDMIEIPLEGGATLYDTPGIINHHQMAHFVDARDLKIITPKREIHPRVYQLNEGQTLFFGGLARLDYIKGGRRSFVCYMANELTVHRTKLEKADSLYANQLGDLLSPPNKRYAAEFPPLVPRSLSVKERKTDIVFSGLGWVTCNDPGAQLVVHAPKGVDVFIRQSLI

SEQ ID NO: 29958 - protein, 380 aa, Geobacillus kaustophilus HTA426
MERIYLDHAATSPVHPDVAAGMVQWMTEQFGNPSSIHHFGRQSRRAVDEARAVVARSIGAKETEIVFTSGGTEADNFAVIGTAIANRGRGNHIITTAIEHHAVLRACEYLETQGFEVTYLPVDEQGTVSVEDVKAALRDETVLVSVMFANNEVGTIQPIREIGALLRDHPAYFHTDAVQAYGLLPIDVNEYGIDLLSISAHKINGPKGSGALYVRETVRITPLLFGGEQERKRRAGTENVPGIIGLAQAAEIAERTREEKRRQYAAWREAMLAIFRSSGIDYAVNGRPDGLPHILNVAFPGTNVESLLVNLDLAGIAASSGSACTAGSIDPSHVLVAMCGKESERIRSSVRFSFGLGNTMEQIERAAEETVKIIKRLTNR

SEQ ID NO: 29959 - protein, 374 aa, Geobacillus kaustophilus HTA426
MIYLDYAATTPMCQEAIAAYAEAASVYFGNESSLHDIGTKAKQLLALCRRELAAMINGEAEGIYFTSGGTEANLLAIRSLAAAYRHKGNHLITTEIEHASLHHLFKQLETEGYTVTYLPVDRFGRIRLADLERAITPKTILASIQHANSEIGTIQPLADIGRLLRAHGVLFHSDCVQTFAKIQLDVQDIRLDSLSVSAHKVYGPKGVGAVYINPRRHWKPVFPGATHESGFRPGTVNVPGIAAFITAAQQLHRRMADEQSRLERLRNRLLHAIAAKQLPVTVEGHPDFRLAHIIGLSVAGYEGQLVMLECNRAGIAISTGSACQVGLQAPSRTMLAVGKTPEEAKQFIRISLGAATTEAEIDQFVSTLERLTSA

SEQ ID NO: 29960 - protein, 432 aa, Geobacillus kaustophilus HTA426
MFVDQVKIYVKGGDGGNGMVAFRREKYVPKGGPAGGDGGKGGDVVFVVDEGLRTLMDFRYQRHFKAPRGENGMSKNQHGKNAEDLIVKVPPGTVVIDADTNEVLADLTEAGQRFVVAKGGRGGRGNTRFATASNPAPEIAENGEPGEERNIILELKLLADVGLVGFPSVGKSTLLSVVSAARPKIAEYHFTTLVPNLGVVETEDGRSFVMADLPGLIEGAHQGVGLGHQFLRHIERTRVIVHVIDMAAVEGRDPYNDYLVINEELKQYNLRLTERPQIVAANKMDMPNAEENLRRFKEKVGDAVPVFPISAATRQGVRELLFAIADLLETTPEFPLHEREDPAVQRVVYKYEKEEPPFTITRASDGAFILAGDKIEKLFKMTDFSREESVRRFARQLKAMGVDDALRERGAKDGDTIRLLDYEFEFVDDWDE

SEQ ID NO: 29961 - protein, 102 aa, Geobacillus kaustophilus HTA426
MYAIIETGGKQLKVEEGQEIYIEKLDANEGDTVTFDKVLFVGGETVKIGNPTVEGATVTARVQKHGRQKKIIVFKYKAKKNYRRKQGHRQPYTKVVIEKINA

SEQ ID NO: 29962 - protein, 596 aa, Geobacillus kaustophilus HTA426
MGGKVFYMDDKSQGGSTMTKMKVEEQEKARTKARMSGSLMLIEALKEEKVEVIFGYPGGAVLPLYDELYKAGVFHVLTRHEQGAIHAAEGYARISGKPGVVIATSGPGATNIVTGLTDAMMDSLPLVVFTGQVATSVIGSDAFQEADVVGITMPITKHNYQVRDISELPRIIKEAFHIATTGRPGPVLIDIPKDITTAEGEFDYDQDVHLPGYQPTTQPNHWQIRRLVEAVSQSKRPVILAGAGILHANASNELRQYAEQQNIPVIHTLLGLGGFPADHPLFLGMAGMHGTYTANMALCECDLLINIGARFDDRVTGNLKYFAPKATVAHIDIDPAEIGKNVPTKIPIVSDAKAALQELIAQQGKPADTAAWLTQLDEWKRRFPLHYEPEAGTIKPQKLIEMIYEMTNGEAIVTTDVGQHQMWAAQYYKFNRPHRWVTSGGLGTMGFGLPAAIGAQLADRSATVVSIVGDGGFQMTFQELSVIQELRLPIKIVIVNNQALGMVRQWQELFYDKRYSHSLIPNQPDFVKLAEAYGMPGLRAKTEAEAAEVLKQAFAMDGPVLLDFHVRADENVYPMVAPGKGLHEMVGVKACEESSR

SEQ ID NO: 29963 - protein, 372 aa, Geobacillus kaustophilus HTA426
MKIGIPKEIKNNENRVAITPAGVMTLVKAGHDVYVETEAGAGSGFSDSEYEKAGAVIVTKAEDAWAAEMVLKVKEPLAEEFRYFRPGLILFTYLHLAAAEALTKALVEQKVVGIAYETVQLANGSLPLLTPMSEVAGRMSVQVGAQFLEKPHGGKGILLGGVPGVRRGKVTIIGGGTAGTNAAKIAVGLGADVTILDINAERLRELDDLFGDQVTTLMSNSYHIAECVRESDLVVGAVLIPGAKAPKLVTEEMVRSMTPGSVLVDVAIDQGGIFETTDRVTTHDDPTYVKHGVVHYAVANMPGAVPRTSTFALTNVTIPYALQIANKGYRAACLDNPALLKGINTLDGHIVYEAVAAAHNMPYTDVHSLLQG

SEQ ID NO: 29964 - protein, 406 aa, Geobacillus kaustophilus HTA426
MANPKLVLAYSGGLDTSVAIKWLQERGYDVIACCLDLGEGKDLDFVKEKALKVGAMKSYVIDVKDEFANEYALIALQANALYEGKYPLVSALSRPLIAKKLVEIAELEGAVAVAHGCTGKGNDQVRFEVSIKALNPDLDVIAPVREWSWSREEEIEYAKKHGIPIPVDLDSPFSIDQNLWGRSNECGILEDPWAAPPEEAYELTASLENAPDVPDVIEIGFEQGVPVTLNGKAYPLAQLILELNALAGKHGVGRIDHVENRLVGIKSREVYECPGAITLIKAHKELEDLTLVREVAHFKPIIEQKIAEVIYNGLWFSPLKDALVAFLKETQKNVTGVVRVKLFKGHAIVEGRKSPFSLYDEKLATYTSEDEFDHQAAVGFISLYGLPTKVHSIVNKQNKASVPTGQ

SEQ ID NO: 29965 - protein, 380 aa, Geobacillus kaustophilus HTA426
MREVVIVDAVRTAIGKKKGALSSVHPVDLLVPVLRALVDRNGLDAGLVEDVIVGCVTMTGEQGGNIARQAVLAAGFPVGVPAFSLNRMCGSSQQAIHNAAQAILAGDIDIAIAAGVESMTRVPMGSDMGRFSRQLTSRYNIVPQGISAEMIAKKWGLSREELDAFSLQSHEKAAAATDRGMFEREIIPLDVPGEEGTVSFTRDEGIRRDTSLEKLAALTPSFQPKGGVITAGNSSQVSDGAAGVLLMSAEKARQLGLRPRARIVARAVVGEDPILMLTGVIPATRRVLEKTGLRLEQIDVIEINEAFASVVKAWERELEPDMAKVNPRGGAIALGHPLGASGARLMTTLLHELEDMDGKYGLQVMCIGFGMATATIIERL

SEQ ID NO: 29966 - protein, 396 aa, Geobacillus kaustophilus HTA426
MAKVLAINAGSSSLKFQLFEMPAETVLTKGVVERIGFDDAIFTIVVNGEKHQEVTAIPDHAAAVKMLLDKLIRYGIIRSFDEIDGIGHRVVHGGEKFSDSVLITEDVIKQIEEVSELAPLHNPANLVGIRAFQEVLPDVPAVAVFDTAFHQTMPEQSFLYSLPYEYYTKFGIRKYGFHGTSHKYVTQRAAELLGRPIEQLRLISCHLGNGASIAAVEGGKSIDTSMGFTPLAGVAMGTRSGNIDPALIPYIMEKTGMTADEVIEVLNKKSGMLGLSGISSDLRDLEKAAAEGNERAELALEVFANRIHKYIGSYAARMCGVDAIIFTAGIGENSEVVRAKVLRGLEFMGVYWDPILNKVRGKEAFISYPHSPVKVLVIPTNEELMIARDVMRLANL

SEQ ID NO: 29967 - protein, 381 aa, Geobacillus kaustophilus HTA426
MIYLDNSATTKPFPEVIDSFVAVATNYFANPSSLHGLGMKAERLLAQAREQIAAMLRVKPNEIVFTSGGTEANNFAIKGVAWQYQRRGRHIITTKIEHPSVAEPCRQLEELGFEVTYLPVDREGRVSVEQVERALRDDTILVSVMHVNNEVGTVQPIEEIGALLSRYPKTLFHVDRVQGISKVPLDLKQAGVDLCTISAHKFHGLRGAGLLYVREGVRLAPLIAGGGQERQLRSGTENVAAIVAMAKALRLALERYERDIGRLQALKDEWLEALLAIPDIEINTPRDGAAPHIINFSLKRGVKPEVFVHELEKSGIYVSTTSACSSKKKAPSKTLLAMGLGEDRAERGIRISLSFDNSREEIAPAVAAIKQAIKTLSEVTE

SEQ ID NO: 29968 - protein, 390 aa, Geobacillus kaustophilus HTA426
MKPQTRKTYVSKTVAGLKPSGIRRFFDLASSMDGVISLGVGEPDFVTSWSIREASILSLEQGYTSYTANAGLLELRQEIAAYLRRKFHVDYCPETEILVTVGASQAIDLALRAIINPGDEVIIVEPSFVAYEPLVVLAGGKPVAVHTSGEDKFQLNPVHLERAITERTKAVIICSPNNPTGTVQSRTELEAIARLAEAHDLLVIADEIYAELTYEGEYTSMAAVSGMRERTILISGFSKGFAMTGWRLGFAAAPDEILQAMLKIHQYAMMCAPTMAQYGALEALRSGERDVAEMRNSYRRRRNYFVASLNEIGLPCHLPGGAFYAFPSIKPTGLTSEQFAERLLIEEKVAVVPGNVFGQSGEGYIRCSYASSLEQLQEAIKRMKRFLARL

SEQ ID NO: 29969 - protein, 324 aa, Geobacillus kaustophilus HTA426
MTKPYVFITRKLPEDVVAPLLAIAEVEMWPHEDMAVPHDVLVEKAKRATAILPMVSDPIDEDVLSAGSALRVVANMGVGYDNIDVAAAAHRGILVCNTPDVLTDTTADLTFALLLATARRLVEAAMFLKEGKWKSWSPFLLAGADVHHKTIGIVGMGNIGQAVAKRAKGFDMNILYYNRSRRPEAEEKLGAVYRPFADLLSESDFVVCLTPLTSETRHLFNREAFRQMKKSAIFINAARGAVVDEQALYEALVGGEIAAAGLDVFEHEPVAADHPLVSLPNVVALPHIGSATYETRRAMMTLARDNIIAVLEGRPPLTPVNRIS

SEQ ID NO: 29970 - protein, 324 aa, Geobacillus kaustophilus HTA426
MATWKRTRGFWVSVILAFAFFAVVEWLIASGTLNVFYVNTLFFMAINVMLAASLHLIIGITGQFSIGHAGFFAVGAYASAVMTMKLQLPFAVGVLTAGIAAMLAGLVIGVPSLRLKGDYLAIATLGFGEIVRIALLNIDYVGGASGMTVTHMTTWPWVFACLFVTILVIANFTNSTHGRACISIREDEIAADAMGINTTYYKVAAFAIGSFFAGIAGALYAHHFYIIQPSNFGFLKSFDILIFVVLGGLGSLSGAVVAAVLLTIVSTFLQNYPETRMIIYSIVLILVMLYRPTGLMGTKELSSLFKWRKAAQGGMNHGGKNTVA

SEQ ID NO: 29971 - protein, 259 aa, Geobacillus kaustophilus HTA426
MAVLTIRNLHVAVEGKEILKGVDLEVKGGEIHAIMGPNGTGKSTLASAIMGHPKYEVTEGSVTLDGQDVLEMEVDERARAGLFLAMQYPSEISGVTNADFLRAAINARLGEGNEISLMKFIRKLDEKMAFLEMNPDMAHRYLNEGFSGGEKKRNEILQLMMLEPKIAILDEIDSGLDIDALKIVAKGVNEMRSSEFGCLIITHYQRLLNYITPDYVHVMMQGRIVKSGGPELAQRLEAEGYDWIKKELGIEDETVGQEA

SEQ ID NO: 29972 - protein, 390 aa, Geobacillus kaustophilus HTA426
MREAVIVAGARTPVGKAKKGTLAHVRPDDLGALVVKETIKRAGNYEGNIDDLIIGCAMPEAEQGLNIARNIGALAGLPYTVPAITINRYCSSGLQAIAYAAERVMLGHSDTVIAGGVESMSMVPMMGHVVRPNARLAEEAPEYYMSMGHTAEQVAKKYGVSREDQDAFAVRSHQRAAKAIAEGKFNEEIVPVEVTVRKVEGNKLVEEKVVFTQDEGVRPDTNMETLAKLRPAFAVNGTVTAGNASQMSDGAAAVMVMDREKAESLGLKPLGKFRSFAVAGVPPEVMGIGPVAAVPKALKLAGLELSDIGLIELNEAFASQSIQVIRELGLDEDIVNVNGGAIALGHPLGCTGAKLTLSLLYEMRRRNVQFGIVTMCIGGGMGAAGVFELL

SEQ ID NO: 29973 - protein, 348 aa, Geobacillus kaustophilus HTA426
MTDGRKRWLLLVGAAVWLGLPWLVFGNNYVLSTLILIGLYALVSTGMTLLMGYAGQISLGQAAFYGIGAYASAYLTAHAGWPSWLALAAGAVLAALVALVVGIPVFRLREHYLALATLGFGVIMFTFFKEWKEITGGLNGFFGIPPIRIAGVPLQSDLQFYYLVSLFVLAGLWFAHNIVRSRVGRALRAIHGSEVAASSLGVNIMKYKLQIFMLSAVYASIAGSLYAHYVTFINPDLFGIVPSIYFLIMVVIGGTASVWGGLIGAAVYVCLGEWLKAVVPLLLPNAGGEFEIVFFGLLLVVMLIYMPNGLTGVMQKRMRRFLEMGGRQEKQIAAVEGHKARSIGGERG

SEQ ID NO: 29974 - protein, 458 aa, Geobacillus kaustophilus HTA426
MKVAKFGGSSVASAAQFRKVADIVSSDIERRIVVVSAPGKRYKDDVKVTDMLIQLAEQVVAGEPHEETMEAIVKRYADIANELGLEADGFLAELVDDLQSKISAYRSEPPRLFDAIKASGEDHNARLMALYLQDCGLEASYVSPLEAGIIVTDEPGNAQVLPESYDKLKQLRERRGVLVIPGFFGYSRSGHIVTFPRGGSDITGSIVAAGVKADVYENFTDVDSIYCVNPSIVADARKLKEITYREMRELSYSGFSVFHDEALEPVYRAGIPVCVKNTNNPAAPGTWIVAKRNHIDEPVAGIASDTGFCSINISKYLMNREIGFGRRVLQILEDEGISYEHTPSGIDNMSVILRADQLADGKDERILARIREELAVDEVTIEYGLALIMVVGEGMEKTIGMAAKATTALANANINLEMINQGSSEVSMMFGVKEEVVNEAVRALYNAYFQQATVNHLS

SEQ ID NO: 29975 - protein, 494 aa, Geobacillus kaustophilus HTA426
MIDMRSIQKSFGANIVLNGVDFEVLPGEVHALMGENGAGKSTLIKVLTGIYERDGGTIVVNGREVHYRHPKEAERDGIVVIHQELNVIPTLTVAENIFLGREPKIGRTGVIRYKEMEQQAASYLRRLGMDLDPRELAGRLSVGKQQMIEIARAISTNAKCLIMDEPTAALTEREIQALFSVIPTLKQQGVAVVYISHRMEEIFTICDRISVLRDGQFIGTKRVKETNFDEIVQMMVGRQIGERFPKRRVTIGEERLRVERLTKKGLFENVSFSVRAGEVLGVAGLMGSGRTEIMEAIFGARPFDEGDIYIDGRPVRIRSPRQAVEHGIAMITEDRKQKGLILEMSVHENLTLPKLEQLATAGFIQSSKERDVVLTYIHLLNIKASSPDLPVKALSGGNQQKVVFGKWLAMNPRILILDEPTRGVDVGAKKEIYEVINELAAQGAAIIMISSELPEVLGMSDRVMVVHEGKVQAILENDGLDQETIMRAATGGNR

SEQ ID NO: 29976 - protein, 213 aa, Geobacillus kaustophilus HTA426
MKFFIDTANLEEIKHAHELGILAGVTTNPSLVAKENVSFHDRLREITSIVSGSVSAEVISTDAAGMIAEGEELAKIAPNITIKVPMTPEGLKAVKAFSEKGIQTNVTLVFTANQALLAARAGATYVSPFLGRLDDIGHNGLELISTIAEIFNIHGIETEIIAASIRHPHHVTEAALRGAHIATVPYKVLMQLFNHPLTDQGIEKFLADWNRQK

SEQ ID NO: 29977 - protein, 392 aa, Geobacillus kaustophilus HTA426
MGKTVIVSGARTPFGKLGGSLQALSASELGGIAVKEALARADVSVEQVDHVILGTVLQGGQGQLPSRQAMRHAGIPWHVRTETVNKVCASGMRAVTLADQLIRLGDADVVVAGGMESMSNAPYVLPKARWGLRMGDSTVKDLMVYDGLTCSFTGVHMGVYGGNTARELGITREAQDEWAYRSHMRAIAAIEAGRLAEEIVPVTIPQRKGEPLVVEHDEAPRKDTSLEALAKLPPVFDPEGTITAGNAPGVNDGAAALVLMSEERAAREGLEPLATVVAHTAIAVEAKDFPKTPGLVINELLRKTGKTVDDIALFEINEAFAAVALAAIQIAGLDPEKVNVNGGAVALGHPIGASGARIILTLIYELKRRGGGLGIAAICSGGGQGDAILVEV

SEQ ID NO: 29978 - protein, 291 aa, Geobacillus kaustophilus HTA426
MRFDEAYSGNVFIGSHPNFEESEAVIYGMPMDWTVSYRPGSRFGPARIREVSIGLEEYSPYLDRELKDIRYFDAGDIPLPFGNAARSLELIEQFVKKVLDAGKFPLGLGGEHLVSWPVIKAVHDYYPDLAVIHMDAHTDLREHYEGEPLSHATPIRKVADLIGPTNVFSFGIRSGMKEEFEWAKENGMYIAKFEVLEPLRSVLPKLAGRPVYVTIDIDVLDPAHAPGTGTVDAGGITSKELLAAIHEIARSDVHVVGADLVEVAPIYDHSEQTANTASKLVREMLLGWVAK

SEQ ID NO: 29979 - protein, 326 aa, Geobacillus kaustophilus HTA426
MTTDLFTALKAKVTGTGRKIVFPEGTDDRILTAASRLATEQVLRPIVLGDEQAIRVKAAALGLPLEGVEIVNPRRYGGFDELVSAFVERRKGKVTEETARELLFDENYFGTMLVYTGAADGLVSGAAHSTADTVRPALQIIKTKPGVRKTSGVFIMVRGDEKYVFADCAINIAPNSQDLAEIAVESARTAKMFGLKPRVALLSFSTKGSASSPETEKVVEAVRLAKEMAPDLILDGEFQFDAAFVPEVAKKKAPDSVIQGDANVFIFPSLEAGNIGYKIAQRLGGFEAVGPILQGLNKPVNDLSRGCSAEDAYKLALITAAQSLGE

SEQ ID NO: 29980 - protein, 377 aa, Geobacillus kaustophilus HTA426
MIIGVPKEIKNNENRVAITPAGVLSFVQAGHTVLIEKEAGVGSGFNDSDYARAGAQIIERAEDVWAQADMVMKVKEPLPSEYRFFRPGLVLFTYLHLAADPELTRVLKESGVIAIAYETVQVGRTLPLLTPMSEVAGRMAAQIGAQFLEKPYGGKGILLGGVPGVARGKVVIIGGGVVGTNAAKVAVGLGADVTIIDLNADRLRELDDIFGNQITTLMSNPMNIAEAVAEADLVIGAVLIPGARAPKLVTEDMVKAMKPGSVIVDVAIDQGGIVETSDHVTTHDNPTYVKHGVVHYAVANMPGAVPRTSTIALTNVTIPYALQIANKGVMQAITDNPALELGVNVANGEITYEAVARDLGYRYVPAREALGKTLAAN

SEQ ID NO: 29981 - protein, 485 aa, Geobacillus kaustophilus HTA426
MVLFSVIVYLVGMLWIGYWAYKRTSNLSDYMLGGRTLGPAVTALSAGASDMSGWLLMGLPGAMYVDGVSAAWIVIGLTLGAYANWLFVAPRLRVYTEVANDSITIPEFLENRFGDASKLLRMASGIVIMVFFTFYVSSGLVSGGVLFENSFGVSYHTGLWIVGGVVVAYTLFGGFLAVSWTDFVQGTIMFIALILVPVVTLFHTGGPVDTMETIRDIDPNLLNIWKGTSFLGIISLFAWGLGYFGQPHIIVRFMAIKSVKEMKSARRIGMGWMIFSVVGAMLTGLFGIAYFSQRGMKLDDPETVFIQLGHILFHPIITGFLLAAILAAIMSTISSQLLVTSSSLTEDLYKVVFRRAASDKELVFVGRLSVLLVAIVATALAYTKNDTILNLVGYAWAGFGASFGPVILLSLCWRRMTKWGALAGMVAGAATVILWTQSEYLKGLLYEMIPGFAASLAAIVVVSLLTKAPEGKVAEQFDQFKKSLS

SEQ ID NO: 29982 - protein, 387 aa, Idiomarina loihiensis L2TR
MKDIVIVDCIRTPMGRSKNGVFRHTRAEDLSAALMKGLLERNPEVDPEELEDIYWGCVQQTLEQGFNIARNSALIAGIPHKVAGVTVNRLCGSSMQALHDATRAIMNGDGDIFMAGGVEHMGHVPMTHGIDFHPGMNKSVAKASGSMGMTAELLSRKFGITREQQDEFGARSHRKAHEATVEGRFAKEIYAMNGHNADGELVRVTEDEVIRPETTAEGLSQLRPVFDPANGTVTAGTSSALSDGAAAMLVMSADKAKELGLTPRVKIRSMAVAGCDPSIMGYGPVPATEKALKRAGVSIDDIDVVELNEAFAAQSLPVLKGLKLFDKMEEKVNLNGGAIALGHPLGCSGARISTTLINLMEEKDAKLGLATMCIGLGQGIATVFERV

SEQ ID NO: 29983 - protein, 68 aa, Idiomarina loihiensis L2TR
MSTTTGKVKFFNEAKGFGFIEQENGADVFVHFSAIQSDGFKTLAEGQQVSFTVAQGPKGPQAENVVPM

SEQ ID NO: 29984 - protein, 252 aa, Idiomarina loihiensis L2TR
MLSIKDLHARVEETTILKGLNLEIKPGEVHAIMGPNGAGKSTLGYVLSGRDGYEVESGSVEMDGKDLLDMEVEERAQAGIFLAFQYPVEIPGVSNMEFMKESVNAMREAHGESALSSAEFLKKAKEACKQVELPLDFLKRGVNEGFSGGEKKRNEIMQMIMLEPKIAILDESDSGLDVDALQVVAKGVNSQRDGKRSFIVVTHYQRLLDYIEPDYVHILSKGKIVKSGGPELAKEVEASGYAWLAEAEGADA

SEQ ID NO: 29985 - protein, 241 aa, Idiomarina loihiensis L2TR
MMQETLKILVVDDDARLRSLLERYLTEQNFQVRVAQDSEQMDRLLTRENFNLLVLDLMLPGEDGLSICKRLRSQGNNLPVIMLTAKGDEVDRIIGLELGADDYLAKPFNPRELLARVRAVLRRRGTEAPGAPSQEDQEITFGEFRLNLGTREMFRGDTPMPLTSGEFAVLKALVNNARQPLSRDKLMHLARGRDYSALERSIDVQVSRLRRMLEVDPTKPRYIQTVWGLGYVFVPDGQLKS

SEQ ID NO: 29986 - protein, 325 aa, Idiomarina loihiensis L2TR
MKQVTQNFRLLGEQVLDIEKKAIEGLYQYLDDNFDAACQTLFNCKGRVIVTGMGKSGHIGGKIAATLASTGTPAFFVHPGEASHGDLGMVAAQDVVIAISNSGETAEVLNIIPVIKRLGVPLISMTGKPGSTLARLADTHVCIAVEQEACPLGLAPTASTTATLVMGDAMAVALLNARGFTADDFALSHPGGSLGKRLLLRLHDVMHTGERVPVIPADAIISDALLEMSRKGLGMTAIVDENQRLAGIFTDGDLRRILDNRIDVHKTPIAEVMTRSCITANEDMLAAEALKLMQDRKINGLIITNDDGQPCGAMNMHDLLQAGVL

SEQ ID NO: 29987 - protein, 384 aa, Idiomarina loihiensis L2TR
MKFVDEVEIRVDAGDGGNGCISFRREKYIPKGGPDGGDGGDGGDVYLEADENLNTLIDYRFERFHKAERGKNGMGKNCTGRRGNDIVLPVPPGTRATDIDTGEVLGDLTKHGQRLMVAKGGFHGLGNTRFKSSINRAPRQKTDGTPGEVRPLKLELMLLADVGLLGMPNAGKSTFIRSVSAARPKVADYPFTTLIPNLGVVRPAPHQSFVIADIPGLIEGAAEGAGLGIQFLKHLERCRLLLHLVDLAPFDETDPAEQARIIINELEKYSPKLAEKPRWLVINKVDLLLDEEVQEKVDELVKSLNWDGPVFQIAALEGRGSDALCREVMSYLETLPAPDTEQHEEADPVEFMWDTYHEEVLEEEMDDEDDDDDDDHDVEVIYQK

SEQ ID NO: 29988 - protein, 403 aa, Idiomarina loihiensis L2TR
MSNVKKVVLAYSGGLDTSAIVPWLKENYGCEVVAFVADVGQGAEELEGVEEKAKASGASECHVVDLKDEFVKNYVYPTLKTGAIYEGTYLLGTAMARPIIAKAQVEVARKVGADALSHGCTGKGNDQVRFESCYAALAPDLQVIAPWREWELSSRESLLGYLAERNIPCSASATKIYSRDANAWHISHEGGELEDPWCEPTEKVWTMTASPEQAPDKPEYLCVTVENGEIVAVNNQALSPFECLSVLNDVAAKHGVGRVDIVENRLVGMKSRGCYETPGGTVMMAALQAIDELVLDKVSRSWKTQLSEQFAQLLYDGRWFTPLQQSVMAAAQSLCATASGEVVLKLYKGSVTAVQKRSPHSLYSEDFATFGADEVYNQAHAEGFIRLFSLPSRIAALQKQQKG

SEQ ID NO: 29989 - protein, 375 aa, Idiomarina loihiensis L2TR
MLIGVPKEIKNHEYRIGLTPAAVREYVENGHDVIIENNGGAAIGFTNEQYMEAGATIIDTPEEIFQRADMIVKVKEPQPNECKMLREGQILYTFLHLAPDPTQTELLGKAGCTAIAYETVTDTRNGLPLLAPMSEVAGRMSIQAGAHYLEKAHGGSGTLLGGVPGVAPGKVLIIGGGVVGTNAAKMAIGLGAEVTILDRSLPRLRELDDIFAGRVQTVYSTVDAIDKYSREADLVVGAVLIPGAAAPKLLTRENISNMKPGSVLVDVAIDQGGCFETSKATTHQDPVYIIDDVVHYCVANMPGGVARTSTIALNNATLPYGIALANKGVQAMLENEHLLRGLNMHKGKITYKAIHDDLGQQLGLDYQDPREALQA

SEQ ID NO: 29990 - protein, 71 aa, Idiomarina loihiensis L2TR
MATGKVKWFNNSKGFGFIESEDREGDIFAHYSTIEMEGYRTLKAGQPVEFELEEGPKGLHANNIVPGAADK

SEQ ID NO: 29991 - protein, 326 aa, Idiomarina loihiensis L2TR
MKSQYMLQQQKIQFVKAGFTQQLQLQLGLIEVQSPLLSELGSGVQDDLSGWEKAVAVKVKAVPDKDYEVVHSLAKWKRYTLGRYGFGAGEGIVTQMKALRPDEEALSSVHSVYVDQWDWEKVITEEQRSLAFLIQTVERIYAALRQTEQQYIEQHGGTGTLPEKIQVVHAEDLITAYPDLTAKQRERKVVKQHGAVFLVGIGGELSHGHAHDVRAPDYDDWSSVNEQGSTGLNGDILVWHPVLDDALELSSMGIRVDQQALKRQLAISQQEEKLKLPWHQSLLAGELPLTIGGGIGQSRVVMQILQSDHIAKVQCGVWPEPIAEAL

SEQ ID NO: 29992 - protein, 510 aa, Idiomarina loihiensis L2TR
METGTLISLALYFIVMLGIGLYAYKKSTDSVSGYMLGGRGLGPAVTALSAGASDMSGWMLMGLPGAIYVSGVSQLWIAVGLVIGAFLNYVIVAPRLRTYTEVANDSITIPGYFSNRFNDKGRRLRIFSSVVIIIFFTLYTSASLVAGGKLFDSSFGMDYTTGLWVTAGVVCAYTLFGGFLAVSMTDFVQGCIMFVALVLVPIVAFVDLGGYSSVVGQVNDIDTNFLDFFYNVDKGEAIGFLGIVSLLAWGLGYFGQPHIIVRFMAIRSVSDVKAARRIGVSWMVVSIIGAMATGFVGIAYVATQPMGIADAETIFIEFSQVLFHPLIGGFLLAAILAAIMSTISSQLLVSSSSLTEDFYKAFLRKDASERELVMVGRLSVLVVTLVAIYLAYGETETVLALVSKAWAGFGAAFGPVVILSLFWKRMNRNGALAGMLTGAITVLLWIFSPILFGIDLSDEVVYEMVPGFILSTLAIIIFSKLTDEPAQELQDKFVEMESVIDGYYHGDKKG

SEQ ID NO: 29993 - protein, 305 aa, Idiomarina loihiensis L2TR
MTLDIELDENKHSGFVAIVGRPNVGKSTLINRLLGQKISITSNKPQTTRHRILGVDTDDGCQAIYVDTPGMHKQEPRAINRVMNQTASSALKDVDLVLFVVENLKWLEDDKMVLEKIQRSKVPVVLLVNKVDQLKDKERLLPHLQWLNEQHKFDAILPISATHGDNVDELRKIVRSHLQPGYHYYPEDYVTDRSVRFMAAEIVREKLMRFTGDELPYETTVEIEQFGQSEKGTTHIHALILVEREAQKRMIIGQGGSKLKTIGTEARRDLEKLLDNKVMMKLWVKVKSGWSDDERALKSLGYRED

SEQ ID NO: 29994 - protein, 298 aa, Idiomarina loihiensis L2TR
MATVGFIGLGNMGGPMASNLAKAGHKVKAFDLSEEALKAIVADGAQAAKTAAEAIDGAEFVVSMLPADRHVKGVYLGDDGLINKLNKDQLVIDCSTISSETAMYVGEQLEKAGIAFIDAPVSGGVGGAKAGTLTFICGGTETNVDRARSVLNDMGKNVFRAGDVGAGQIAKICNNMLLSVLMVGTSEALQLGKANGLDPKVLSEIMLASSGSNWTLQVYNPCPGVMDNVPSSNDYQGGFLVDLMAKDLGLAQQTALESGAATPMGSLTRNLYHSWSEQGHGRQDFSSIFNYVAPKSQK

SEQ ID NO: 29995 - protein, 393 aa, Idiomarina loihiensis L2TR
MSSDSIVIVAANRTPMGGFQGSLSEVTAPNLGATAIKAALNNSGLAADDISEVIMGNVLPAGLGQAPARQAMLHADLPRSTGATTINKVCGSGLKAAMMAHDLIKAGSADVVLAGGMESMSNAPYMLPKGRSGYRMGHGQVLDHMMLDGLEDAYEHKAMGCYAQDTADEYGLGREAMDEFAIHSLTKAQAAIKDGFFKDEITPVTYSTRKGDVTVDTDEQPGKARLDKIPQLRAAFKKDGTITAANSSSISDGAAALILMRESDAKAKGLQPLARVMGHTTHSQAPSEFTVAPIGAMNSLLSKLDWTKDDVDLWEINEAFAMVTMLAIQQMKLDPAKVNVHGGACALGHPIGASGARLLVTLLHALKQKGQKRGITSLCIGGGEAVALAVEMI

SEQ ID NO: 29996 - protein, 312 aa, Idiomarina loihiensis L2TR
MKLFAGNATPELAQKIADRLYIKLGEASVGRFSDGEISVAINENVRGSDVFILQSTCAPTNDNLMELIVMVDALRRASAGRITAVMPYFGYARQDRRVRSARVPITAKVVADFLSSVGVDRVLTVDLHAEQIQGFFDVPVDNVFGTPVLLEHMRQQNFDHPVVVSPDIGGVVRARAFAKLMDDTDLAIIDKRRPSANVSQVMHIIGDVKGRDCIIVDDMIDTGGTLCKAAEALKSHGAKRVFAYATHPVFSGNAVQNIKDSEIDEFIVTDSVPLSDAMKATGKVTQLTLSGMLSEALRRVSNEESISAMFDY

SEQ ID NO: 29997 - protein, 648 aa, Idiomarina loihiensis L2TR
MSDMAKNLILWLVIAVVLMSVFQSFSPSGTSSSTMVYSEFVSQVNNGNIRRAEFGDDGRTISGMTRNGQSYKTVVPTQYDPKILDDLLANDVETQGTPPEEQSILASIFISWFPMLLLIGVWIFFMRQMQGGGGRGAMSFGKSKAKLMNEEQSKTTFKDVAGCDEAKEEVSELVDYLKDPSKFQRLGGKIPKGVLMVGPPGTGKTLLAKAISGEAKVPFFSISGSDFVEMFVGVGASRVRDMFEQAKKSAPCIIFIDELDAVGRQRGAGLGGGHDEREQTLNQMLVEMDGFEGNEGIIVIAATNRPDVLDPALLRPGRFDRQVIVGLPDVRGREQILKVHMRKVPLGDDVKPSVIARGTPGFSGADLANLVNEAALFAARGDKRVVSMEEFDKAKDKIMMGAERRSMVMTDDEKAMTAYHEAGHAIVGRLVPEHDPVYKVSIIPRGRALGVTMYLPEQDRVSHSKQHLESMISSLFGGRLAEAIIYGNDKVTTGASNDIERATEIARKMVTQWGLSEKMGPLLYAEDENEVFLGRSVTQHKHMSDDTARAIDEEVKSVIDRNYQRAKKLLEENEDILHSMKDALVRYETIDADQIDDLMNRRDVRQPKDWDDRDSGGNDSDGGAAKAENTEERPDRPINVDKPGDATS

SEQ ID NO: 29998 - protein, 642 aa, Idiomarina loihiensis L2TR
MGKTIGIDLGTTNSCVAVLDGGKARVIENGEGDRTTPSVVAFTDDGEILVGSPAKRQAVTNPNKTLFAIKRLIGRRFQDEEVQRDIGIMPYKIVKADNGDAWVEIDGDKKAPPQISAEVLKKMKKTAEEFLGEKVTDAVITVPAYFNDAQRQATKDAGKIAGLNVKRIINEPTAAALAYGMDKKSGDNVIAVYDLGGGTFDISIIEIDEVEGEHTFEVLATNGDTHLGGEDFDNRLINYLVEQFQKDQGMDLRKDPLAMQRLKEAAEKAKIELSSAQQTEVNLPYITADNAGPKHMAIKVTRAKLESLVEDLIKKSLEPLKQALADADLSVSDIQDIIMVGGQTRMPKVQAAVTDFFGKEPRRDVNPDEAVAVGAAVQAGVLQGDVKDVLLLDVCPLSLGIETMGGVMTKLIEKNTTIPTKESQTFSTAEDNQSAVTIHVIQGERKRAGDNKSLGQFNLEGIRAAARGVPQIEVTFDIDADGILHVSAKDKDTGKEQKITIKASSGLDESEVDKMVKDAEAHAEEDKKFEEMVQARNQADGLVHATRNQLKEVGDALSQEDKDAIEKACEELEQASKDGDKEAIDAKSQALMEASQKLMEAAQQQQAQQGAEGAAGGEQQSSKADDDVVDAEFEEVKDDDKK

SEQ ID NO: 29999 - protein, 705 aa, Idiomarina loihiensis L2TR
MKPVDIQTNANELYLDCNATTPVLPEIIQAVSHTMETVFGNPSSSHITGLKARYILDTTRQLARKIVGLPSGRLIFTSGATEGIQTAVVSAINAAMQVAPDKRKKYLLYGATEHKAVPQALAHWNQLLGLKAELVAIPVDKQGLLDNQFIAEHVKDAAMICTMAVNNETGVIQNLKQLEETIRQHSPDVPWMVDCVQVLGKKALNLDETTIDYAPFSGHKLYGPKGIGFMAVRDSAPYTPLIIGGGQESGLRSGTENLPGIAALNALFELMLDGSNRRFHSEAKLQDYRSQLVGALRSAFPSIVFNHDFELSVPTTLNFSVEGVASRDIMDVFDACQIRVSSGSACSSKVTKSFVLDAMGLEEWRSGSAIRLSFGPATRQEEITEACVRIKQAADALRNSCLIVADTNNDNDAQLDGVVQLKYDDHCCYLVIDKQAKEIAVIDPHPALAGRIENIVSCQHYRVKAVVSTSADSITSQSIELLLPILMPDQSIDEYDVFGWPHSAADSCDAVPVECEGSVIGCVSIGERRLFRVGSRNPVYVLSESATLKSRVASDFLFTGAEAASSAYECFIGENTLICPGQDSEHHIVYTPCELNGDCRVDDGVNIPVGDTDEFWHRDDLLIVDVRERQEHVLSDIPCNAEVVNVPLTEVIQFIHSNSHLRERDIICLCRSGNRSQVVANVLKRHGFNSRHLLGGLALLSSPAA

SEQ ID NO: 30000 - protein, 408 aa, Idiomarina loihiensis L2TR
MQEIYLGVGMFTIIVLVLVAIIMFAKSKLVPQGDVEILINDDEDKKIVTQPGTKLLGALANAGIFVSSACGGGGSCGQCRVTVKEGGGDILPTELDHITKREAREGCRLSCQVNVKQDMEIELPEEVFGIRKWDCTVKSNDNVATFIKEFIVQLPEGEEVPFRAGGFIQIEAPPHHVKYKDFDISEEYHGDWDRFGFFDVESKVDEEVVRAYSMANYPEEKGIIMLNVRIATPPPNDLSLPAGKMSSYIFSLKPGDKVTISGPFGEFFAKDTDAEMVFIGGGAGMAPMRSHLFDQMRRIKTDRKVSFWYGARSKKEMFYVEDFDMLAEENENFDWHVALSDPQPEDNWEGDTGFIHNVLYERYLKDHDAPEDCEFYMCGPPVMNAAVINLLKDLGVEDENIMLDDFGG

SEQ ID NO: 30001 - protein, 1488 aa, Idiomarina loihiensis L2TR
MGLYDPADVRDNCGFGLIADINGEAQQGLISTAVKALDRMQHRGGIGADGKTGDGCGLLLQMPEQFFRQYAETQGWQLSKKFAVGMVFFSRDKDKRESARHLIEQELQRETLAVTGWRKVPVNNQVLGEGAKSSEPVIEQVLVSAPPGWRKKDLERRLYMARRRVEKLMPNQDELYISSLSSLVLVYKGLMMAADLPAYYTDLADAEMKTSICVFHQRFSTNTEPRWPLAQPFRFLAHNGEINTIRGNRQWTQARAYKFQTPLLPDLQDAKPLVGLSGSDSASLDNMLELLLAGGMDLFRAMRLLIPPAWQGDATMSDDMRAFYEFNSLHMEPWDGPAGVVMSNGRHVACSLDRNGLRPARYVLTRSGILTIASEVGIWDYDEQEVIEKGRLGPGQMMAVDTYTGKIWYNDQIEEELKQRHPYKQWLEQHRRHLIPFERSHADKLGKRLYDDETMLVFHKAYLYSEEEIQQIISVLAKDGQEAVGSMGDDTPTAVLSKQPRLLYDYFRQQFAQVTNPAIDPIRERHVMSLSTIIGREHNVFNEASGDADRVVFESPILMYTDLKQLRELDEQHYRATTLSLGFKPEQQNLQQAIDSLVEQAKTAVKDEQTVILVLSDRDLQREQLTIPAAMAVGAVQQVLVKNDLRCDSNIIIETASARDPHHMAVLIGLGATAVYPYLAYETVEQLVARGKVTLDIKEALLNYRKGLNKGLLKILSKMGIATVAGYRGSSLFEAVGLNEDVRRLCFENVPARIDGTGFDDIQQDLQQSFHRAWLTRKKLAQGGLLKYVHGGEYHAYNPDVVTSLQRAVATGEQRDYDVYAKFVNERPVTHLRDLLSIKLPEKAKIKKEKVEAKELLFQRFDTAAMSIGALSAEAHEALAIAMNTIGGHSNSGEGGEDPKRFNNAKNSRIKQVASGRFGVTPHYLVNADIIQIKVAQGAKPGEGGQLPGEKVTAEIAQLRYAVAGTTLISPPPHHDIYSIEDLAQLIFDLKQVNPKALVSVKLVSTPGIGTIATGVAKAYADLITVSGYDGGTGASPMTSVKYAGSPWELGLVEVHEALVANNLRHKIRLQVDGGLKTGMDIVKAAILGAESFGFGTAPMIALGCKYLRICHLNNCATGVATQDETLRREHFSGLPERVVKLFEFMAEEVRDILAQLGLEKLTDAIGRVDLLERLTGETKRQQQLQLNALLHSAGVRSEHSLYCTEKNPPFDQGQLNQRLLELCKESIYKRSGGHWSLTIRNYDRSVAASVSGYIASQHGNQGMAVAPITLGFIGTAGQSFGAWNAGGLKLHLTGDANDYVGKGMAGGEITIKPPAGCRYNTHEAVIMGNTCLYGATGGKLYAAGCTGERFAVRNSGATAVVEGIGDHGCEYMTGGIVVVLGECGINFGAGMTGGFAYLRDSDGDLHRRLNHELVEAVAVDTPIIQEHLRGLIHEHHEATGSHYSRELLNNFGQVVDSFYIVKPKAADVKELLGHRARSTAELRVQVM

SEQ ID NO: 30002 - protein, 857 aa, Idiomarina loihiensis L2TR
MRHDKFTSKFQMAIADAQSIALGRDHQFIEPVHLMQALLDQNGGSVRPLFTMLGVDIPQFRANLSKALDALPQVEGTGGDVQLSQNTAQLLNLCDKYAQKRNDSYISSELFLLAAAEDKGKLGDIFRQQGIKRDALEKAINDIRDGEKVDDPNAEDKRQALDKYTIDLTERAEQGKLDPVIGRDEEIRRTIQVLQRRTKNNPVLIGDPGVGKTAIVEGLAQRIVNGEVPEGLKHKRVLSLDLGALLAGAKFRGEFEERLKAVLTELSKEEGRIILFIDEMHTMVGAGKADGAMDAGNMLKPALARGELHCVGATTLDEYRQYIEKDAALERRFQKVLVEEPNVEDTIAILRGLKERYELHHSVEITDPAIVAAASLSHRYISDRKLPDKAIDLIDEAASSIRMQIDSKPEDLDRLERRIIQLKLERQALQKEKDDASKKRLEILHDELDEQERKYEELEEVWNTEKAAVQGTQHIKAQLEQARTDMDIARRAGDLNRMSELQYGRIPELERQLDLALQAEMQDMSLLKNRVTEEEIADVLSRWTGIPVNRMLEGEREKLLHMEEQIHSRVVGQNEAVEAVSNAIRRSRAGLGDPNRPIGSFLFLGPTGVGKTELSKALANFMFDTDHAMVRIDMSEFMEKHSVARLVGAPPGYVGYEEGGYLTEAVRRKPYSVILLDEIEKAHPDVFNILLQVLDDGRLTDGQGRTVDFKNTVIIMTSNLGSDLIQEHAKEHTYEQMKAEVMEVLAHHFRPEFINRVDETVVFHPLGESEIRSIAQFQLQLLYKRLEDKDYQLELDDKALSHLARTGFDPVFGARPLKRAIQHELENPLAQKILSGELEPAKPIKVSVENERLVITQ

SEQ ID NO: 30003 - protein, 453 aa, Idiomarina loihiensis L2TR
MVERQVLVVEDDVSLREAIIDTLELADCQCLEAANGEEALLILKKESVALVISDVQMPGIDGLQLLRSMNNQQYDIPVIMMTAFAKVDDAVVAMREGAVDYLTKPFSIEKLQTLVQRYLPDGAINDIEPVAEEDSSQAVLAMARKVAASEASVMVTGPSGTGKEVLARYIHQHSDRSDGPFIAINCAAIPENMLESMLFGYEKGAFTGANQSSPGKFELAQGGTLLLDEVTEMAMHLQAKLLRVIQERQVERLGSRKTIQLDVRLIATSNRDLQQAVREGLLREDLMYRLNVFPLHWKSLRERPADIVPLAENLLQRHKQRSGIKTPVNFSAAAEQQLMRYSWPGNVRELENVVQRALVLHRDGEIQPQDLMLELNDIAETVSVFPEQVDTPEEKSENLDESLFHQEYQIIKEALQRHQGKRQPVADELGISPRTLRYKLAKIREQGLTLTGS

SEQ ID NO: 30004 - protein, 304 aa, Idiomarina loihiensis L2TR
MPLTPLPVPLNDPSRPFFGSQYSTDIHPGHTHILGFGFDGTACFRKGTREGPDGLRAVSEDIESYSPYLDADLEDQTFYDLGNLRLGFDDDEEKQWHHAVHDFNAIFDSLDLAKEQIKLLTLGGEHSISYAPIVKYLKQYPDMVLLHLDAHADLRDGFLGYHYSHASIIRRSVDHFGPGHELIQYGIRSGTRDEYQWMKEHKTIRSSRKDFLDSVEAIAKDRPVYLTLDLDYFDPSFLPGTGTPEPGGEDFHSFVSLMKLLRKKNLVGADVVELSPQIDPTGNSDVFAAKIVRELLLVLQQSGA

SEQ ID NO: 30005 - protein, 548 aa, Idiomarina loihiensis L2TR
MIRFIQWLHRWVSLILVIQVALWLVSGFFFSITGHHGMSGHQYMVSENSKPPLKKLATQVDFTEMYQRFPSAHLIELVSVAGVGQYQVTLADGNVLYFNANTNENWSTGEALATQLALSSYNGPGHVEAVERVMGSDEVNGWEASGFRIDIKDDLNTRIYIDEASSQVVEHRNTPWTIADWAFRLHFMDYTGGRSFNHLLIWSAGLFALWFSLSGLILLGRNITNGDFNPNRKKTWLEYFQQKGKPIASSCGGGGTCGLCKVTLQGSDIPSPKAAEKALLSANELDAGMRLSCQHRTSTNYEVKLHNEGVSDIALTLDSKRQLTPSIMELTFVSSEPVNYEAGQFMQFRIPHLNEILSRHYSVATRPHPTRFVFNVRQLPSPSEGVPPGIGSNYLCNLEPGAHVDAIGPFGDFQLTKQNNHTQVFIGGGAGIAPLRALIQSELAADSPRRCIFFYGARYEKELCYRDEFERDERLNYIPVLSEVAKSDEWAGHTGFVHETAMKWLAGKNKETLDIYVCGPPPMLEATLKSLADFGIPRERIKFDDFGI

SEQ ID NO: 30006 - protein, 436 aa, Idiomarina loihiensis L2TR
MAEHNHEHGHQDYQKSSLSLWGAVSLGTGVMIGAGIFALTGQVAQLAREWFVLAFVCGGIIAGFSAYSYVKLAKAYPSAGGIAMFLSKAYGKGSVTAIFALLMYFSMVINESLVARTFASYTSQLISFEAQWLIPLLAVGLLVFAFFINILSNQFIQTFSFFMAFVKTLGLVILAAGGLWASGIQFESISAIPEEATGGGILAGIALSILAYKGFTTITNSGGEIVEPKRNVGRAIIISLIICALIYVLVTLAVGSSLSIDEIVKAKDYALSEAARPVYGETGLWVTVAFAIVATVSGVIASAFAVSRMLAMLTNMKLVPHSHFGMPGSIQKHTLVYTIVMAMILAAFFDLSRIASLGAIFYIVMDIAIHWGVLRHLRQKVNANIYILVSAITLDVIVLVAFIWVKWTSDPLVIWASLIGMALIAAGEILFLRKKR

SEQ ID NO: 30007 - protein, 289 aa, Idiomarina loihiensis L2TR
MSKQCAFIGLGVMGYPMAGHLQKAGHKVTVYNRTQATAEKWAKEYSGHCQPTPAEAVKEADFVMVCVGNDDDVRSVFYGDDGILANLKPGAVVVDHTTASAELARELEQAVNEKQGSFLDAPVSGGQAGAENGVLTAMIGGEQQTFEAADELFQCYAKTRQLMGPVGSGQLAKMVNQICIAGVLQGLSEGLQLARKVGLDPDKLIAAISQGAAGSWQMENRYKTMWNNHYEHGFAVDWMRKDLKIALAEADRQGLSLPATALVDQFYADVQKMGGSRWDTSSLLARLEK

SEQ ID NO: 30008 - protein, 564 aa, Idiomarina loihiensis L2TR
MNKKEEEVLRGDKDLERERKADDPMIPDGEVNPIDTDYQVGQDNVVMKVGPFGLDFHNRVFAISGLAIVAFVVITLMFQNQAEPVFTSTKNWLTANLDWFFIGAANIFVLLCLFLIVSPLGNVRLGGTEATPDFSYLGWFSMLFAAGMGIGLMFYGVSEPITHFSAAFGGTEFNADGIRTDSAPLGGAGGDQAAAIKLGMAATIFHWALHPWAIYAVLALGLALFSFNKGLPLTIRSIFYPILGERVWGWPGHIIDIIAILATLFGLATSLGLGASQAAAGLNFLFGWAEGDTTDVLLVMGITAIALISVLAGLEKGVQRLSQVNMSLAAILMLFVIIVGPTVAIFTGFAENLYNYIVNLPALSNPVGREDLGYSQGWTSFYWAWWIAWSPFVGMFIARVSRGRTVREFLISVLLIPSLACVFWMTVFGTAAIEQFVAGAEQIASEKLSLKLFIMLGGLPWTEVTSFVGIILVMVFFITSSDSGSLVIDTISAGGKVEAPVPQRIFWCTFEGLVAIALILGGGLVALQAMSLSLGLPFTIVLLASCFAVVQGLRSEPRVGKPAK

SEQ ID NO: 30009 - protein, 446 aa, Idiomarina loihiensis L2TR
MTFTVAKFGGTSVADYASMLRCAEIIQSNSSIRLVVVSACAGVTNRLVAIADLQGRQIEKLLNEIYEIHFAIQKRLKNASQVQKSLEQLHHKLALHCQKTTEDQASWRDELLSFGERCSSLLFSSLLVEQGLCSSTLDARQLLKTNSDFGRAQPDEVTTKSHCLEQKQKLESGCVRVTQGFIGSDENNQTTTLGRGGSDYSAALLAAGFNATDLQIWTDVAGIYTTDPRICPSARAIAEMSFSEAAELATFGAKILHPSSLAPAIKNDIRVFIGNSQDALSGGTYISASPTSRPDVRAIALRRDQTLVTVHSLNMLHASGFLARLFEILARYNVSVDLVTTSEVSIALTLDEGGSAANGQALLPAAALEELEQFCRVEVETGLSLVAIIGNGIGRDAHISQLTFNTVNDYAVRLICQGASEHNLCFLVADNEGENVIRTLHDRILR

SEQ ID NO: 30010 - protein, 561 aa, Idiomarina loihiensis L2TR
MADTDSRPSNFIRQIIDKDLASGKHATVHTRFPPEPNGYLHIGHAKSIVLNFGIAEDYNGTCNLRFDDTNPLKEKVDYVNSIKKDVEWLGYHWEGEPRYSSNYFDQLHGFAVELIEKGLAYVDFSSQDKMREMRGTLKEPGVNSPYRDTSVEENLKHFADMTAGKHEEGTAALRAKIDMSSPFMCMRDPVIYRVRFVHHHQTGDKWCVYPMYDFTHCISDALEGITHSLCTLEFQDNRRLYDWVLDNISIDCHPQQIEFSRLNLQYTVMSKRIINTLVDENKVSGWDDPRIASIAGLRRRGYTPDSVREFCRRIGVTKMDNQVEMSMLEACIRDDLNVNAPRAMAVMDPVKIVIENYPEGEQELLDAPNHPNDPEMGSRQVTFSREIWIEREDFRESANKKFKRLVLDKEVRLRNAYVIRADRIETDDNGEIQTIYCHYDADTLGKDPADGRKVKGVIHWVSAETAKAAEFRVYDRLFQVPNPAAEEDLFSTLNPESLVIKKGFVEANLASAKLGENFQFERLGYYCLDQDAETEGRLIFNQTVGLRDSWAKIEQEQTTGS

SEQ ID NO: 30011 - protein, 372 aa, Idiomarina loihiensis L2TR
MNFSDLALSPETLTALSRQGYSESTPIQAEAIPLVLAGKDVMAAAQTGTGKTTAFTAPLLELLKSNERAKANTARVLILTPTRELAAQVGENVANLSAGLPLNYAVAFGGVKINPQMMKLRKGVDILVATPGRLLDLYKQNAVRFPKLEVLVLDEADRMLDMGFIHDIKNIIKLLPAKRQTLLFSATFSDDIRALAKGLLKSPVEISVALPNATAEPIEQTLYEVQKSQKLGLLLKLLKSLDLPQVLVFSRTKQGANRLVKQLDKAGFSAAAIHSAKSQGARTKALADFKSAKVQMLIATDIASRGIDIEKLPYVINYDLPHVAEDYIHRIGRTGRAGQTGHAISLVTDEDVAALKAIEELIGETIEQCKLE

SEQ ID NO: 30012 - protein, 582 aa, Idiomarina loihiensis L2TR
MDSQLKKKTTFKRLLGYIKPYKAAFIAAILCMIGYSAIDTLFLSQIETLIDDGLTEQDSNILLYGALFVPFIFILRGSLNVASSYFLHWVGFKVVTKMRQQLFDHMMKLPVGFHDQHSTGDLISKITYDTQQVAEASSRAVLVLVKEGAFVAGLLGLMFYQSWQLSLVFLVIGPLVAKVVGVVSRRFRKVSSRIQTAMGNVTTTAEQMINGHKVVIMHQGQKGESTRFSEINNITRNQNMKLVNTRAISTSVIQFIASLSLSMVLVIASFPEMLGELSAGAFTTLLTAMIMLLRPLKQLTNVNSDFQRGIAAATSVFAILDEPIEVDKGSRVVDRAAGDIVFDDVTFSYQKDDEPALEHINFKVDQGKTVALVGRSGSGKSTISNLLTRFYDVEQGSILLDGHNINDYKLKCLRRQFALVSQHVTLFNDTIANNIAYGASKDVSRENIIKAAEQAYVTEFTDSMPKGLDTMVGENGVMLSGGQRQRIAIARALLQDAPILILDEATSALDTESERHIQDALGTLRKNRTAIVIAHRLSTIENADEILVMDNGEIIERGTHQQLLDQEGAYFQLHNLQFSGSA

SEQ ID NO: 30013 - protein, 671 aa, Idiomarina loihiensis L2TR
MCGIAGVFHHQTERAIEPQTLVNMAAIMHHRGPDGFGYEVQQDYGVGFSHARLSIIDLDEKRGRQPFISADKRLMLTHNGEFYDFKRIRADLTARGARFNSKSDSEIVLHLFERYGLEDTLKELRGEFAFGLFDAKDESLYLVRDRFGIKPLYWTETEHGVVFGSELKVLFAHPDVKREFSAEGLYHQLIQVMVPGSTAFEGINQVQPGYVVKLQRKNGKVVATEHKYWDVDFPPEESYPGADVDEESYIEGVRAKLLEAVQHRMTADVPVGCYLSGGIDSCAILGLASASTQTSVKAFTIGFDSADYDETPIAEEMAAATKADHHIMRLKADDLYDHFVKTLWHTERTIYNTLGVAKYLMSKEVHEAGYKVVMTGEGSDELFAGYPAFRKDMFLHGLDHLPEVERVEWQELLEKNNKLFKGAMLAREEFVSEAFNQKMGFTPSCVQPWLSCSSVALPLMSENKRKQVEGYDPSLAIANTLDKDMLDGRHPLDRAQYVWIKTMLEGQILTWGGDRVDMANSMEARPAFLDHHLAEYAFTVPPHLRIKGNKEKYVLREAMKGLLPETLYKREKFAFMAPPAHTDPEKWKAVEKLAEQFLNAEAVKSAGLLDYDEVVRTFERHQDENVPNEERVQLDAVINHMLGVQVLHHHFVATDVPAQAQQRATELGWTA

SEQ ID NO: 30014 - protein, 416 aa, Idiomarina loihiensis L2TR
MSTEQNPSSFQSLGLSDDILRAVTECGYTTPTPIQQQAIPTVMAGHDLLAAAQTGTGKTAGFTLPLLHKLSQTKTDGKPVIKALILTPTRELAAQVEDNLNTYAKYTGLKSLVIFGGVGINPQISALRRGVDILVATPGRLLDHSRQGTVDLSKIDVLILDEADRMLDMGFIHDIKKVMKLIPEKRQTLLFSATFSSEIKALSQQFMQQPKLIEVARQNAAADTIEQRVYPVDKKRKRELLSYLIGSRNWRQVLVFTRTKHGANRLATQLTDDGLPAMAIHGNKSQGARTKALAQFKAGKLRVLVATDIAARGIDIDELPHVINFELPQVAEDYVHRIGRTGRAGSEGEAASLVCVDEHKLLRDIEKLTKNEIPREVIPGFEPDPSIKPEPIQKPRTGRPQNSRRAPRQKRPDTRR

SEQ ID NO: 30015 - protein, 204 aa, Idiomarina loihiensis L2TR
MTINTRADFIRRFSLYPSPPVERRIDEPLRKRLRPAAVLIPIIERPHGLSLILTRRSSKLRKHAGQISFPGGRFDETDSDLLDTALRETEEEIGLPRSQVEVIGRLHDYPVLSYFMIRPYVAFVSPQQPLVAEESEVAEIFEVPLADILDHGNHYVYRIRKFIYDRVYFIPWQHRNIWGATAGILRELSEQLQPDGKNHFRPLN

SEQ ID NO: 30016 - protein, 395 aa, Idiomarina loihiensis L2TR
MDYQLSDRINAIQPSPTLAVTQKANELRQQGKDVIGLGVGEPDFDTPDFIKEAAIQAIRDGKTKYTAVDGIDELKDAVIKKLQRDNNLSYERKEIIVSAGGKHSIFNLLSAWLNPGDEVIIPAPYWVSYPDMTKLVGAEPVIVKAGIDQRFKITPEQLREALTDKTRLMFINSPSNPAGTAYTADELKALAEVLRDYPKVLIATDDMYEHILWSDSAFANFPMVAPDLKDRTVILTGVSKAYAMTGWRIGYAAGPKPIIAAMKKMQSQSTSNPTSISQYAAAAALNGDQSCIDTMVSAFKERHDYLVDALNSIDGVNCVPGDGTFYAFAQVDELMAKAKVSSDVELCEKLLTEANVALVPGSAFGTDGYCRLSFATSMDVLKEAVKRIKDFSESL

SEQ ID NO: 30017 - protein, 112 aa, Idiomarina loihiensis L2TR
METVDRIKQQIEENPILLYMKGSPKLPSCGFSSQASQALMGCGQAFAYVDILQNPDIRAELPKYANWPTFPQLWVEGELVGGCDIIMEMFQNGELQELVSEVAERHPEPSAE

SEQ ID NO: 30018 - protein, 358 aa, Idiomarina loihiensis L2TR
MSQKPILFIDRDGTLVEEPVTDKQLDSLEKLVFEPNVVPALLKLQQAGYQLVMVSNQDGLGTDSFPQADFDAPHNLMMAVFESQGIRFEDVLICPHFDSDNCSCRKPALGLVKSYLKEGRVDFTNSYVIGDRETDLQLAENMGIEGLRYSRSELNWDAIVHQLLDNPRTASVTRTTRETDINIKVDLDSQTPREFNTGIGFFDHMLEQIATHAGFSLSVKVKGDLHIDDHHTIEDTALALGQALRSALGDKRGIGRFGFALPMDECRAECLIDLSGRPYLKWEADFTRDKVGELSTEMVEHFFRSLTDAMAMSLHLSTTEGNTHHQVESLFKVFGRALRQAITKTGDQQLPSSKGMLA

SEQ ID NO: 30019 - protein, 594 aa, Idiomarina loihiensis L2TR
MSNTQTGLSFNDMALPSAVLEQLNAMQFLTPTPIQLQAIPALLEGQDVLGEAQTGTGKTAAFGLPALAKIDASVKQTQVLVVTPTRELAIQVAEALEGFAAKMRGVGVATVYGGAPFGPQVKALKQGTAIVVGTPGRLIDLLNKNVLQLDGLKVGVLDEADEMLNMGFIEDIETILKAVPNTAQRALFSATMPNAIRKLAKTFLKDPLNIQIEAIAREKATIKQKAWKVQGMTKMTALTRLLEVTPYQRALIFVRTRQDTMDVAELLQRNGFKAAPLSGDLNQAQREQTVSQLRSGHIEILVGTDVVARGLDVPEITHVINYDLPSDTESYVHRIGRTGRAGRTGEAILFFRAKERHLLRHYERLTNAPVEFFEVPNANELSKYRQQQLLEKLQASLAPETASADKPKLEKLLGEWLEQSELSAEEIALALLAQHNEQRPLFLKEDRPVREARNERSERSGRNERSDRGDKRKPRAERGGRAADVDFETYKIQVGREHGARPGDIVGAIANEASMDSKYIGQIQLFDNHSLVQLPKGMPKDIMHVLKKARVRQQPMGLELSDEQVKRAPRPPRDRDARGGPKRNSGKGAARRFS

SEQ ID NO: 30020 - protein, 385 aa, Idiomarina loihiensis L2TR
MSKLPLYFDYAATTPVDPVVAEKMMGCLTQDGLFGNPASRSHKYGWQAEEAVDIARNQVADLINADAREIVFTSGATESDNLAIKGAAQYYSDKGKHVITLKTEHKAVLDTCAQLEKEGFEVTYLDVGTDGLLDMDLFRSALREDTVLVSVMLVNNEIGVLQDITTIGQLCRENGTIFHVDAAQAAGKLPMNMVTLPVDLMSLSAHKMYGPKGIGALYVRRTPRVRLLAQMHGGGHERGMRSGTLPTHQIVGMGVAAELALNELELEPARIENLRQRLWKGVSQLEGVTLNGSDQQRVPHITNISFAGVDGELLLMALKDLALSSGSACTSASVEPSYVLRALGVEHELAMSSLRFSIGRYTSEADIDSAVELIHRTIGTLRGAA

SEQ ID NO: 30021 - protein, 408 aa, Idiomarina loihiensis L2TR
MQISLAKDKIKVLLLEGVHESAIQLFRHHGYHNLEILQTSLSEDELCEKIKDAHILGIRSRSQLNDRVFAAAEKLIAVGCFCIGTNQVDLEAAKKHGVIVFNAPFSNTRSVAELVLAEIIMLLRGIPEKNAVAHEGGWLKSAKQSYEARGKILGIVGYGHIGSQLSVLAEQLGMHIRYFDIEDKLPMGNAQSVATLDDLLAQSDIITLHVPENEQTQWMIGRRQIERMKPGSLLINASRGTVVDIDALAEALSSRHLAGAAIDVFPVEPKGNSDEFLSPLRGLKNCLLTPHIGGSTLEAQENIGVEVAGKLVRYSDNGSTLSAVNFPEVSLPTHATAQRLLHIHKNQPGMLNAINRIISDNEINVVGQYLQTDENVGYVVMDIDSDNGADVLQQLKDIPGTIRARRLF

SEQ ID NO: 30022 - protein, 393 aa, Idiomarina loihiensis L2TR
MEAQNLQQLTFAVDTLYLLISGALVMWMAAGFSMLEAGLVRSKNTTEILTKNIVLYAIACIVYLVIGYKVMYPDPSTSAYAADANFFFQMVFVATAMSIVSGAVAERMKLMSFLLFCVVLSAVIYPVQGLWTWGGGMLTEWGFVDFAGSSIVHLTGASAALAAVLLLGPRSGKYLSDGSINALPGSNMPLAALGTFILWFGWFGFNGGSQLALSTVDDANAIARAMVNTNTSAAAGTIATLLFTKLLWKKADLTMILNGALAGLVAITAQPVTPEPWLAGVIGFIAGLIVVLSIIGLDKLHIDDPVGAISVHGVVGIFGTLVVPLSDDGASFVIQLAGVGTIFCWVFFSSLIVWAILKLILGIRVTKEQEYIGLDQVDCGVEAYPEFTSKKDG

SEQ ID NO: 30023 - protein, 680 aa, Idiomarina loihiensis L2TR
MSAEKQKWHSAILLPVFLPAVIVIALLVIGTLSAPEKAGELFDWTLAGITDNFGWFYMLAVALFLMFIIGVAVSSWGKIKLGPDHCEPEYSFTSWFAMLFSAGYGIALLFFGVSEPILHYAEPPAGAAETVSSAKQAMQIAYFHWGFHIWAIYGLVGLVLAYFSFRHGLPLSMRSTLYPLIGDRINGPIGHTVDTFAILGTMFGIATTLGLSVIQINAGLNYLWEDIPVGKTVQVISIGVITLAAIASVVAGMDKGIKRLSLINITLVIFLLLFVFAVGPTIHILETFLQNTGAYISGIVERTFNLQAYERSDWIGNWTLFIFGWTIAWAPFVGLFIAKISRGRTIRQFVFGVMLVPTIFTFFWFAVFGDTALNMIMNEGYTTLISEVQDNQAVALFKLYENLPMTSVLSFLTVLLIITFFVTSSDSGSLVIDSLSSGGMMETPVWQRVFWASTEGIVASVLLVAGGLGALQTAAITSALPFAIIILISAAGMWRALIIEGHQSKSLQSHRHSHRRGVNEGADYWKKRLAGLVDFPNKESVLKFINGPATESMKKVRDELKDQDWPAEFRADEEHNRIILSVERKGDLEFAYEIRLKDYLLPEYALTNDEGREVYYRAEVFLRQGGQSYNLYGYEQTDIINDVINQFENYLHFRHNSPGVLPWDLEKHDEDLNEDLESQK

SEQ ID NO: 30024 - protein, 406 aa, Idiomarina loihiensis L2TR
MSQQLVRSTSLAGAIVLGLGSILGTGAFVSVGIGADIAGGAVLWAILIAAVTALCNGLSSAQLASAHSVSGGTYEYGYRFLTPAYGVTAGSLFVVAKSASAATAALAVGWYVTNVTAIPEYLAQWIAAAVLVLFTLLVLGGVKRTNWVNAAIVTVSIVALLAFIITGHQQTAVVERASVEWWHVLQAAALLFVAYTGYGRIATMGEEVQNPRQVIPLAVILTLAVVTLLYLGVGSALLHFPSIADFQAEHFSLASLLPTGPIQWLVTAGAVVAMGGVILNLILGVSRVVLAMGRRADLPMRFANLNDQQTSAPPATWLTCFVMLVLVAIGDIKTAWSFSAFTVLVYYGITNLAALKVTKSDRFVPKWVSILGLVSCLGLAVFVPWQVLLSGLIFIVVVLLIHQLRR

SEQ ID NO: 30025 - protein, 813 aa, Idiomarina loihiensis L2TR
MTTTQLTEEQKQAVADSVQVHKFGGSSLADAFCYRRVARIVTEYAGASDLVVVSAAGDTTNRILAIINAKAQPGDTASILLDQLESFQQGLITELLSGNLQQQLLQQSQQDFARWRRWLACDETISHNAELLSYGELWSARLLSALLQKQGTRADHIDARDFLLAADAPEPVIQVEHSREKLLQRVAPHSGTRFIVTGFIARGLHGESLTLGRNGSDYSATLVGSLLDTRQVTIWKDVAGVYSADPRKVERVVSLPTLDWTEAEELARLGSPVLHPRTFQPVDRQRMVISVRSSLKVENQQTRIGQFQNTQPRGKVFTSLSEVVLFKVELHDKALVKRLDELELEPLVSWTEPENHQQYLVFHQNHLDYLTGWLDSLGAGDAITQIRGYSMLAIVGNRIQETDQFSTFKLQLSEQKVRRFALTQNGDSAVAILEQKLDNRLLNRLHSQLFNYRRSLGVLVIGRGNIGTAWLELFRQQRDRINQVMDVRVMGIANSRRLWLDYNGVELTQWAEDFDRLARPYVLTELLRELPNAPYDELVVIDLTDAKQVAQLYPSLFANGLHIISANKRAGSADEALYREIRTIQHEYKREWLYNTTVGAGLPLNYAINDLRNSGDEIRSISGIFSGTMSWLFENFTKGVTFSSLVKEAKERGYSEPDPREDLSCQDLVRKLLILAREIGLKLDWQDIEVKSLVPEHLRDLPLSEFMQRLSELDEPMTAMLDEAAKDGKVPRLLASFTVSDEQRVTAQVGIEYIPEGDMLANLIPGENIFVIYTDWYSEMPLVISGPGAGKHVTAGGVQSDLNQLLSKLAVGA

SEQ ID NO: 30026 - protein, 290 aa, Idiomarina loihiensis L2TR
MKKNRAFLKWAGGKYSLIEPITARLPQGKKLIEPFVGAGSVFLNTDYDSYLLNDINQDLITLYQFVKRRPKTFIQDARKLFVDRNNQADAYYALRAAFNASSDPYFRSLLFLYMNRHGYNGLCRYNSKGIFNVPFGDYRKPYFPEKELEHFAEKARKAKFICRPFEQVFRRARQGDVIYCDPPYAPLDQTSNFTSYATGGFGLTDQDELARRAVQVAKKRHIPVLISNHDTDLTRALYKHADISSLSVSRSISQKGDGRKPVAELLALYDSEVNKSNVVSLSNSLKKVGT

SEQ ID NO: 30027 - protein, 69 aa, Idiomarina loihiensis L2TR
MSEKITGSVKWFNEAKGFGFIERENGADVFAHFSAISSDGFKTLTEGQRVEFAVTQGPKGPQAENIVAL

SEQ ID NO: 30028 - protein, 503 aa, Idiomarina loihiensis L2TR
MSGNVFSTDSLLTLAQWLAAIFVLAIITLVISIGVMYVVDKTQNKHTIRHNYPVVGRFRYLFERMGEFMRQYFFAMDREEMPFNRAQRSWVYRAAKNADRNVAFGSTRDLSRTGTIIFSNAPYPPMAEQATSPEPVIIGPYCQKPYSPVSYFHVSGMSYGALSPVAVKSLSQGAAKAGCWLNTGEGGLSPYHLMGHCDIVFQMGTAKFGVRDKEGRLDEDRLAELGRHDNVKMFEIKLSQGAKPGKGGILPGIKVNKEIAQIRGLVEGEDAISPNRHPEISNNEELLDFIEKVRKITGKPTGFKFVMGDPSWIDELVDCILTRGEEYAPDFITLDSADGGTGAAPQPLMDYVGLRVTESLPMLIDKLTEAGLHGRIRVVVSGKMITPADVAWAIAMGVDFVTSARGFMFSLGCIQAMQCNKNTCPTGVTTDDPKLMRGLDPEDKSVRVANYHKYMEYGVNIIAHSCGVTDPRRLNRRHARVIKPDGESISLAERYPLPPARRR

SEQ ID NO: 30029 - protein, 552 aa, Idiomarina loihiensis L2TR
MKASDLFVKALENEGVKYIFGIPGEENLDLLESLSKSSIELILTRHEQGAGFMAATYGRLTGKPGVCLSTLGPGATNLVTPVAYAQLGAMPMVVITGQKPIKERHQGQFQIIDVVDMMTPITKYTQAIISASSIPAHIREAFRRAEDERPGASHLELSDDISREEVSSLPIEASHSRRPITEHKSVRHVLELLREAKHPVLLIGAAANRKITAKMLRAFVDKTGIPFITTQMGKGVINEDHPRWLGNAAVSDGDYPHRAIEKSDLILNVGHDVVEKPPFMMKTGDNDNRKVVHINFQGAQVDSVYFPHASMIGDIGNSIWQLKEGIEPQSHWDFNFMLKVRDHMRDHTDEGAHDGSFPVLPQRLVEDVREAMPDDGVIALDNGIYKIWFARNYPARQPNTVLLDNALASMGAGLPSAMAAKLVNPEKKVMAICGDGGFMMNSQELETAVRMGLDIVVVILNDSGYGMIKWKQQHMKLSDYGLDFNNPDFVKYAESYGANGYRLDKTENLIPLLKDCLNKPGVHLIDVPVNYSQNDRLLNEEIPERSRAIKDI

SEQ ID NO: 30030 - protein, 530 aa, Idiomarina loihiensis L2TR
MVETAPGTKAPENVTSTQSSNNAENSDVPSGSSAVSADVPESDQPVVAQRAETTVHVRTDVLDVEIDTRGGDVVSTHLLKFAKTQGSEERFQLLQNSSNNVYVAQSGLIGPDGIDGKDGRPSYNYEQESYESTSEVIEVPLTYTAENGAVYRKVFTFTPGKYTVDVRYEVENNTSKTLETQFYGQLKRSVHSGESGSMIMPTYFGAAYSYDEDKFEKYDFDSMQDKKLNVTSQTGWVGMLEHYFVSAWVPKQGQQNRLYSRVANGSQAIIGVIYPMTDIQPGSSKTIESQVFLGPKDQDAMAEVVEYLDLTVDYGFLWWLAQPIFKLLQFLQSIVINWGLAIILTTVIVKALLFPLTKAQYVSMAKMRMLQPKMTALRERYGDDRQKMSGAMMKLYKEEKVNPLGGCLPMLLQLPIFLALYWVLLESVELRHSAFVFWIQDLSTKDPYYILPILMGASMFLMQRLQPTPTADPMQQKLFQYMPVIFTVFFLWFPSGLVLYWLVSNLITIAQMLIIYRGLEKKGINVRNKK

SEQ ID NO: 30031 - protein, 407 aa, Azoarcus sp. EbN1
MALIVQKYGGTSVGNPERIKNVARKVAKFQAQGHKVVVVVSAMSGETNRLIALTKEVATHPDARELDVVVSTGEQVTIGLLCMALHDIGVKAKSYTGGQVRILTDSAHTKARILNIDEAPIKKDLDEGNIVVVAGFQGVDEHGNITTLGRGGSDTTGVALAAALKADECQIYTDVDGVYTTDPRVVPEARKLDTITFEEMLELASLGSKVLQIRSVEFAGKYKVKLRVLSSFQEEGEGTLITVEEDQNMEQPVISGIAFTRDEAKLTVLGVPDKPGIAYQILGPVADANIDVDMIIQNIGHDGTTDFSFTIPRGELDKTAKVLEGVKAHIGARAIEADKAMAKVSVVGVGMRSHPGVASKMFRTLAEEGINIQMISTSEIKISVVIEDKYLELAVRVLHKAFGLESA

SEQ ID NO: 30032 - protein, 753 aa, Azoarcus sp. EbN1
MLIATDLDGTFLAGHPEARLRLYQLINAHPEIKLVFVTGRGLEVVLPLLSDPSIPTPDYIVCDVGATVVDGRTLQPVQPLQAGIDALWPGERVVAAAMASFVGIERQEVPQQRRCSYFCAPGTVGSDLRGIAAELGCDMLYSAERYLDILPRGVNKGSTLDALVRLLEIDRDAVLVAGDTLNDLSMYERGFVGVCVGESEAALLDATRERAHVLHARHPGCGGILEAIAHFGFLGPAGVEAELRETDTPGRSELVMVYHRLPYEEVFENGRITRAAPSSPNGIIPTLLSYFSDGRPGAWIAWSMHDPKKAIPFEVHTTVDRERYPHLVAARVPLTKDDIDIFYKRFSKEAFWPTLHTFWERAQFREDDWHVYLKVNRLFAERAAAEAAEGAVVWLHDYNLWMVPAVLRELRPDVKIAFFHHTYFPSADVFNVLPWRREIIGSLLQCDYIGFHIPRQAENFVDVARGVAPLTVLERRNCAPRYLTYGCAVGLDEVTTAIEVHGRRIGLGAHPVGLDVERVRKILDQPSTRKRMAELRADLVDTRVILSVERLDYTKGTLEKLLAFERLLDAHPELQGKVSLMAVCVPAAKEMTIYDALQTQIEQAVGRINGRFSRVSWTPVQFFFRALPFEEVVAWYAMADVMWITPLRDGLNLVAKEYVATQGMIEGRGVLVLSEFAGAAAELHGAVLTNPHDLADLAARLYQAIAMNDAEAEARLRELFAIVEHNDIHRWGRNFLEAVTTPVGEDSLAGTGC

SEQ ID NO: 30033 - protein, 103 aa, Azoarcus sp. EbN1
MYAVIKTGGKQYRVAAGEKIKVEQIPADVGSEITIDQVFMVGEGESVKIGTPVVSGATVTATVVSHGRHDKIKIFKMRRRKHYQKHQGHRQNYTELRIEAISA

SEQ ID NO: 30034 - protein, 404 aa, Azoarcus sp. EbN1
MKFIDEARIEVMAGDGGNGSASFRREKFIPRGGPDGGDGGRGGSIYALADRNLNTLVDYRFTRMHRAQRGENGGNKDCYGKGGEDIVLRMPVGTVITDLETGELVADLDEDGKQAIVARGGKGGLGNLHFKSSVNRAPRKRTMGEEGERRALRLELKVLADVGLLGMPNAGKSTFIRAVSAAKPKVADYPFTTLAPNLGVVRTDQNRSFVIADIPGLIEGAAEGHGLGHQFLRHLQRTRVLLHLVDLAPFDPDADPVRDAKAIVEELRKYDESLYNKPRWLALNKLDLIPEDERAARVAAFLEAYGPVERHFEISALTGDGCRKLVFAIQDFLDAGRAQAEAEKAARTHAEALAAAEAEARVEAAYQARLQALLAEGETGTGDDGRDGNENDPADEQDTNRPNH

SEQ ID NO: 30035 - protein, 109 aa, Azoarcus sp. EbN1
MDTQEVIREQVTTNPVVLYMKGTPQFPQCGFSSTAVQILKNSGVPKFFSVNVLENDEIRNGIKQFANWPTIPQLYVNGEFVGGCDIMREMYENGELQEVLKSAGATQQG

SEQ ID NO: 30036 - protein, 376 aa, Azoarcus sp. EbN1
MECARCGGRLARLLYFAASICTAGPAVRRRFSGCLVRQSVTASNPMNPVPPALPDETRCVALARRVLHIEAAAVAALAERLGADFERAVQLILQRRGRVIVTGIGKSGHIARKLAATLASTGTPAYFVHAAEAAHGDLGMITAEDVVIALSNSGASEELLTIVPLVKRQGAKLISMTGKPDSPLAREADVHLDAAVSEEACPLNLAPTASTTAALALGDALAVALLDARGFGADDFARSHPGGSLGRRLLTHVSDVMRGADRVPQVPETVPMTSALLEMTRGGMGMTAVVDARGAPIGIFTDGDLRRALERGCDARTAALAEVMTRAPRSIDPDALAVEAAEIMERLRISQLLVVDADGTLAGALTTHDLMLAKVI

SEQ ID NO: 30037 - protein, 177 aa, Azoarcus sp. EbN1
MKLIILDRDGVINYDSDQFIKSPDEWKPIPGSLEAIARLNQWGWRVVIASNQSGIGRGLFGMDTLNAINEKMVRSLAQVGGRLDAIFFCPHAADSTCNCRKPKPGLFLQIADRFNVTLAGVPSVGDSLRDLQAGLEVGCKPYLVLTGKGLKTRDDPALPEGTLIYPDLATAVADLTA

SEQ ID NO: 30038 - protein, 398 aa, Azoarcus sp. EbN1
MSETLPVIVAGGGIGGLAAALALVRQGFSVKVLEQAAEIGEIGAGIQLGPNAFHAFDALGVGDKARARAVYTDEMVMHDALDESLVGRIPTEEAFRKRFGNPYAVIHRVDVHLSLLEGAQETGRVEFLTSTRAERVEQNEHGVTVFDQHGNAHRGIALIGADGVKSAVRAQYVNDPPRVTGHVVYRAVIDKKDFPENLQWNAASIWVGPNCHLVHYPLRGGEQYNVVVTFHSRQQEEWGVTEGSREEVQSYFQGICPKARQLIDLPKSWKRWATADREPIGQWSFGRVTLLGDAAHPTTQYMAQGACMALEDAVTLGEALRVHDNDFVRAFELYQRSRVARTARIVLSSREMGRIYHAKGVERLVRNDLWKGRTPERFYDAMEWLYGWNVDNCLAAAA

SEQ ID NO: 30039 - protein, 316 aa, Azoarcus sp. EbN1
MAYGSLMVFTGNANPKLAADVVRRLGISIGAATVGRFSDGEVNIELLENVRGKDIFVLQPTCSPTNENLMELLVLVDALKRASAGRITAAIPYFGYARQDRRPRSARVPITAKVVANMLQAVGVQRLLTMDLHADQIQGFFDIAVDNVYAAPVLLADLDKQKYDDLLVVSPDVGGVVRARAFAKRMECDLAIIDKRRPKANVSEVMNIIGEVKDRTCVIMDDIVDTAGTLCKAATALKANGARRVLSYCTHAVLSGSAAARIADSDLDELVVTDTIPLRDDAKACPRIRQVSVASLLADTVLRISNEESVSSLFME

SEQ ID NO: 30040 - protein, 121 aa, Azoarcus sp. EbN1
MTIKKILVVDDSPTERFALTELLSARGYQVVTAENGEDAIAKSKSEMPDLILMDVVMPGINGYQATRMIARSESTRSIPIIICTSKGLETDRIWGMRQGAHDYLVKPVDGAELLVRIQALG

SEQ ID NO: 30041 - protein, 402 aa, Azoarcus sp. EbN1
MLDAYIYAGLRSPIGRHAGKLAAVRPDDLVATVIREVLARSPFQGADVEDVILGCAAQGGEDSRNVARHAALLAGLPVTVAGQTINRLCGSGLAAVLDSARAVTCGEGDLYVAGGVESMSRAPFVVAKAESAYSRDFKVFDTTIGARFPNPRLVEEYGNDSMPETGDNVAAEFGITRDAADRFAAASQAKYAAAKEAGFYAGEILPISVPTGRKTPPLVVAEDEHPRPGSTYESLAKLKPLFADGVVTAGNASGINDGAAALIVGSRAAGERAGAAPMARILGGAVAGVEPRIMGVGPAYAIPKALARAGLTLKDMDVIELNEAFASQVLSCLKLLDVAFDDPRVNPNGGAIAIGHPLGASGARIALSAARELERRGGRYAVVSLCIGVGHGIALVIERVPT

SEQ ID NO: 30042 - protein, 470 aa, Azoarcus sp. EbN1
MMQIATQFIQNRVFDEIQVGDRAELVRTLRPDDIHLFAIMSGDVNPTHVDTEYARSSQFREVVGHSMWGSTLISTVLGTEFPGPGTVYVSQGLNFWRPITIGDTLTITVTCREKFEHNHHIVFDCLALNQEGLKVIDGIAEVQAPTEKVKRPRITLPEVTISDRELRYGHLLSITAGMAPIPIAVAHPCDPESLRGPLQAAAAGLVVPVLVGPEAKIHAVAEQEGLDLKGFRIVNVPHSHAAAETAVALARDGVVEALMKGSLHTDELMSAVLSKVGGLRTARRVSHVFMADVPTYPRPLLITDAAINIEPTLEDKADIIQNAIDLAQVLGLVEPKVAILSAVETVTSKLRSTIDAAALCKMADRGQIRGGLLDGPLAFDNAISLIAAKTKGINSLVAGSADILVVPDLESGNMVAKQLEYLADALMAGVVLGARVPIVLTSRADTAKTRTASCAIVQLMAHKKREARLV

SEQ ID NO: 30043 - protein, 394 aa, Azoarcus sp. EbN1
MKAILIINAGSSSVKFALYATQPELAAKPALWGQIEGIGATPMLSAQDAAGLRYREPVHTAGGQAEQHRDALNHLFAWLAANNPALDIVAAGHRIVHGGELHSAPVRLDELVLRELDGFVPLAPLHQPHNLRAVRAVAVMLPGIPQVGCFDTAFHRSQPPLAQAFALPRAITARGVKRYGFHGLSYDYVARQLPEVLGARASGAVLIAHLGNGASMCALRDGKSVASTMGFTTVDGLMMGTRTGSLDPGVLLYLMEQQDMDAKALTNLLYKESGLLGVSGISQDMRTLLASPAREAKEAVDLFCYRIAREIGSLAAAAGGLDALVFTGGIGEHAAPVRAQVAELSAWLGVKIDAQANAAHATRIDAADSRVAVAVVPTNEERMIARYTAEVLKL

SEQ ID NO: 30044 - protein, 561 aa, Azoarcus sp. EbN1
MYRYDDYDQQLLDERVVQFRDQMRRHLAGELSDDEFRPVRLQNGLYIQRHAPMYRISVPYGHLASRQLRKLAYLARTYDRGYAHFTTRTNVQFNWSPLEAIPDMLAELASVQMHSNQTSGNDIRNITADAFAGVAADEIVDPRPWAEILRQWATYNPEFAYLPRKFKIALNGATEDRVVVRIYDIGLDLKRDADGNIGFRVLVGGGLGRTPILGEEIAGFVPWQHLVTYCESILRVYNRHGRRDNVWKARIKILVKALGAEEFARQVEEEWAHVKDGPNTLTEAEVQRVAAHFVDPDYETLPGRNALYEAQLADSKPFAAWVKRNVRAHKVPGYASVTLSLKKTGVPTGDITAEQMELVADWADRFSFGEARMTHEQNIVLADVKLSDLHTLWQLAREAGLATPNIGLLTDIICCPGGDFCALANAKSIPIAEAIQQRFDDLDYLYDIGDIDINISGCMNACGQHHVGNIGILGVDKNGEEWYQVTIGGCQGNATALGKVIGPSFARAQMADVVEKLIETYIEYRHEDERFVDTVHRLGIEPFKQRVYGGEVQKQRKVAHA

SEQ ID NO: 30045 - protein, 416 aa, Azoarcus sp. EbN1
MNAPVEHAIAKQHLIDPEICIRCNTCEETCPIDAITHDNLNYVVNFDICNGCLACVPPCPTGAIDSWRNVERAKPYSLEEQFKWDVLPDTTELDNVDAPFAVARPDDELPAEVQHITEVATAGQGGPALAPWSASHPYVNLYAPTRPITATVTGNYRLTDADASSDIHHVVLDFGSTPFPVLEGQSIGIIPPGTDDKGRPHLLRMYSVASPRNGERPHYNNLALTVKRVTEDHEGKAARGVASNYVCDLKKGDKVQVTGPYGSTYLMPNHPASSIMMICTGTGSAPMRAMTERRRRRIAQNEGGELVLFFGARAPSELPYFGPLQKLPKDFIDINFAFSRVPGEPKKYVQDSIRERADKVFRMLNDDNCYIYICGLKGMESGVLEAFRDICRANGADWEALQPKLLANARFHVETY

SEQ ID NO: 30046 - protein, 402 aa, Azoarcus sp. EbN1
MTRPVYICDAIRTPFGRYGGTLSGVRADDLAALPIKALVERNPGVDWQAVDDVLYGCANQAGEDNRNVARMAALLAGLPVEVPGSTINRLCGSSLDAIGMAARAIRSGETELMIAGGVESMSRAPFVLGKADSAFSRSAKIEDTTIGWRFVNPLMKAQYGIDSMPETAENVATDFGVSRADQDAFALRSQQRWAAAAERGFFEREIVKVEVPRKKGEPLVLAADEHPRPDTTLATLAKLKGVVRPDGSVTAGNASGVNDGACALLLASEAAVKRHGLTPRARVLGSAAAGVAPRIMGIGPAPATLKLLARLGMSVRDFDTIELNEAFAAQGLAVLRQLGLPDDGANVNPNGGAIAIGHPLGASGARLVTTALNQLETTGGRFGLATMCIGVGQGIALAIERV

SEQ ID NO: 30047 - protein, 550 aa, Azoarcus sp. EbN1
MDQRRLVLFLVFSLSLVMLWNAWLKQSQPAPTAVTATAGVEGAGVPTPTTGVAPGATTAVPGVPGAATASTAPRMVVRTDLMVAEVSAQGGDIVRLELAQHKATADKTKNFVLFDDGTIHLYAAQSGLIGEDLPTHKTTFALPQGEQVLKEGEDRLVVRLEAPEQDGVKVTKVMTFHRGNYLVDVAYEIVNSSERTLSPHAYYQLTRDGKPAESVEAFGVTTFTGPAFYTDAEKFQKVQFEEIAEGKAKFVKKASDGWIAMVQHYFVSAWLPQGGTEREFFAQKVGNDLYSAGVIVPVAAIQPGQSGRVEASLYAGPQEQDKLEDIAPGLDLVVDYGWLTVIAAPLFWVLSWIHGVVGNWGWAIIIVTILIKLMFFPLSAASYKSMAKMRVLGPRMQRLKELYGNDKAKMQQEMMEMYRKEKINPLGGCLPILVQIPVFISLYWVLLGSVEMRQAPWLGWIQDLSAKDPYFILPVIMGVSMLIQMKLNPTPPDPIQAKVMMAMPVIFTFMFLWFPSGLVLYWVVNNILSIAQQWQITRMIESEKSGAKPA

SEQ ID NO: 30048 - protein, 450 aa, Azoarcus sp. EbN1
MKKLYALLPAALALGLAGGSALAQEAATAVAPAVEAAAAAPIVEKGDVAWIMTSTLLVLFMALPGLALFYGGLVRSKNMLSVLMQVMVVFSLIAVLWVFYGYSLAFTEGAPFIGSLDKLFLSGVTIDTLADTFTDNVKLPEFAFVAFQATFAGITGALVVGAFAERMKFSAVLIFSVIWFTLCYLPICHMVWGPGGMLLDDGALDFAGGTVVHINAGVAGLVGAYMVGKRIGFGREALTPHSLTLTMVGASMLWVGWFGFNAGSNLEATSGAALAFINTLVATAAAVLAWSLGEALFKGRPSMLGAASGAVAGLVAITPACGSVGPMGAIVIGLLAGFVCLWGVNGLKRMLGADDALDVFGVHGVGGILGAILTGVFTAPSLGGTGAEDFSIAGQVWIQTYSVLITIAWSAVVAVIAYKVADILVGLRVPEEEERQGLDVSAHGETAYHH

SEQ ID NO: 30049 - protein, 366 aa, Azoarcus sp. EbN1
MNELASAVPWLGSRNPQAARWLIVIVAIAAPLVAVLFGRTWVRVLDFALLYVMLALGLNLVVGFAGLLDLGYIAFYAVGAYTAAFLASPHFGVHLPFWIVLPVAAGFAALAGIMLGFPVLRLRGDYLAIVTLGFGEIVRIFLNNLNYPVNITNGPQGINALDPLVLFGWDLSRNLEITENLSINSLFLYYYFFLACVAGSIVFIQRLQVSRVGRAWAAMRDDELAAKAIGINTRNLKLLAFSLGATFGGVAGELFGAFQGFVSPESFSLMESIAVLTMVVFGGMGNVAGAIAGALILSALPEILRHLAVPVQQTLFGTVLLDPEVLRMLLLSLAMILMMLLKPAGLIPANARYSHVEHLKRHGVSR

SEQ ID NO: 30050 - protein, 313 aa, Azoarcus sp. EbN1
MNDALRIFSCNANRTLADEICKRLGLQQSPLEISRFSNDNLRVQVQDNVRERDVFVVQPFTEPVSEHIMELLITIDALRSASAGRVTAVIPYYSYARSDKKDAPRISITGRLIADMLATAGANRVLTMDLHADQVHGFFSVPVDHLTAVPTIAEHFRQNHDLSRMVAVATDAGGAKRVGRFSERLGIPMAIIDKRRVSDTDVKQGRVVGEVAGRDAVIFEDEISTGGTLLATIDTLRAAGARSIHAGAAHGVLCGPAIHRLRDASIESIVVTDTVHMPPHKRLDKITQLTVAPLFAAAIERIHSGESVGALFE

SEQ ID NO: 30051 - protein, 67 aa, Azoarcus sp. EbN1
MATGTVKWFNDSKGFGFITPDNGGEDLFAHFSAIQGSGFKSLTEGQKVQYDETSGPKGKQAGNIRPL

SEQ ID NO: 30052 - protein, 359 aa, Azoarcus sp. EbN1
MTPRTPKFHPLKVTEVRRETPESVSLCFEVPAELADDYRFVQGQHLNLKVRVGDEEMRRSYSICAGVDDEELRVAIKKIAGGAFSTWVNDNGIKVGDVLDVMTPEGRFHTPLDPVHAKHYVAFAAGSGITPILSLIKTTLRAEPKSRFTLVYGNRRQGSVMFAEALEDLKNRYLSRFTLYNLFSREEQEVPLFNGRLDAARVAAFLDTLIPVDTIDEAFICGPGGMIDEVEAALHKGGVAHEHIHLERFGVPASAPEHHVEPGDAAQAKVTVIADGLRREMEFRAEDTSILDVALAAGMDLPYSCKGGVCCTCRAKVIEGKVRMDKNFTLEQPDIDAGYILTCQAHPLTERVVITFDER

SEQ ID NO: 30053 - protein, 463 aa, Azoarcus sp. EbN1
MTFQELGLHEALLQAIATTGYTVPTSVQEQAIPAALAGADLMVSSHTGSGKTAAFTLPSLHRLIDRKPAPGAGPRVLVLTPTRELAQQVEKAVKTYARNLRYLNTACLVGGAPFFAQAKLLSRPVDVVVATPGRLIDHLNRRKLKLSDIEVLVLDEADRMLDMGFVEDIETIVAATPASRQTLLFSATLDGVVGNLARKMTRNPQRIEIAATVENRANIEQRLLMADNIVHKNRLLESLLGGDDLQQAVVFTATKRGAEEVSLNLQEKGFSAAALHGDMHQTARNRTLDKLRQGRIGVLVATDVAARGIDVAGISHVINFDAPRQVEDYVHRIGRTGRAGRDGIAITFSGPREMGIIRAIERFTGKPLAVHVIEGLEPTQRPSSPRRAPSGGKPGFGGRSGGSSYGRESRDSRPGAGKGWSSESPSGNRGGYGRDGGAGRSEGSRFGGDRPEGARRPRPTARG

SEQ ID NO: 30054 - protein, 377 aa, Azoarcus sp. EbN1
MLIGVPREIKVHEYRVGLTPASVREVVAHGHEVIVERDAGRGIGAGDDDYRRAGARIEDDAAALYAAAELIVKVKEPQPAERVRLGAGQVLFAYLHLAPDPQQASDLLASGVTAIAYETVSDVDGGLPLLAPMSEVAGRMSVQAGAHCLEKEAGGRGLLLGGVPGVEPARVVILGGGVVGSNAALIALGIGAAVTIVDRSVAVLRRLGDRFGPQLHTLHASTDAIEAAVLDADLVIGAVLVPGGAAPKLVTRDMVRRMRPGAVVVDVAIDQGGCFETSRPTTHADPIFIVDEIVHYCVANMPGAVARTSTLALNAATLPCVLALADKGWRQALRDDPHLARGLNICAGRVMHPGVAEALGVEPGNAHDLAAVPPMSP

SEQ ID NO: 30055 - protein, 396 aa, Azoarcus sp. EbN1
MNDPVVIVSAARTPLGGFQGDLSALSGPQLGAVAIRAAVERAGVNAEAVQEVLMGCVLPAGVGQAPARQAALGAGLPLSAGCTTVSKVCGSGMKSVMLAHDLLVAGTNDVMVAGGMESMSNAPYLLPKARGGYRLGHGQVLDHMFLDGLEDSYSKENKGRLMGTFAEDCAAHFDFTRAAQDEFAVASTTRAQKAIQDGSFAWEVAPVTVTGRKGDVVVDKDEQPPKAQIDKIAGLKPAFRKDGSVTAANSSSISDGAAALVLMRRSTADRLGLKPLATIVGHATHAQDPAWFTTAPVGAMQKVLAKAGWSKDDVDLWEINEAFAVVTMAAMKELELPHDKVNVHGGACALGHPIGASGARIIVTLLGALKQYDKKRGVASLCIGGGEATAVAVELA

SEQ ID NO: 30056 - protein, 508 aa, Azoarcus sp. EbN1
MTSEANFAGLGLAEPLLRAISESGYTTPTPIQAQAIPLVLAGGDLLAAAQTGTGKTAGFTLPVLHRLSAAPAANPKAGRPRCLILTPTRELAAQVEESVRTYGKHLPTTSMVMFGGVGINPQIQALKKRVDILVATPGRLLDHVGQKTLDLSGVEILILDEADRMLDMGFIRDIRKILALLPKQRQNLLFSATFSDEIRSLANGLLHNPGCVEVARRNTASELVQQSVYSVAQKQKRDLLVHLVKQNDWHQVLVFTRTKHGANKLAEYLAKHGIPSAAIHGNKSQSARTRALAEFKDGSLPVLVATDIAARGLDIDQLPHVVNFELPNVPEDYVHRIGRTGRAGSSGAAVSFVDSEERQHLTAIERLIKRTIDREALPAFAIAPVDPNESDARPPRQPRQPSRHNNANAPRQARTDRPAGRQATPPSPSRAPVRSRDADNFGNRAPRSEVEAKRGHPDADGNRALRNAGPNGAPRSSDSARAAPRPDGNRRPQSRPALFNAKTDDRNR

SEQ ID NO: 30057 - protein, 385 aa, Azoarcus sp. EbN1
MPTFPARIDSRLPQVGTTIFTVMSRLAQECGAINLSQGFPDFNADDVLFERVAHWMRAGFNQYAPLAGVAPLREAIAHKVAALYGTAYDAETEITVTAGATQALFTAVAALVHPGDEVIVFEPVYDSYAPAIELQGGRVVRLQLAAPDYRPDWDAVAAAITPRTRMIMINSPHNPTATVWSADDLAHLAALTRGTGIVIVSDEVYEHIVFDGTRHESCARDAELAARSVIVSSFGKTYHITGWKVGYVVAPRELMAEFRKVHQFNVFTVNTPVQLALADYMADASRHEGLAAFYQAKRDFFRTALGGSRFELLPSAGTYFQLARYRAICDEPDTAFVERLTRDSGVAAIPVSAFFADGRDERVIRFCFAKNEATLAAACERLCRV

SEQ ID NO: 30058 - protein, 601 aa, Azoarcus sp. EbN1
MHRSDAAPASSIRIYFRLLSYVRPYVGLFAVSILGYVIFASSQPMLAGVLKYFVDGLTHPDAALVTGVPLLDGMELMHGVPLMIVLIAAWQGLGGYLGNYFLARVSLGLVHDLRQTLFDSLLRLPNTYFDQHSSGHLISRITFNVTMVTGAATDAIKIVIREGLTVVFLFAYLLWMNWRLTLVMVAILPLISLMVRNASGKFRKQSRKIQVAMGDVTHVASETIQGYRVVRSFGGEHYERERFRAASEDNTRKQLKMVKTSAVYTPTLQLVTYSAMAVVLFLVLRLRGEASVGDLVAYITAAGLLPKPIRQLSEVSSTIQRGVAGAESIFEQLDDKPEVDHGRIERERVSGRIEVRDLSFRYPGSDREVLDSVSFTVEPGQMIALVGRSGSGKSTLANLIPRFYHHDRGQILIDGVDVEDYTLKNLRRHIALVTQQVTLFNDTVANNIAYGDLAGLPRAAVEAAAEAGYAKEFIDRLPQGFDTLIGENGVTLSGGQRQRLAIARALLKNAPILILDEATSALDTESERHIQAALHRVMQARTTLVIAHRLSTIEQADVIMVMDHGRIVERGSHAELLAAGGHYARLHAMQFREEPAVAEGR

SEQ ID NO: 30059 - protein, 758 aa, Azoarcus sp. EbN1
MDELIRSAALDYHRYPQPGKISVTPTKVLSNQRDLSLAYSPGVAAACDAIVEDPAEAATLTARSNLIGVVTNGTAVLGLGNIGPLAAKPVMEGKGVLFKKFAGIDVFDLEIAEKDADKLIDMIAALEPTFGGINLEDIKAPECFYIESKLRERMKIPVFHDDQHGTAIVVGAAVLNGLHLLGKDLKKIKLVTSGAGAAALACLRLLEKLGIPVENIWVTDIEGVVYEGRTALMDPIKARYAKPTPARTLAEIIEGADVLLGLSAGGVVKREMVAKMAPKPLILALANPIPEILPEEVQAVRDDAIIATGRSDYPNQVNNVLCFPFIFRGALDVGATTITDEMQLAAVKAIAELARAEQSDIVAAAYGEKVSGFGPEYIIPRPFDPRLIVKIAPAVAIAGMASGVATRPITDWDAYRGQLNNFVWHSGLIMKPVFAAARGTGQRIIFSEGESERVLRAVQTVVDEGLASPILIGRPDVVATNIERFGLRIRAEHDFELVNPDSDPRFKELWMDYHRLMERHGVSVDYAKKEVRRRTTLIGSLMLKHGYGDGMICGTYGMHRLHLEFIEKIIGRKPGVENCYALNVVSLPGRTMFLADTYVNYDPTPEQIVEMTLLAAEEMSRFGLTPKVALLSHSSFGSADSPTSEKMRAALQLLHERHPDIEVEGEMHGDAALDAELRLRIFPNSRMREPANLLIFPTLDAANIAFNLLKTAAGEGMTIGPILLGAAKPAHILTPSATVRRIINMTALTAVEAAQGRS

SEQ ID NO: 30060 - protein, 577 aa, Azoarcus sp. EbN1
MNPNTPKDGAASTPSNFIRNLIDEDNRSGKWDGRVETRFPPEPNGYLHYGHAKSICLNFGLAQSYGGACHLRFDDTNPEKEEQEYVDSIIEAVRWLGFNWGEHLYFASDYFDRMYACAEYLITSGRAYVESLSAEEMRAYRGTLTEAGRESPYRSRSVEENLDLFRRMRAGEFTDGQHILRAKVDMASPNLNLRDPAIYRIRRATHHRTGDAWCIYPMYTFAHPIEDAIEGITHSLCTLEFEDQRPFYDWLLDALATGGFFPRPLPQQIEFARLNLTYVVLSKRKLIQLVDEHHVDGWDDPRLPTLVGARRRGFTAAGFRLFAERIGVTKSDTWIDVSVLEECMREDLNDAAERRVAVLDPLKLVITNYPEGHSEQCEAPNHPLKPELGKRPMPFSGELWIEREDFMETPAKGFRRLYPGNMARLRYGYVVKCTGCEKDADGNITAVLCEYLPDTKSGTPGADSVKVKGNLHWVSVAHAYEAQVRLYDRLFAHPYPGNRREGDPEDFERSYIDDLNDTSKLTIHAQLEPALANARPEDHFQFERHGYFVADRIDSTAGAPVFNRTVTLKDSWSKAKG

SEQ ID NO: 30061 - protein, 642 aa, Azoarcus sp. EbN1
MCGIAGLFDLRGKRDFSRDLVRRMNDVQVHRGPDEGGYHFEPGIALAHRRLSIIDLSTGQQPLFNEDGSVAVVFNGEIYNFQELVPELEALGHAFHTRSDTEVIVHAWEAWGEDCVQRFRGMFAFALWDRNRETLFLARDRLAVKPLFYALLPDGTFAFGSELKVLMQHPLLDRRIDAHAVEEYFALGYVAEPRTIFAGAKKLGAAETLCVRRGQPVPQPRCYWDVHFMLDNPLSLAEASAELTARLRESVRLRMIAEVPLGAFLSGGVDSSAVVATMAGLSDEPVHTCSIAFDDPAFNESDFAQKVADRYRTNHYVETVKSDDFDLIDTLAGLYDEPYADSSAIPTWRVCQLARKRVTVALSGDGGDESFGGYRRYRLHLMEERMRGALPLGVRQPMFGLLGRLYPKADWAPRMFRAKTTFQALARDSLQAYFHSVSILRDAMRRQLFSNRFRSELAGYNAIEVFRRHAATAHTDDALALIQYVDLKTYLVGDINTKVDRASMAHSLEVREPLMDHKLVEWLATLPSGLKVKGQEGKYLFKKAMEPLLPNDVLYRPKMGFSVPLSRWFRGPLRERVRQTVLGETLAATGIFNPDYLRHLVDAHQSGARDYSSPLWSLMMFEAFVRSSGGCPARAPELAAAV

SEQ ID NO: 30062 - protein, 642 aa, Azoarcus sp. EbN1
MCGIHGIYRFDAAPVSPAQLSAMGDVTRHRGPDDEGRYIDADGRCGIAMRRLSIIDLAGGHQPISNADDTLWGVCNGEIYNFRELRAELQERGYRFKTGSDSEVLVHLYDAFGDDFVHRLDGMFNFALWDARRKRLLIGRDPLGVKPLYVHRSASMLAFATEAKALLELPGVTRELDHDVVADYLHLGYVAAPHSMFRDIRKLPPATLLSVENGEVRQWRYWRLPSSVARYVTEAEWIGRIRDGMERAVHRQMVSDVPIGAFLSGGVDSSAVVAFMAKHSAHPIRTYAIGFEGGEAEQLYNELPYARQVAQLIGTEHHEIVVTPDVVGLLPKLLWHMDEPVSDSAFITTFLVSEFARRDVKVILSGVGGDELFGGYRRYLGGHYVRKLQRLPRWSRQLMSRTAAMLPSDRHSKVLNTMRLARGFLASAELSPDERYRHYLQVLDRASIAELMNGRTGTTDALRDAFAAAGDEDALNRMFAVDAETQLPDDLLLLTDKMSMAVSLECRVPLLDRELVELAAAIPEALKVRDGRLKHLMKEALADVLPASILDRKKRGFGTPMGAWLKRDLAPVLRRLLSADVVRDRALFEPKVIARLMADHDANRIDGTDALLALMNLEIWSRIFLDRRSPDDVTTELKAYLP

SEQ ID NO: 30063 - protein, 619 aa, Azoarcus sp. EbN1
MINRPWISSDMHRKVEGPRLLARITGAISRNAPLHGAGRSNSLSGLVEFRSGFCSHDGGVAVHRAGDLVCMALGSPRFEPGALHERASTAGIAAAWLDAFRERGARAPAAAKGRFAVVVLNGGEGSAWLAVDRFGTHPLCHAIEDGMLAFATRADEVPVVAKALDTQALFDYLYFHMIPAPRTVFAGVERLLPGHVLHWRDGKARSERYWTPRFAPDRSLDLEAGKLRFLEIVESAVARETSDGQPGAFLSGGTDSSTVSGMLCRVLGRPAPTYSIGFDAAGYDEMAYARIAAKHFGTDHHEYYVTPDDLIEGIPKVAAYYDEPFGNSSVVPSWLCARNARNDGITRMLAGDGGDELFGGNSRYAKQRIFGFYDAVPGVLRSSMLEPMLGLRGMDRVPVVKKAASYVSQARVPLPDRMGMYNLLLRLGPTHVLTADFLGLVQQEAPLAAQRTVWAETAGQPLVNRMLAFDWKYTLADNDLSKVLGSTALAGVEVAFPLLSDELLEFSLTLPAEWKLKGLTLRWFFKEALRGFLPDEIIAKKKHGFGLPFGVWASQHAGLRSMARDSLETLKQRGIVRGAFIDDLLTNLLPAHPGYYGEMVWILQMLELWLREHAPEYRL

SEQ ID NO: 30064 - protein, 767 aa, Azoarcus sp. EbN1
MDQDFITAALDYHRSPTRGKISVVPTKSLTNQRDLALAYSPGVAAACDAIVADPGQARELTSRGNLVAVVTNGTAVLGLGNIGPLASKPVMEGKGCLFKKFANVDVFDIELAERDPDKLIDIIASLEPTLGGVNLEDIKAPECFYIEQKLRERMNIPVFHDDQHGTAIISSAGLINGLKIVGKDIGEVKLVCSGAGAAAIACLDLMVGLGVKRENVFVCDSKGVIRVGRDENMEPNKARYAQCTDATTLGEVIEGADVFLGLSTAGVLKPEMVKRMAKKPLIFALANPNPEILPEVAKEARPDCIIATGRSDYPNQVNNVLCFPFIFRGALDAGATKITEEMKLACVKAIAELARAEQSDIVAAAYGNADLHFGPDYIIPSPFDPRLIVKIAPAVAKAAMESGVATRPIEDFAAYAASLSDFVYQSGIVMKPVFSAAKRIPAEFKRVLYAEGEDERVLHAARVVIDEELARPILIGRPSVIEMRIQKIGLNLVPGRDFDIINPESDPRYRELWQEYHRMMCRDGVTPELAKAKMRRDTTLIGCMVLRRGDADALVCGTFGSYDYHFKTVEDVIGLKKGSKLFAAMSLLLLPKRMLAITDPYVNENPSAEEVAEIARMAAEELRRFGIEPRVALLSHSNFGSSRSTSARKMREASEILRRIAPGLECDGEMHGDSALSPDIRKKSNPESMLAGEANLVVMPNLDAANISFNLMKIANGDGVSVGPMLLGAALPVHILTPSATVRRLVNITAVSVVDAFEQRQFAAAQE

SEQ ID NO: 30065 - protein, 562 aa, Azoarcus sp. EbN1
MTRFRPKLLDTLPGYGRATFINDFSAGVTVGVLALPLAMAFAIASGMSPTAGVWTAIVAGFLISAFGGSKVQIGGPTGAFIPIVYAIVADFGVQNLLIATMMSGVMLLGMGAFKLGSMIRFIPVSVVIGFTNGIAVVIFISQIKDFLGLDIENMPGEFFGKMETLLAAMHTIDLPTVAISIASLAVLIAWNHAARQIAWMRRLPGPLAVLLVATAVNALVHLPIDTIGSRFGGIPQELPDIGLPALSLGTLGKLIAPALTIALLGAIESLLSARVADNLIDDRHDPNQELIAQGFANVVAPLFGGFAATGAIARTATNVRSGGHTPIAGMVHALVLLAVVLALAPLASDIPLAALSAIVVMVSVNMGEWHAFAWKDLARYSNQYRLILLGTFFVTVVFDLTLAVELGMLLASLFFIYRMSDLTRIERIPLEDYYGVEALSRSDDTPRIIAYRVFGSLFFGAANKLENLLLMQEGHPDAVILDLEKVINIDTTGLDALQTLHRTLQKRGAQLILCDLNDQPASLVFRSGFQASLGDDNIAANMTEALIRAQQLRGYEPELSYA

SEQ ID NO: 30066 - protein, 67 aa, Azoarcus sp. EbN1
MATGTVKWFNDSKGFGFITPDDGSEDLFAHFSAINMNGFKTLKEGEKVSFEVTQGPKGKQASNIQKA

SEQ ID NO: 30067 - protein, 570 aa, Azoarcus sp. EbN1
MTSRPPLIDRLLPFLAWRRQWSAASLRGDLIAGVTVALMMIPQSLAYAQLASLPPHVGLYAALLPAIVAALFGSCAQLSTGPVALTSILTGASLLPFADPASPTFLTLAILLALLSGLIQLALGALRAGWLLNLLSRPVMTGFINAAALIIGLSQLPALLGIVMPQSTHFLVDFWTALGALDTAHPLSAAFGAGSLLALLLLKRFAPGAPAVLIVVACATAISAAVGYGSRGGAVVGAIPAGLPVLGVPEFDWNAAVALIPTAFVIALVSFMEATSSAKLISGKSGQDWNQNQELIGQGLAKIAAAISGALPVSASFSRSALNYVSGARSGLSSLIAAACVLVTLLYLTPLLWHLPKPVLAAIILHVITGLIDLRALARAWQAGRDDGLASSLTFIGTLVFAPNIQNGVVAGLLLSLALMLYREMRPRTALLGLHPDGTYRDLARFGLEHPDPAIVILRFDSPLTFVTAAAFEHAVLAAAATHNGVRTVLISAAGINTIDATGLHTLSLLIERLRGTNRNLAFCGLKKQVIDVMQKTGLWLRLGKHADYRTEHQALEALRQDAPEVTPKR

SEQ ID NO: 30068 - protein, 374 aa, Azoarcus sp. EbN1
MALLIGVPAETVPGERRLSVVPDVVKKYLDLGAQVMVESGAGQPAHYRDETFIDVRFAASADEVCAAADVVFCVQPPSPERISTLREGTVLIGLLQPWSDAGRVKLLAEKRITAFAMELLPRISRAQSMDVLSSQAAVAGYECALIAADHSPKFFPMLTYAAGTIRPAKVLVIGAGVAGLQAIATARRIGAMVEAYDVRPETREQIESLGAKFVDTGVAAAGTGGYARELTDEEKAKQAERLAKAVAQCDALITTAAIPGKRAPRIITAAMVARMKAGAVVVDMAAESGGNVEGTVAGEKTWINDVLVIGPANIASRMPVHASEMYAKNLFNFISPFIKEGALALDWEDEVLAGTCLTHAGEIRHAGVKQVLGL

SEQ ID NO: 30069 - protein, 491 aa, Azoarcus sp. EbN1
MSFADLGLIPELLRAVAESGYTTPTPIQQQAIPVVLSGRDVMGGAQTGTGKTAGFTLPLLQRLARHASTSTSPARHPVRALILAPTRELAMQVFESVKTYSKYVPLRSTCIYGGVDMKPQIQDLRNGIEIVVATPGRLLDHVQQKTIQLGQVEMLVLDEADRMLDMGFIPDIRRILDLLPAARQSLLFSATFSDEIKKLADQMLKEPQLIEVARRNMVSETITHRVHPVSAGLKRNLLAHLLRHEPDTQALVFVATKLACSRLAHFLERHGIAADAIHGDKGQAQRTDTLEAFKSGKLRVLVATDVAARGLDIDDLPSVINFELPHTAEDYVHRIGRTGRAGRQGNAVSLVSAEERHHLAEIEKLIKLQIPQEIVPGFDPEPDFFETGSRSRHGRRTAAASAPEPAKETGQKTTPASRPARPASAARSGEARRRPGRSTIAADGFDYTKPYEPAASPADPNRLADQAAGKIGSSRRTQRPIAVLLGGLGRK

SEQ ID NO: 30070 - protein, 298 aa, Azoarcus sp. EbN1
MHKSLTVIALCLSAAGMVAPAHAQSSGTLQKIKDTGTITVGHRESSVPFSYLDANQKPVGYAMDLCAKVVDAVKTELKMPNLQVKYQPVTSQNRIPLMQNGTIDLECGSTTNSVARQQQVGFSVAYFITSVRMGVRKDSGIDDIGDLDGKPVVTTTGTTSDELIKQNEKGRTINVKNIYGKDHADSFLMVDSGRAAAFVMDDILLAGLIANSKNPSAFEIVGPSLRDEPYGVMVRKDDAPFKAIVDKTLVGLMKSGEAEKLYDKWFMKPIPPRNVNLNFPMSPALKAAFENPTDKGVE

SEQ ID NO: 30071 - protein, 555 aa, Azoarcus sp. EbN1
MIQMTGAELILRLLERQGIRTVAGIPGGAILPLYDALSGSKLIRHVLARHEQGAGFIAQGMARVSGRPEVCFASSGPGATNLVTAIADAHLDSIPMVAITGQVPLSMIGTDAFQEADIYGMTVPVTKHNFLVRSAAELLEVIPDAFRLAMSGRPGPVLIDIPKDVQTQVVSFDAFPLPAIPNAAPASDPDAIEEAARLINAAERPVLYVGGGVIHSGAAQQIVMLAERAGLPTTMTLMALGVMPIDHPLSLGMLGMHGARYTNFILEESDLLICVGARFDDRAIGKAAQFCPRAKIVHIDIDPSELHKIRNAHVAINGDVGVVLDALLPRVNIRLRKRWLSHVGSLKSRFPLHMPRLEDPRSPYGLVQAVACAVSDEAVVTTDVGQHQMWVAQAYPFRRPRQWLTSGGFGTMGFGLPVAVGAALAAPARTVICFTGDGSFKMNIQELATLAEEGLNVKIVLMNNNSLGLVYQQQSLFYGKRVFASKYQGAPDFLKIAEGFGIDGVDLDTVRNPRAALAQALNAPGPCLIHASIDCEEFVYPMVPPGGANTEMIGG

SEQ ID NO: 30072 - protein, 645 aa, Azoarcus sp. EbN1
MGKIIGIDLGTTNSCVAVMEGGKPKVIENSEGARTTPSVVAYAEDGEILTGAPAKRQAVTNAKNTLFAVKRLIGRRFEEKEVQKDIDLMPYTICKADNSDAWVEVRGKKIAPPQVSAEVLRKMKKTAEDYLGEEVTEAVITVPAYFNDSQRQATKDAGRIAGLEVKRIINEPTAAALAFGMDKKPGDSKIAVYDLGGGTFDISIIEIADIDGEHQFEVLATNGDTFLGGEDFDQRLIDYIVTEFKKEQGVDLKKDVLALQRLKEAAEKAKIELSSGQQTEVNLPYITADASGPKHLAVKITRAKFESLVEDLVQRTIEPCRVALKDAGLKINDIDDVILVGGQSRMPKVQEKVKEFFGKEARRDVNPDEAVAVGAAIQGGVLQGEVKDVLLLDVTPLSLGIETLGGVMTKLIQKNTTVPTKASQVFSTADDNQSAVTIHVLQGEREMASGNKSLGQFNLSDIPPAPRGMPQIEVTFDIDANGILHVSAKDKATGKENKIKIQANSGLSEDEIQRMVQDAAAHAEEDKKAHELVDIRNQCDALVHSVKKSLTEYGDKISADEKEKIEQAMKDAEEALKGNDKDTIEARMQALATASQKLGEQMYAQSQGAEGGATDEAAGGGSTGGSKAADADVVDAEFTEVKDKK

SEQ ID NO: 30073 - protein, 406 aa, Azoarcus sp. EbN1
MVRKSAKLANVCYDIRGPVLIKAKQMEDEGHKIIKLNIGNLAAFGFDAPEEIQLDMIRNLPNSAGYSESKGIFAARKAVMHYTQQKHIKGVTLEDIYIGNGVSELIVMAMNALLNIGDEVLVPAPDYPLWTAAVSLSGGTPVHYICDEANEWLPDLDDMRARITPNTRAIVVINPNNPTGALYPDHILQGIVDIAREHGLIVYADEVYDKVLYDGATHRSMGSFSEDVLTILFNGLSKNYRSCGYRAGWMVVCGDKRHAQDYIEGLNMLASMRLCANVPGQYAIQTALGGYQSIDDLVAEGGRMRRQRDLAHELISAIPGVSCVKPKATLYMFPKLDPKLYPIEDDQAFIAELLEEERVLLVQGSGFNWPHPDHFRLVFLPHEDDLRDAIGRIARFLEQYRKRHAA

SEQ ID NO: 30074 - protein, 774 aa, Azoarcus sp. EbN1
MSEADLKRFFLEQVRLFESFPAGKVEEILARSRMATFEGNEAVLETGDEGRYIGVVVSGHAEISITDNTGTRSVVSQLGAGDVFGVMSLLTGDRIIADVIAGNRCFVLMIPREVFEACILANPKAVAYLSRLLAERSRAMSVDLATARSRAIARSDDPYALSLGTSTPGKVLVLNVGISQIHFGIYDTRDLGSDIHGIIDNIDEDVARISVAVGPHVRNMERARFPLSELFAVMQAATGLLGDAFAFHPQEVGAVGHRVVHGGSRFSSAAVITPAVIADIEALSVFAPLHNPVNVEGIREAMRQLPAVPHVAVFDTAFHQTLPPYAYLYGLPYELYKQGGIRRYGFHGTSHRYVSLKAAEVLRRPLGELEIVSCHLGIGASLCAIDHGRSVDTTMGMTPADGLIMPSRSGSVDPAVMIHLLQDCGMSPEQLSNMINTESGMKGISGISGDIHEIEAAAGEGHHRALLAHKAFCYQVRKNIGACVAAMGGIDVLTFTGDVGETSAAVRSLACQGLGYMGIRLDEEKNRNLGKVNACNVISAADSPVTILVIANDDERLVAWETLRAIERNDLTVAMKEGHPEAPIPIEVSAHHVHLSQADVEKLFGPGHQLTPEHELSQPGQFACSEKVHLVGPKGRIANMRVLGPTRKETQVEIAMTEQFKVGIQPPIRQSGDLANTPGVTLEGPYGSTTLERGVICAQRHIHMAPEDALRFRVRDNYVVRVRVGGDREMIFGDVVVRVNPAYRLAMHIDTDEGNAANIRTGMIGYIEEIQSRH

SEQ ID NO: 30075 - protein, 409 aa, Azoarcus sp. EbN1
MSDVKKAVLAYSGGLDTSVILKWLQDTYQCEVVTFTADLGQGEELEPARQKALKFGIKPDNIFIDDLREEFVRDFVFPMFRCNTVYEGEYLLGTSIARPLIAKRQIEIARATGADAVSHGATGKGNDQVRFELGYYALMPGVKVIAPWREWDLLSREKLLAYAEKHGIPIEMKHKQGGSPYSMDANLLHISFEGRHLENPAAEAEESMWRWTVSPEAAPDAAEYLDLEFERGDLVAINGTRMKAHELLAKLNELGGKHGIGRLDLVENRYVGMKSRGCYETPGGTILLRAHRAIESVTLDREVAHLKDDLMPRYASLIYNGYWWSPERRALQALIDNTQESVNGWVRVKLYKGNVIVTGRDSKTDSLFDPTIATFEDDQGAYNQKDAHGFIRLNALRMRIAANAQTKRG

SEQ ID NO: 30076 - protein, 202 aa, Azoarcus sp. EbN1
MIEKKLMEAAFDAEGLRRRFVDAPEMAPVREEGAQRGEFRPAAVLVPVVLRPERLAVLLTRRTDHLHHHPGQISFPGGRVEKADVSAVMTALRETEEETGLDPERIELLGELPEYFTGTGFRITPVVGLVHPPFELKLDTFEVAEAFEVPLAHFLDPANHERHTMEYQGRMRQYYAMPYEGYFIWGATAGILVSLYRFLGGS

SEQ ID NO: 30077 - protein, 229 aa, Azoarcus sp. EbN1
MPNPTADIPTLLRQISFFSELSADDIDRVARYTRERTLEKGEVLFQRGDPVHGFFFVVSGQMKLAVSSAQGNEKVVEIISPMNSFGEAVMFLNRPYPVFAEGLVATRLLHIGQAVVSDLIDQDSSFARKLLAGMAIRLHSMIQDVEIYSLRSSTQRVIGYLLQQVEQDGATGARDIQLPTSKQVIASRLNLTPETLSRIFHDLVNAGLITVHGKHIALHDPVGLAHYQG

SEQ ID NO: 30078 - protein, 393 aa, Azoarcus sp. EbN1
MANREVVVLSAVRSAVGGFGGSLKDMEPAELGAVVVKEAIARSGVDAKQISFAAVGNCIPTESRYPYVARLATVQGGMSMDSVAFAVNRLCGSAQQAIVNSAQAIMLGDADFAIGGGVEVMSRGAYLLPALRSGARMGDTKAIDAMVAVLTDPFGVGHMGVTAENLTTKWNISREEQDAFALESQNRAAAAIADGRFKSQIVPITFETRKGPVVFDTDEHPRMTTMEALGKMKPAFKKDGSVTAGNASGINDAASFLVLAEAGKAAAAGHKPIARLVAYAIAGVPNDLMGEGPIPASKLALQRAGLTLDKIDVIESNEAFAAQSIAVNRGLDLDPKKTNPNGGAIALGHPVGATGGVIITKLLHELIRVNGRYGMATMCIGGGQGITTIWERV

SEQ ID NO: 30079 - protein, 590 aa, Azoarcus sp. EbN1
MCGIAGEIRFDGQSPDVGALERMNARQRVRGPDSGGVFVQGALGFGHRRLKIIDLSESAQQPMFDPALGLGIVFNGAIYNHAALRRELETLGYRFYSRGDTEVLLKAYHAWGQDFVQRLNGMFAFAIWERDSGRVVLGRDRLGIKPLYYSAQPGLLRFASSLPALVAAGGVDTTVDAVALNHYLSFHAVVPAPHTILAGVRKLPPATLMTIHTDGRRSERSYWSLAYAHEPGDAARSFEEWTEILLEGLRSAVGRRLVADVPVGALLSGGVDSSLIVGLMAQAGVQGLRTYNVGFEDVGGEKGNEFEYADIVAERFATIHERIFVPEAQLLARLPEAVAAMSEPMVSHDCIGFFLLSEAVSRHSKVVQSGQGADEVFGGYHWYPKLAGSVDPVGDYLAAFRDRDYDEYCRMVGAANRADDCSGAFVAAHFDLPGAIDPVDKALRLDTTVMLVDDPVKRVDNMTMAFGLEARVPFLDHELVELAARIPARHKLAHGGKGVLKEAARQVIPSAVIDRPKGYFPVPGLKYLQGQVLERVRDALTNRAARERGLFRREYVDTLLADPGAHMTPLRGSKLWQLGLLEWWLQTHVR

SEQ ID NO: 30080 - protein, 421 aa, Azoarcus sp. EbN1
MNTTNSYAASQAAAHAARYDDIWLVAGSRTPFADYNGVLRDVSPTDLGIFAARALFDRSGIPASEIDAIVAGNMAQASFDAYFLPRHIGLYSGVNPNVPALLVQRLCGTGFETIIAAADQITLGKAKVALAVGTESMSRNPIAAYTHRAGFRMGQLDFRDFLWEATKDTAPGASMGDTAENLAKRYGISRGEVDRFAEQSFAHACAAWESGWFAGEVAPVVNAKWELDGYNARSLKLADRAEVCDRDGHVRPTSFDALQKLKPAFGGVQTGGNSSAIVDGAAAVIVAHGDWVRAHGVKPLARIVAGASVAVPPEIMGIGPAPAIRAAAAKAGLTVGDLGRVEINEAFGAQYLACERELGLDRERANVHGGAIAIGHPLGASGVRLTTTVARELQEARLQFGVSSACCGGGQGVAIVVENVG

SEQ ID NO: 30081 - protein, 305 aa, Azoarcus sp. EbN1
MNQEDTPQADDKALFRTGFVAIVGRPNVGKSTLLNRLIGQKISIVSRKAQTTRHRVTGILTSDNAQFVFVDTPGFQTRHRNALNRSMNRTVSQVLGDVDLVFLVIEAGRFGDDDRKVVSVLPGDAKVVLVINKVDRLGDKSQLLPFIAKMAEVYPFTEIVPLSAERGTNVEALVKTATPLLPEGEPMYGADEITDRSERFLAAEFLREKLFRLLGDELPYGVAVEIEKFETEGNLRRIYAAVVVDRSSHKGIVIGKGGEQLKRIASEARVELEKLFDGKVFLEVWVKVKSGWADDERALKSLGYE

SEQ ID NO: 30082 - protein, 397 aa, Azoarcus sp. EbN1
MSKSKVLIAGGGIGGLAAAIALLQRGFDVEIYEQAGELREIGAGIQISPNGNRALDALGVFEALQALSCGADGKEIRLWNTGKTWKLFDLGDEAVRKYGFPYMTVFRPDLLRVLGDEVRRLKPDALHLGARSIGVGETADGVVLELADGRKIRGDVMIGADGVHTRIRPALFGADETLFSGMVAWRALIPMEALPEHFSRSVAVNWVGPGGHLVHYPVQGGRIMNFVGTTEGNTWAAPPWSAPASREECAAAFAGWHDDIHTMLRQAPSVTKWALCGRRFLDTWTRGRATLLGDACHPTLPFLAQGAVHAIEDAVVLARCLEKYADVPDALRRYDEVRRPRAHRMVRGAAENTSRFHNPELATPQGAEVFVSREWQSQAISDRYDWLFTYDAAGVEI

SEQ ID NO: 30083 - protein, 358 aa, Azoarcus sp. EbN1
MSKFHDMRVASVRPETRDAIVVTFDVPPSLADSFHYAPGQHLTLRTEIGGEDVRRSYSICSGADERALRIAIKRVHGGLFSNWANDFMKPGVSVEVMPPSGHFGVAPDPQHHRNYAAFAAGSGITPILSQIKTILAAEQGSRFTLVYGNRSSSSVMFREELADLKDQYGERLNLVHVLSREQQDIELFNGRIDRERCDALLTRWIDAKRIDVAFICGPMDMMEAVSASLQAHGVAKSAIKMELFATSLPKGPRPVHSHPVKGTEDCEVTVIQDGRVRQFTMPKNRDSVLDAGLGQGIEMPYSCKGGVCSTCRCKVIDGEVDHDTNFALEDYEIARGFRLSCQSYPVTDKLVLDFDQET

SEQ ID NO: 30084 - protein, 401 aa, Azoarcus sp. EbN1
MKNAYICDAIRTPFGRYGGTLSSVRADDLAALPIRALVERNPDVDWAAVDDVIYGCANQAGEDNRNVARMAALLAGLPQDVPGTTVNRLCGSSLDAVGMAARAIKSGEADLMIAGGVESMSRAPFVMGKADTAFSRSAKIEDTTIGWRFVNPLMKAQYGIDSMPETAENVATDFNISRADQDALALRSQQRWAAANEAGLFANEIVPVAIPQKKGEPKLFTTDEHPRPETTLETLAKLKGVVRPDGTVTAGNASGVNDGACAVLLASEAAVERYRLKARARVVAMAAAGLAPRIMGFGPSPASKKVLAKAGLTLADMDVIELNEAFAAQALAVTRDLGLADDAAHVNPNGGAIAMGHPLGASGARLVTAALNQLERTGGRYALCTMCIGVGQGIALVIERV

SEQ ID NO: 30085 - protein, 658 aa, Azoarcus sp. EbN1
MSQAAPAGFRYDALHSLSAPLLSTDRRLFPFRCPHQNPMTSPIESFAQLDLRAPLLDALSEIGYETPSPIQAICIPHLLAGHDLLGEAQTGTGKTAAFALPLLDRLDLAVKNPQVLVLAPTRELAIQVAEAFQRYAKNLPGFHVLPVYGGQSMVVQLRQLARGAHVIVGTPGRVMDHIERKSLNLDSLTTLVLDEADEMLRMGFIDDVEWILQHTPAERQTALFSATMPDAIRRVAHRYLREPREVKIKASTTTVSTTRQRYCQISVAHKLDALTRILEVEEDFDAAIIFVRTKTATVELADKLEARGYSAAALNGDMTQQLRERVIEQLKGGQLDIVVATDVAARGLDVSRISHVINYDIPYDTEAYVHRIGRTGRAGRTGSAILFVAPREMRMLKVIERATRQPIEALQLPSREAVADKRVAAFRQQVATVLESEDLAFFRDVVAGMESTHEAELHDIAAALAFLAQRERPLQLPESKGPDIARLPEPRREPGAERAPRENRDKILERRREFSEGNLQRYRIEVGRNQQATPKDIVGAIANEAGIESRYIGQINLYEDYSTVELPSALPHDVLDILRRVRVRQHQLNIRPLDAEEAKRDAARVRPGAPRPGAAPRHAAHPGSKPAHPGRVGPRSFSSEKRTPSPGFKPGKKKPHDR

SEQ ID NO: 30086 - protein, 403 aa, Azoarcus sp. EbN1
MLKFPIYLDYSATTPVDPRVAQAMIPWLTEHFGNPASRSHAYGWEAEKAVEDAREQVARLVNADAKEIVWTSGATESNNLAIKGAAQFYKGKGKHIITLKTEHKAVLDTFRELERQGFEATYLDVQENGLVDLSVLKDAIRADTVLVSIMFVNNEIGVVQPIAEIGEICREKGIVFHVDAAQATGKVDIDLSKLKVDLMSFSAHKTYGPKGIGALYVRRKPRARLEAQMHGGGHERGLRSGTLATHQIVGMGEAFRIAREEMKVENERIRALRDRLMKGLQDIDATYINGDVEHRVPHNLNISFAYVEGESLIMAIKDVAVSSGSACTSASLEPSYVLRALGRNDELAHSSIRFTIGRFTTEEEVDYTIDLLHKKIGKLRELSPLWEMVQDGVDLDSVQWAAH

SEQ ID NO: 30087 - protein, 384 aa, Azoarcus sp. EbN1
MFAPVYLDWNATTPLDPVVRAAMLPWLDARFGNASSRHEYGRQARAAIDEARARVAAAVGAHPTEVIFTSCGSEANNLFIKGAAALMKPGLVAVGAIEHPCVREPARQLRRGGWTLREIAVDTAGRIDGDDWKAVLDAKPSLVSVMLANNETGVLQDVAALAHDARTAGTWFHSDAVQGLGKIPVDFRALGVHAMTLSAHKIGGPLGAGALVIDKRLELAPQIAGGGQERGLRSGTENVAAIVGFGVACEHATARLESEAGRLAGLRDRLEAGLVAHGMRIFSAGAPRLPNTTFFAADGFDGETLVAKLDRAGFACASGSACSSANPEPSHTLLAMGVERDAARGAVRVSLGRDTTLTDVEGFLATFERLTNELNNLTAMAVQS

SEQ ID NO: 30088 - protein, 540 aa, Azoarcus sp. EbN1
MNLSQALLTALRDHGAREIFGIPGDFALPFFKIIEESGILPLHTLSHEPGVGFAADATARYRCCLGVAAVTYGAGALNMVNPVAGAYAEKSPVVVISGAPGAGESHSGLLLHHQAKTLDSQFEIYREITCDQARLTDARSAPREIARVLASCLRESRPVYIELPRDMVGVPCEPVIPLVPPASDREVLSACVDEILVRLRSAASPVLMVGVEVRRFGLEAKAAELARRLGVPVVTSILGRGLLAGTDAPLVGTYLGVAGQQQVTDLVEQSDALLLLGVIISDTNFGVSSKQIDLRKTIQALDRRVTLGYHTYPEVPLAALVDALLERLDKKIAPAMRFDPPHYPRGLQADDASITPNDIALAINDLMDTHGRMPIAADVGDCLFTAMDIEPTALVAPGYYATMGFGVPAGLGLQAASGVRPLILVGDGAFQMTGWELGNCRRYGWDPIVIVFNNSSWEMLRTFQPESAFNNLDDWRFAAMADGLGGDGARVGTRAELKAALDHALATRGRFQLIEAIIPRGVLSDTLSRFVAGVKRLSQK

SEQ ID NO: 30089 - protein, 860 aa, Azoarcus sp. EbN1
MRFDKLTTKFQQALSDAQSIAVGNDQQFIEPQHLLLAMLGQEDAGIVSLLQRAGVNVPPLKAALDKALTRLPKVEGHGGEVQIGRDLSNLLNIADREAQKRGDQFIASEMFLLALAEDKGETGRLLKEHGLSRKPLEAAITAVRGGSGVGSQDAEGQREALNKYCLDLTDRARAGKLDPVIGRDDEIRRAIQILQRRTKNNPVLIGEPGVGKTAIVEGLAQRIVNDEVPETLKGKRVLSLDMAALLAGAKYRGEFEERLKAVLKEIAQEEGRIIVFIDELHTMVGAGKAEGAIDAGNMLKPALARGELHCIGATTLDEYRKYIEKDAALERRFQKVLVDEPSVESTIAILRGLQEKYELHHGVDITDPAIVAAAELSHRYITDRFLPDKAIDLIDEAAARIKMEIDSKPEVMDKLERRLIQLKIEQEAVKRETDEASQKRLVLIRDEIDKLEREYANLDEIWRSEKASVQGSQHIKEEIEALRTQMAEMQRKGQYDKLAELQYGKLPQLEAQLKAAESAGSGERKFKLLRTEVGTEEIAEVVSRATGIPVSKMMQGEREKLLKMEERLHQRVVGQDEAVRLVADAIRRSRAGLSDENRPYGSFLFLGPTGVGKTELCKTLAEFLFDSEEHLIRIDMSEFMEKHSVARLIGAPPGYVGYEEGGYLTEQVRRKPYSVILFDEVEKAHPDVFNVLLQVLDDGRMTDGQGRTVDFKNTVIVMTSNLGSQMIQQMAGDDHQVIKLAVMAEVKTYFRPEFVNRIDEVVVFHALDEKHIASIARIQLQYLDKRLARLDMSMEVSDAALAELASAGFDPVFGARPLKRAIQERIENPLAKAILEGQFGAKDKVLVDVEGGRIVFAKGD

SEQ ID NO: 30090 - protein, 600 aa, Azoarcus sp. EbN1
MRMPGDTLKQASTPRPLSALTGLWPFLQPYRGRIALAFILLCLGSAIILLLPLAFGDLVDLGFGAREQADGGLLGELNLTGHFIALFGLASAWALTVSARYYTVSWIGERATADLRCAVYRRVLSQSPQFFETLQTGEVLSRLTGDTTLIQTVIGSSVSMGLRSLFQFTGGMVMLAVTSLYLFSLNLGLMALLTLPIIAIGRKVKRLSRESQDRIADASALAGEILNAMPTVQAYTQERHEAERFATAAETGFTTAIRRTRVRAALTTLIITAVMGTIIFVLWVGVRQMHDGILTQGQLASFVLYAALVAGGVGTMAEVWGDVMRAAGAAERLLELLHADSAIREPSLPQSPAHPAQAAISFEQVTFRYPARPHPRALDDICLTIAPGESVALVGPSGAGKTSMFQVLLRYYEISGGAIRINGQDIRQLSLHDLRKGIAIVPQDPVIFSASALENIRYGRPAASDAEVIAAAQAALVDEFIERLPESYRTFLGERGTRLSGGQRQRIAIARAILKGAPMLLLDEATSALDVESEILVQQGLNAAMQGRTTLIIAHRLATVQKTDRIVVMDRGRIVETGTPEDLRHGGGLYARLAALQLDL

SEQ ID NO: 30091 - protein, 142 aa, Azoarcus sp. EbN1
PYGDFTLHKTESTPAVFIIGGIGVTPVRSMIAQATHDRTAHQITLLHASRTPDDLPLKSDFERLAKENPNFRYVPTFSSAPDGWPGEHGRVDAAMVRKYVPDLHRPIYYLSGPDGMVKAMRALLVSLEVSEDNIRTEEFAGY

SEQ ID NO: 30092 - protein, 409 aa, Azoarcus sp. EbN1
MQNSPLHHFDFRFVLLEGIHATAVETLGTSGYSRVDARPGALTGDDLIHAVADADFVGIRSRTRLTEEVLTHAPKLLGIGCFCIGTNQVDLEAAALLGIPVFNAPFSNTRSVAELVLAEIVMLMRGIPEKNALLHRGGWMKSASNSWEIRGKTLGIVGYGHIGTQVGVLAEHFGMKVVYHDIEAKLSLGNAHQLGSLEDLLAASDVVSLHVPETPATRNMMDAARLAAMKPGSFLINASRGTVVDIDALADALGSGHVLGAAIDVFPAEPKSNDEPFVSPLLRFDNVILTPHIGGSTAEAQANIGREVAAKLARYANNGSTVSAVNFPEVSLPAHEGQCRVMHIHHNVPGMLARINERISKAGLNIVAQYLQTTQHVGYVVIDVDAEARQVAFDELNAIDGTIRCRLIC

SEQ ID NO: 30093 - protein, 215 aa, Azoarcus sp. EbN1
MALNAAVFIDKDGTLIHDVPYNVDPTKVRLRDGAGEALARLQRHGYHLILVTNQPGVALGLFEPDALEAVWAAIAALLSPYGVVFDAIYHCPHHPQGTDARFTGQCECRKPEPGLLLQAAQDHRLDLQRSWLIGDILDDVEAGRRAGCRTVLLAVGSETEWRRGPMREPHLVASSLAEAVDGILEWVPAEVPDDITAESESGFTVWQTDEPEWTR

SEQ ID NO: 30094 - protein, 223 aa, Azoarcus sp. EbN1
MTQPTAVSTTALKTFSLFQGLSDDTLATVSRLAMMRRIPRGQSVVHAGERCDFVYLVLTGSLKVVVSDEDGREVILTILGQGELFGEMSMFGEQPRSATVVAVMPSDLVMIAKNDFRTILQGNFEVAWRIMANLADRLRSADRKIESLALMDVYGRVARLLLEMSEEVNGAVVVVRKITKQDIAKMIGASREMVSRVMKDLAAQGLIEETGAGIVLRDRLQSV

SEQ ID NO: 30095 - protein, 569 aa, Azoarcus sp. EbN1
MVLTGAEIVIRCLQEEKVEYVFGYPGGAVLFIYDALFNQDKVRHVLVRHEQAAVHAADGFARSTETVGVALVTSGPGATNAITGIATAYCDSIPMVIISGQVPTAAIGQDAFQEVDTVGITRPCVKHNYLVKDVRDIATTIKKAFYLAKTGRPGPVLVDIPKDVSMHKCEFEYPKEVSMRSYNPVLKGHQGQIRKAVQLLLEAKRPMIYTGGGVVLSDAAEQLTKLTRLLGFPITNTLMGLGGYPASDRQYLGMPGMHGTYEANMAMHYSDVLLAIGARFDDRVIGDPANFAEEPRKIIHVDIDPSSISKRVRVDVPIVGDVKEVLEEMIRQIEASSARPDVETVGTWWKQVDEWRRRECMKFKNSDEIIKPQFVIQKLWEVTGGDAFITSDVGQHQMWASQYYRFDKPRRWLNSGGLGTMGVGLPYAMGAQLAHPGSQVACVTGEASIQMNIQELSTCKQFRLPIKIVNLNNRYLGMVRQWQQLFHGERYSESYMDSLPDFAKLAESYGHVGFRIEKPADVEGALREAFGRKNDLVFLDFQIDQTENVYPMVQGGKGLTEMILSAEDL

SEQ ID NO: 30096 - protein, 548 aa, Shigella flexneri 2a str. 301
MDSQRNLLVIALLFVSFMIWQAWEQDKNPQPQAQQTTQTTTTAAGSAADQGVPASGQGKLISVKTDVLDLTINTRGGDVEQALLPAYPKELNSTQPFQLLETSPQFIYQAQSGLTGRDGPDNPANGPRPLYNVEKDAYVLAEGQNELQVPMTYTDAAGNTFTKTFVLKRGDYAVNVNYNVQNAGEKPLEISSFGQLKQSITLPPHLDTGSSNFALHTFRGAAYSTPDEKYEKYKFDTIADNENLNISSKGGWVAMLQQYFATAWIPHNDGTNNFYTANLGNGIVAIGYKSQPVLVQPGQTGAMNSTLWVGPEIQDKMAAVAPHLDLTVDYGWLWFISQPLFKLLKWIHSFVGNWGFSIIIITFIVRGIMYPLTKAQYTSMAKMRMLQPKIQAMRERLGDDKQRISQEMMALYKAEKVNPLGGCFPLLIQMPIFLALYYMLMGSVELRQAPFALWIHDLSAQDPYYILPILMGVTMFFIQKMSPTTVTDPMQQKIMTFMPVIFTVFFLWFPSGLVLYYIVSNLVTIIQQQLIYRGLEKRGLHSREKKKS

SEQ ID NO: 30097 - protein, 198 aa, Trillium camschatcense
QVTFSKRRNGLLKKAFELSVLCDAEVGVIVFSPRDKLYEFSSTSMQSTIDRYRMHTKCVNTNMPTEHNTQQWKYEAVSMANKIELLEASKRKLMGESLEPCTVDELQELESQIERSLSNIRGRKDYLLEQQIEELKEKERRLLEDNELLRHKSEEETELQLATPKGVQYDHGSQQMELETELHIGWPPKVATQCISHA

SEQ ID NO: 30098 - protein, 309 aa, Zymomonas mobilis subsp. mobilis ZM4
MTDKPAILLRTPLFYGARDKLDSLFTVYDYGTKITPKIASQIQALIGGGQTQISADEINQYPNLQIIAQYAVGFDGIDLEAAKKRDIRITNTPGVLTEDVADMAVGLFLTLKRDIIRNDKLVRDGGWIKKEEIPLSHSASNLDVGVFGLGRIGQAIAERLAPMSKSVSYCSRHPKEVSWNYYNNILDLAKAVDVLVLAAPGTAETKGLVNKEVLEALGQKAVLINIARGSIVDEDALIEALEKGVIAGAGLDVFANEPNVPAALQQSQKVVLQPHLGSATVETRTTMAHLVIDNLQAFFAGKPLLTPVI

SEQ ID NO: 30099 - protein, 347 aa, Zymomonas mobilis subsp. mobilis ZM4
MQFLDQAKIYLRSGAGGPGAVSFRHEKYIEYGGPDGGNGGKGGDIVFEAVPGLNTLIDFRYTQHFRAARGASGAGSNKTGAGAKDLVIHVPVGTQVLSEDKEEILHDFTKVGERIIFLKGGDGGRGNASYKSSTNRAPRQHGPGWPAQEAWVWLRLKLLADVGLVGLPNAGKSTFLKATTNAHPKIGNYPFTTLHPQLGVVRRHGQEFVLADIPGLIEGASEGIGIGDRFLGHIERCRILLHLIDASGEDPIAAWHEVQNELALYGAGLAEKPQLLALNKIDSVDEETCAELSQALEEASGQKVLLLSGATGQGLDPILDQLITMTGRAIEKAQESSAQTEKIWSPI

SEQ ID NO: 30100 - protein, 574 aa, Zymomonas mobilis subsp. mobilis ZM4
MVQLPSSARHGNETENQQFLDHLREISDHVLTSEGEMHHYCTGFRFGSGKVLAVVRPTSLVEMWHVVEACVDAGKIIIMQAANTGLTGGSTPDGDDYDRDIVLISGIGITGVKPINKGEQVICLPGATLYDLETILRPLGREPHSVIGSSCIGASVFGGVCNNSGGALMQRGPAFTQLTLYARINEQGKLELVNHLGVRLGDDPETILSRVEKGDYTEDDVINDESKHASDCEYHNHIRDIEAETPARFNADPSRLYESSGSAGKVAVFAVRLDTFPQQKNAKVFYIGTNDPDELTELRRQVLKSFKYLPISGEYMHRHAYDIAAKYGKDTFLAIEYLGTDRLPQLFAMKGWFDGLNNRVSFLPRYLSDRVMQFASTLFPHHLPKRMDDFRDRYEHHLILKVSEEGTEEARSFLKDFFEKASGGYFECSDEEGKKAFLHRFAAAGAAIRYRDVHQDEVEDIVALDIALPRNNRAWEEHLPSEITDKISHILYYGHFFCQVFHQDYIVKKGGNCADIEHAMWKILDSRHAEYPAEHNVGHLYYAKDSLKTHYHELDPTNSFNPGIGHTSKAAYWR

SEQ ID NO: 30101 - protein, 176 aa, Zymomonas mobilis subsp. mobilis ZM4
MPPQVVGEGTGVVKFFNSQKGFGFVVRDDGGEDVFVHISAVEQAGLTGLAEGQPLSFTLVDRGGRVSATNLGIEGEPLPITESAPAPRGGEFGGSRGGPQRQLTGEKSSGTVKFFNAMKGFGFIQRDDGQPDAFVHISAVERAGLPSLNEGDRLSFELEVDRRGKYAAVNLAQLDD

SEQ ID NO: 30102 - protein, 400 aa, Zymomonas mobilis subsp. mobilis ZM4
MVHISAALSRIQPSPTIAVTSRVIELKSKGVDIITLGAGEPDFETPEFIKEAAIQAIHDGKTRYTNVDGTAELKEAIVGKFRRDNHLEYRTDQISVGSGGKHVLFNALTATIDQGDEVIIPAPYWVSYPDIVRFCGGTPVFIQATIDQDYKITAEQLEKAITPKTRWFIFNSPSNPTGAAYSADEIKSLAEVLRRHPHVWILSDDIYEHIVFDNFRFATIAEVAPDLFDRTLTANGCSKAYAMTGWRIGFAGGPTPLIKAMAKLQSQSTSNPCSISQAAAVAALNGPQDFLQGWSDDFARRRNLVVDGLNAIEGISCPKPQGAFYVYPGISELIGKKTPSGKVIEKDLDFSSYLIDEAKVAVVHGEAFGLSPAFRISYATSTELLKKALERISDAVARLK

SEQ ID NO: 30103 - protein, 203 aa, Zymomonas mobilis subsp. mobilis ZM4
MFFLGKPGYTVTDGSACFMGKDLLAMEPHERAAAGLFLGFQYPVEIAGVSNLHFLRAAANAQRKTRGEEELSAGEFIKIASKEAKALGINPEMLKRPVNVGFSGGEKKRNEMMQMAVLQPKLAILDETDSGLDIDALRIVSESINRVMRQPDRSVLLITHYQRLLDHVKPDFVHVLVKGQIVRSGGAELALELEREGYGELVA

SEQ ID NO: 30104 - protein, 635 aa, Zymomonas mobilis subsp. mobilis ZM4
MGKVIGIDLGTTNSCVAVMEGGQPKVIENAEGARTTPSIVAFTKDSERLIGQPAKRQAVTNSENTIFAVKRLIGRRFDDPVTKRDTELVPYHIVRGSNGDAWVKAGGQDYSPSQISAFILQKMKETAESYLGETVDQAVITVPAYFNDAQRQATKDAGKIAGLEVLRIINEPTAAALAYGLDKNDGKTIAVYDLGGGTFDISILEIGDGVFEVKATNGDTFLGGEDFDTKIVSYLAEEFKKAEGIDLTKDRLALQRLKEAAEKAKIELSSAQTTEVNLPFITADATGPKHLVKTISRAELERLVADLIDRTLEPVKKALADAGVKASDIDDVVMVGGMTRMPKVRQVVKEFFGKEPHTGVNPDEVVAMGAAIQAGVLQGDVKDVLLLDVTPLSLGIETLGGVFTRMIDRNTTIPTKKSQVYSTAEDNQNAVTIRVFQGEREMAADNKLLGQFDLVGIPPAPRGVPQIEVTFDIDANGIVNVSAKDKGTGKEQQIRIQASGGLSEGDIDKMVKDAEKFAADDKHRRELAEAKNNGDSLVHTTERQLTELGDKVDAALKTEVEAAVAAVKTALEGEDVAQINEKTQALGQVAMKLGQALYEQDQANNERHDTPETEKAEGDNVVDAEFQEIDDQDKK

SEQ ID NO: 30105 - protein, 553 aa, Zymomonas mobilis subsp. mobilis ZM4
MSDTKSTVAKLLVKCLEAEGVEYVFGIPGEENIRLIDAMADSSIRFILVRHEQGASFMADMYGRLTGKAGVCTATLGPGAINLLLGVADAQTDSTPMVAISAQVGLNRIYKESHQYIDLQGMFAPVTKWSDTILTPASVPEMMRKAFDLAQRERPGAVYLAVPQDLEESDVSADLKPITVHPVHTTAPDPDQVAATIDLIKKAKQPIILAGHGVARSHASKQLIELSELLNVPVATTFMAKGVIPDRHPNALGVAGFMRRDYENFAFDAADVILSVGYELQEFAPSKINPNHDKKIVHIHHFAEDIDAAYPVAIAIEADIDKSLDALIDGLKKTTFPKFDNHAKIKQIKKEELDGNADDQSFPLKPQRIISDIRKAMGDDDIVLADTGAIKMWMARLYPTQKPSTCLISNGLSTMAFALPGALAAKLACPDRKVLAVMGDGSFLMNSQEIETAIRENIPLVVLIWVDDAYGLIKWKMDLEIKHHRDVDFTNPDFVQYAESFGAKGYEIKSADMLLPVIEKALADDGVSIIACPVDYAENNKLTDKLGDLTITI

SEQ ID NO: 30106 - protein, 209 aa, Zymomonas mobilis subsp. mobilis ZM4
MIYLDYQATTPMAPEAKAAMLPWLDGGANPHSPHRIGRKAAAAVAIAKDQIAALIPEREAGNLVFTSGATEALNMAIKGLWFSGKNTRRKIVTLATEHAATLDSLGYLARLGAEIVLLPVHSDGLVDLEKAAAAIDDKTALVTAMFVNNEIGVIQPIAELAKLACQVGAYFLLDAVQGYGRLALPEGCDMIALSGHKIHAPIGCRGIMV

SEQ ID NO: 30107 - protein, 348 aa, Zymomonas mobilis subsp. mobilis ZM4
MNSRIYLDYAATTPITTSARQAMDEAFDIWANPSSPHKDGRHMRALIEEARIRIKEALNWPHHLIFTSGASESIAMVLQRNTLEQSSISAVEHDAFLRAGIIPNILPVDKNGYIIPEKLPENQLVGVQTVNNETGVIQPADILRQTLSEKNSLWFADAAQSAGKMPLPDADFISLSAHKLGGAPGVGALLIRDWAKLRPFGGQEQGYRAGTENAPAILGFAAAVCEKKDWFEKADALREKLDQAIIASGGEIVAYQSERIPTIASYRMPDMVAKTQLILFDMAGISISAGSACSSGSLKSSPVLKAMGWGDKEAQEVIRVSFGRETTESDIDQFIKIWRQIAEQRKKA

SEQ ID NO: 30108 - protein, 408 aa, Zymomonas mobilis subsp. mobilis ZM4
MTEKVKRVVLAYSGGLDTSVILKWLQEHYGCEVVTFTADLGQGEELEPARKKAEMMGIKPEHIFMDDLREEFVRDFVFPMMRANALYEGQYLLGTSIARPLIAKRQIEIARQVGADAVAHGATGKGNDQIRFELGYYALAPDIKVIAPWREWDLNSRSKLIAYAESRQIAVPKDKRGESPFSVDSNLLHTSSEGKILEDPWQEVPDYVYSRTVNPEDAPNTPEIITIDFERGDAIAINGEALSPAELLTKLNELGRKHGIGRLDLVENRYIGMKSRGMYETPGGTILIQAHRGIEQLTLDGGAMHLKDELMPRYAELIYNGFWYSPEREMLQAAIDHSQARVSGTVRLKLYKGSVNVIGRKSPNSLYSEKVVTFEDDAGAYNQQDAAGFIKLNALRLRLLGERNAKGL

SEQ ID NO: 30109 - protein, 1531 aa, Zymomonas mobilis subsp. mobilis ZM4
MSIKSSADSFDVFAERERLAKEGMYRPEFETDACGVGLVAATDGKASRRVVTAAIDALKAVWHRGAVDADGKTGDGAGIHVDLPASFFDDAIAHAGHAPLPNRLAVGMVFLPRTDLSAQETCRTIVESEIIDFGYRIYGWRQVPVDISVIGEKAMRTRPEIEQIMIAGPHPDEMSAAEFEKNLYLIRRRIEKKVIAAQINDFYICSLSCRSIVYKGLFLAEALSIFYPDLQDERFVSRVAVFHQRYSTNTFPQWWLAQPFRMLAHNGEINTIRGNRNWMKSHEIKMASLAFGEHSEDIKPLIPAGASDTAALDAVFETICRAGRHAPAAKLMLIPEAWQHNPDMPKAHRDMYSYLASVMEPWDGPAALAITDGSWAVAGVDRNALRPLRTVRTKDNLLIVGSESGMVVVPENNVIAKGQLGPGQMIAVNLDEGRFYEDRPLKDLIASERPYGEWIKDFKKLSDLDLKSYDPVIPYDRDELIKRQVSAGLTLEDMDLVLSPQAETGKEAMGSMGDDTPLAVLTEKPRLTSQFFRQNFSQVTNPPIDSLRETQVMALTTRFGNLGNILDSENKQKQILTLDTPYLKTSEWCQLKDHFGEQAVEIDCTFSPDDGADALRHAISNLRTQAENAVRSGHSELFLTDEHIGSDRVAVAMILATAAVHTHLIRKGLRSYASINVRASECIDPHYVAVLIGVGATTVNAYLAESAIAYRHSQGLFGTMTLEQCLDNHHHAICNGLLKIMAKMGIAVVSSYRGAYNFEAVGLSRALVNDLFPGMTAKISGEGYASLQRSALLRHQNAFAANKKALDVGGFYRQRASGDSHAYTAELMRKLQKAVSSDSYTTYLEFSKEVHQLPPVYLRDLLGFNWSKQPIPIEEVEPITEIRRRFITPGMSLGALSPEAHETLAIAMNRIGAKSVSGEGGEAPERFHPYENGDNANSPIKQVASGRFGVTAAYLGACEEIEIKVAQGAKPGEGGQLPGFKVTDMIAKLRHSTPGVTLISPPPHHDIYSIEDLAQLIYDLKQINPNARVGVKLVSSAGIGTIAAGVAKAHADSIMISGNVGGTGASPLTSIKYAGTPWEMGLSEANQVLTLNGLRHRVKLRTDGGLKTGRDIVIAAILGAEEFGIGTLSLIAMGCLMVRQCHSNKCPVGICTQDKAMRQKFIGTPERVINLMTFIAEEVREILAKLGVRSLKEIIGQTDLLSQVNRGADHLDDLDLNPVLAKVDANTEARYFQIDGFRNPVPDSLDAQMLQDAQAVFTRREKTQLTYSVRNTQRAIGTRFSAEITRNFGMDSLADGHVHVRLRGSAGQSLGAFSVKGLTLEVFGDANDYVGKGLSGATIIVRPTVSSPIDGHTNTIIGNTVLYGATAGKLFAAGRAGERFAVRNSGAETVIEGCGANGCEYMTGGLAVILGSVGPNFGAGMTGGMAFVLDEDNSFERHANPDNIIWQRLASSHWETVLRSMIADHAVKTDSPWAHRVLDEWDLWSQKFWQICPKEMLGRLEYPLDDKKNTEDQKEKGKAGKPELKEQEGAF

SEQ ID NO: 30110 - protein, 595 aa, Zymomonas mobilis subsp. mobilis ZM4
MCRQLSGAAIVLETLKDMGVDLIFGYPGGAVLPIYDALYQDEGIRHILARQEGGAVHAAEGYARSTGKPGVVIVTSGPGATNAVTGIADAMLDSIPLVVFSGQVATNLIGTDAFQEADTIGITRHCTKHNYLVRDPKDLAQTIVEAFHLATSGRPGPVVIDLPKNVQTAVIDYIKPDPNKRMHRGYRPRVKADPVEITNALDMIAKAKRPVFYTGGGVINSGPDASKALRELADLTGVPVTSTLMGLGAFPASSQQWLGMLGMHGTYEANFAMHDADLVVALGSRFDDRVTCRVDSFSPHSKKIHVDIDRSSINRIIHVDLPIVGDVGSVMQDMVALWKEKHYQMQDISAWWVQIDEWRAKQCLNFTKQGNEIMPQQAIRSLWEATKGKNPIVSTEVGQHQMWTAQYFGFDSPNHFLTSGGLGTMGYGFPSIIGAQVGNPDSLCMTIAGEASFQMNIQEMATVAQYRLPVKIFILNNRFMGMVRQWQDLLYDHRRSQSYSEALPDFVALAKAYGWNALKIEKPSQLEDGIKTMLETPGPVLVDCQVAQLANCLPMVPPGAGQTEMILESDITDNHVKKPEYTPSAAPSSATTIRG

SEQ ID NO: 30111 - protein, 568 aa, Zymomonas mobilis subsp. mobilis ZM4
MSYTVGTYLAERLVQIGLKHHFAVAGDYNLVLLDNLLLNKNMEQVYCCNELNCGFSAEGYARAKGAAAAVVTYSVGALSAFDAIGGAYAENLPVILISGAPNNNDHAAGHVLHHALGKTDYHYQLEMAKNITAAAEAIYTPEEAPAKIDHVIKTALREKKPVYLEIACNIASMPCAAPGPASALFNDEASDEASLNAAVEETLKFIANRDKVAVLVGSKLRAAGAEEAAVKFADALGGAVATMAAAKSFFPEENPHYIGTSWGEVSYPGVEKTMKEADAVIALAPVFNDYSTTGWTDIPDPKKLVLAEPRSVVVNGIRFPSVHLKDYLTRLAQKVSKKTGALDFFKSLNAGELKKAAPADPSAPLVNAEIARQVEALLTPNTTVIAETGDSWFNAQRMKLPNGARVEYEMQWGHIGWSVPAAFGYAVGAPERRNILMVGDGSFQLTAQEVAQMVRLKLPVIIFLINNYGYTIEVMIHDGPYNNIKNWDYAGLMEVFNGNGGYDSGAGKGLKAKTGGELAEAIKVALANTDGPTLIECFIGREDCTEELVKWGKRVAAANSRKPVNKLL

SEQ ID NO: 30112 - protein, 469 aa, Zymomonas mobilis subsp. mobilis ZM4
MPEKSPKLSKTLSSFHLWGIAVGLVISGEYFGWSYGWATAGTMGFLIATVIVAAIYTSFIFSFTELTCSIPQAGGPFAYSFRALGKWGGAIAGMATLVEFLFAPPAIALAIGSYLNVQFPSLSPKMAAACAYIVFMALNIVGVRIAATFELFITVAAIFELLVFMGVVAPAFSWEQFLHDGWGVASHFDIQAIGGIFAAVPFAIWFFLAIEGVAMAAEEAKNPRRSIPIAYTAGILTLVSLAFGVMVFAGGSMDWHQLANLNDPLPQAMKHVVGAHSGWLHMLVFLGLFGLVSSLHGIIMGYGRQIFALARAGFLPATLGKLHIKLQTPYAATIAGGLVGIAAIFADDVLSFGGHSLTAILVTMSVLGSLTMYVLSMVSLFRLRQTMPDLPRPYKAPLYPFLPALALIGAFFLLAAVIYYNAGISFIYALLMCIACPLCLYSYKRSQNKKTEENDITTSAILAAEGAEE

SEQ ID NO: 30113 - protein, 306 aa, Zymomonas mobilis subsp. mobilis ZM4
MKDTNTPSENTQHCGLVAIVGAPNAGKSTLVNALVGQKIAIISPKAQTTRARLMGIALQDQTQILLVDTPGIFTPKKRFDRAMVAAAWGSAEGANLVALVVDASSGLTRRIEPLVEAVAARKEPKVIILNKVDITPKAELLALAQKLYEAIKPEALFMVSATTGDGVADLKHSLADMMPESPWHFPEDQVSDVTDRMLAAEITREQIFLQLHDELPYAAAVETEKYEERKDGSVAIHQQILIARDSQKAIVVGHHGARLKEIGSKARAELSQILGCKVHLFLHVKVSPRWDEDRDIYNEIGLEWVK

SEQ ID NO: 30114 - protein, 498 aa, Zymomonas mobilis subsp. mobilis ZM4
MIFGRVKPLDAILETAKKKSLHRSLGAFQLTMLGIGAIIGTGIFVLTAEAAQKAGPGMMLSFIIAACVCGVAAFCYAEMAAMVPVSGSAYTYSYAVMGELVAWMVGWALILEYAVAASAVSVGWSGYVVGLIEHLTGSHLPASVLVFTKGPFNGGIINLPAAFIALLIMSLLIRGTKESATASAILVVIKITALSLFIFLAIPAMKMENFHPFAPLGFSGISAAAASIFFAYVGFDAVSTAAEETKDPQRNMPIGLVGSLAICTLFYMLVSAGVIGGVGAQPVFDAAHQHALPAGSSEMAAACSTLKDSHVVCSNEALAWSLRKIGWNKVGNLIALAAGFALPSVILMMIFGQTRIFFVMSRDGLLPGFFAKVHPRFKTPYIVTVMTGLAVATFSAFFPVGILADISNAGTLFAFAMVAIAVLVLRHTDPKRHRPFKTPCVYLIAPLAALGCLYLFVSLPLMTLKMFFGWTVVGLVVYFLYGYRHSNIARNISDDEEA

SEQ ID NO: 30115 - protein, 311 aa, Zymomonas mobilis subsp. mobilis ZM4
MKLLAGNSNLPISQAIADYLEIDLTKASVRRFADEEIFVEIRENVRGQDVFVIQSTCWPTNDNLMELLICIDALKRASARRITAVIPYFGYARQDRKPGPRTPISAKLVANLITVAGASRVLSVDLHAGQIQGFFDIPTDNLYAAPVMSADILARFPDKKLTVVSPDVGGVVRARALAKRLDNAPLAIVDKRRERPGESEVMNIIGDVSGRFCILIDDIVDSAGTLCNAAEALLNAGAEGVIAYVTHGVLSGAAVARVEKSSLQELVVTDSIGMRPEVEQCAKIRQLSLAPLLAEAIRRIADETSVSSLFD

SEQ ID NO: 30116 - protein, 336 aa, Zymomonas mobilis subsp. mobilis ZM4
MQQSLQTVDDSTPYQDPSFSQFIKHGRNVILSEATAMHHLAASIGVDFAKAVSMLLETRGRIIVSGIGKSGHVGRKIAATLASTGSSAFFIHPAEAAHGDLGMMMNGDILIAISFSGRTRELLPMISYAQTLQVPVIVITSQKGDVLPKEATLSLRLPELKEACPANIAPTTSTTLTMALGDALAVSMMRHRGFSRDAFKLLHPGGQIGFRLQSISRLMHEGAALPLVHCKEPMRDVLVTMSRKSFGSAGVVNDEGELMGVITDGDLRRHADHLMESAAEDVMTSDPVTMRADDMAEDALILMTEKRITSLFILGKNGAKQPVGLLHIHDLTRMGL

SEQ ID NO: 30117 - protein, 579 aa, Zymomonas mobilis subsp. mobilis ZM4
MDDKHQQRNLVIVTILSALILFGWSFVTKHWLSTPPAPTQQGKNQPKAELTAEESGDKPLKPVDQVLQETPRLPILTESVEGSVNLKGLRLDDLTLIRHRETLAKNSPAVRLFSPAGTENAWFTSFGWTGENVALPNADSLWKADSDKLTADHPVNFYWNNQQGQIFRITLSVDHDYMFNATESVINRGNSPVIVQPYVLTNHQGVFKTASSWTLHTGPIGVFNGSVNYHVDFADIDKATNNSIRNNTQGGWIGFSDKYWLTALAPHNQKIAIDTDFRSSSNHHYQADFTVAPVVVAAGKTASTSVDVFAGAKEVRVLDRYRDQLHLPHFDKAIDWGWFAIIEKVFFYYLDWLFLHVGNYGLAIILMVFTIRALIFPIANKQYASMASMRRLQPKMQAVRERYKNDEARMRQELVTLYQKEKVNPFAGCLPMFIQFPIFIALYKTLLVTIESRHQPFILWIKDLSAPDPLTPFNLFGLLHFTPPHFLMIGVLPIILGITMWLQFRASPQQLEPAQQQIMSFLPLISVIFMAPLAAGLQVYYIFNNLISLAQMMWLQHRHSTPEERQDRAERKRPSKKKA

SEQ ID NO: 30118 - protein, 423 aa, Zymomonas mobilis subsp. mobilis ZM4
MARIVMKFGGTSVAGLERIRNVARRVQKEVEDGNEVAVVVSAMSGETDRLVGFCREAAPLYDPAEYDAVVSSGEQVTSGLLAIVLKSMGVKARSWFGWQIPIHTTDAYANSRIESIDTERLIKAMSSKEVAVVAGFQGVSDEGRVTTLGRGGSDTSAVALAAALDADRCDIYTDVDGVYTTDPRIVSRARRLDRVTYEEMLELASVGAKVLQTRSVGLAMKAKTRLRVLSSFGDPDLSPEGGTLIVSEDEIKENTMERQIITGIAYDKSEAKVTLTGVPDKPGAVAQIFSLLADANIHVDMIVQIAYEGHITDVTFTVPKAQLSQVLDILEKGKEKIGFQKALKNDNVCKVSIVGVGMRSHPGVAATMFDALAKRGINILAITTSEIKVSVLIDDAYTELAVRVLHTAYGLDADNKPVEEAIA

SEQ ID NO: 30119 - protein, 637 aa, Zymomonas mobilis subsp. mobilis ZM4
MKTLLIGGGIIAAMTLAVTFFDGNGGRDHNTTSVAYSEFLNRVDNNGVKDVTIGHDELSGHFTDNSAFKTVAPSDPLLVQRLQSKNVTFRALPEDTVSFWQILLSQFLLPFILFVGLGFLFVRQMQKNGGGGAMGFGKSRARLLTEKQGRVTFKDIAGIEEAREELEEIVDFLKDPTRFSRLGGKIPKGALLVGPPGTGKTLLARAIAGEAGVPFFSISGSDFVEMFVGVGASRVRDMFEQAKKNAPCIIFIDEIDAVGRHRGAGLGNGNDEREQTLNQLLVEMDGFEANEGIIILAATNRPDVLDPALLRPGRFDRQVIVPRPDIEGRLKILQVHMKKTPLAPDVDVRTIARGTPGFSGADLANIVNEAALLAARKGKRLVAMSEFEEAKDKVMMGAERRSVIMTEEEKRSTAYHEAGHALVSLHIPGCDPLHKVTVIPRGRALGVTWNLPERDQLSINIKQMKARLALCFGGRIAEQLVYGEDSLNTGASNDIQQATDMARAMVTEYGMSPKLGWLRYRENQDEVFLGHSVSRSQNISEDTAKIIDQEVRVLVEEGESRARQVLTEHIDELHRLANALIEYETLSGEEAKRAIAGEKITTIEVKPQVTIPLSGGASGVPKSPPFNGWGNAAPQGA

SEQ ID NO: 30120 - protein, 527 aa, Zymomonas mobilis subsp. mobilis ZM4
MTRVLISDKMDPRAAEVFRERGVEVDQITGLSPEELKKIINDYDGLAIRSATKVTKDIIAEAKNLKVIGRAGIGVDNIDIPAASSAGIVVMNTPFGNSITTAEQAIALMFALARQIPEANASTQASKWEKNRFMGVEVSGKTLGLIGAGNIGSIVADRAVGLKMKVIAYDPFLTPERALELGIEKADLETLLHKADFITLHVPLTDQTRNILSRENLAKTKKGVRIINCARGGLIDEEALKDALESGHVAGAALDVFLKEPAKENPLFGVPNFIATPHLGASTTEAQVNVAIQVAEQMADYLLTGGVSNALNMPSLSAEEAPRVRPYMALSEQLGRLLGQLEGDKIKSVSIEVEGAAAHLDQKPITSAVLSGLMGVYSQSVNMVNAPFLARERGLDVREIRHDREGAYHTLIRVTSRDDKGQEKSVAGTLFGSEGTRLVEIFGIKIEANLSGDMLYIVNDDAPGFIGRLGTLLGKAGVNIGTFHLGRRNTGGEAVLLLSVDSPVTAGKMAKVAELSGVREVKSLHFL

SEQ ID NO: 30121 - protein, 595 aa, Zymomonas mobilis subsp. mobilis ZM4
MKQATKATPKKRKTLGQLRMLWQFASRYPIWIFGALLALLLSSTATIAIPAAFKMVIDRGFGGDSGAHDINLYFCYMLGIILLLALATAARFYCVSWLGERVIADIRMAISRHLMQMPPAFFEENRPSEIASRLTTDTTLIDQIVSSTASVALRNLITGLGGTAYLFMLAPHLTAMLLGGIPIVVFPIIFIGRRLQRLSRKSQDRIADLSSLITETLGAMKIVQAFGQEDRESDRFGQAVQLTFETAKKRITLRAFMTALVILLIFTAIILIMWRGALDVAAGLVSGGTIAAFVLTGGVVAGAFGALSEVYGDLLRGAGAASRLNDLLAEKPAILSPAHPKALPHSTEGCLTFQDVSFRYPSRPDTEALSHFSLELKAGERLAVVGSSGAGKTTLFQLIQRFYDPTSGVISMEGVDLKEADLSDIRSHIAVVPQETVIFAASARDNLRYGRWDASDEELWQAARAAHAEEFLKALPEGLDSFLGEGGARLSGGQRQRIAIARAILRDAPLLLLDEATSALDAESEQAVQQALEKLMKGRSSIIIAHRLATVRHADRIIVMDKGKIVEEGSHDQLIQKNGLYARLAQLQFSDQKIA

SEQ ID NO: 30122 - protein, 477 aa, Zymomonas mobilis subsp. mobilis ZM4
MLKKYFGSRKKFRSLSSQQSHPHKKDQALSRNLSWPHLIALGVGAIVGTGIYTLVGVGADRAGPAVVIAFIIAGLICATAALGYAELSTLIPEAGGAYTYAYMAIGRHMAWIVGWSLILEYSLASSTVAVGWSAYLVGWLHSFGINLPAALLAGPHDGGIINLPAVIVALSIALLLTAGAKESATLTLALVILKLSALVLFVVLTMPAFHFEYYHPFMPYGFVSHISPDGKVRGVMAAAAILFFAFYGFDTVATAAEETKNPKRDLTIGIIGSMTISVLIYIGVAACLLGAAPFSEFIKSGEPLALILRNLHHETAAKWIAAAALVALPSVIMAMIYGQSRVFFVMARDHLLPPFLAKVNKHGTPSQVTLFTGIVIALIAGFFRLDELAELANAGTLVAFIAVGLSLIILRVREGERTRRFSCPFPFVIGSVTVIGCLYLFTSLPLHTTIRFLLWNAIGLVFYGSYNLYKRKKQKSL

SEQ ID NO: 30123 - protein, 385 aa, Zymomonas mobilis subsp. mobilis ZM4
MRLVYLDNNATTRVDPEILSAIIPYFSEHFGNPSSLHAWGRKAKTALRTARQQVQKLLNAKEEQEIIFTSGGTEANNTALLSALAFDPERNEIITSRVEHPAILSLCAWLQKYRDIKIHYIGVDAKGCLDIEAYRRALNPKTALVSFMYANNETGTLFPIEILSRMAHEAGSLFHSDAVQAIGKLPVSLHNSDIDMVSLSGHKLHAPKAVGVLYLRQGLKLQPLIRGGHQERGRRGGTENIPAIVGLGLAAEKAFNTISKDNAAIAALRDKLEQGLLALDSKALILGDREHRLSNTLNIAFENKDSEALLTFLDQSGIAASSGSACASGSIEPSHVLRAMRVPYPFAHGALRFSFSRENSEEDVSYVLEQMNKILKDPRSNRDIL

SEQ ID NO: 30124 - protein, 110 aa, Zymomonas mobilis subsp. mobilis ZM4
MADTINDRIKEVLEKSPVVLFMKGTPLFPQCGFSNQIVSILNAVGIEYDSVDVLQDPEIRQGIKVYSDWPTFPQLYVKGELVGGCDIVTEMYQSGELAELMQKENIARKN

SEQ ID NO: 30125 - protein, 394 aa, Zymomonas mobilis subsp. mobilis ZM4
MKIAKRAERIEPFYVLEVAKAAAQLSQDAGNDTKPMIHLTIGEPDFTAPPLVQEAAIRAIRAGATQYTPAIGLGLLRERISDWYRQRFGIDVPARRIVVTAGASAALQLICTALIEAGDEVLMPDPCYPCNRHFVIAAEGCPVVVPTTAAERYQLSAEKVAENWSDKTRGVLLASPSNPTGTSIHPEELRRIHAFVQSKGGITLLDELYLGLSHDDAFGQTGLTLDENVISINSFSKYFSMTGWRLGWLVAPEPLVPVIERLAQNFFLCPSTVSQHAALACFEPESIAEYERRRAEFKARRDWFIPALEKIGFKVPVAPDGAFYAWADCSEWFHAWDVPSSWEFAFEAMKRARVAISPGRDFGAAETARFVRFSTANSMDNLQEAVARLSALRP

SEQ ID NO: 30126 - protein, 401 aa, Thermus thermophilus
MPEAWIVEAVRTPIGKHGGALASVRPDDLLAHALSVLVDRSGVPKEEVEDVYAGCANQAGEDNRNVARMALLLAGFPVEVAGCTVNRLCGSGLEAVAQAARAIWAGEGKVYIGSGVESMSRAPYAVPKPERGFPTGNLVMYDTTLGWRFVNPKMQALYGTESMGETAENLAEMYGIRREEQDRFALLSHQKAVRAWEEGRFQDEVVPVPVKRGKEEILVEQDEGPRRDTSLEKLAALRPVFREGGTVTAGNSSPLNDGAAAVLLVSDDYAKAHGLRPLARVRAIAVAGVPPRIMGIGPVPATRKALERAGLSFSDLGLIELNEAFAAQALAVLREWSLSMEDQRLNPNGGAIALGHPLGASGARILTTLVHEMRRRKVQFGLATMCIGVGQGIAVVVEGMG

SEQ ID NO: 30127 - protein, 355 aa, Escherichia coli
  misc_feature (74)..(74): Xaa can be any naturally occurring amino acid
  misc_feature (88)..(88): Xaa can be any naturally occurring amino acid
  misc_feature (117)..(117): Xaa can be any naturally occurring amino acid
  misc_feature (122)..(122): Xaa can be any naturally occurring amino acid
  misc_feature (165)..(165): Xaa can be any naturally occurring amino acid
  misc_feature (213)..(213): Xaa can be any naturally occurring amino acid
  misc_feature (277)..(277): Xaa can be any naturally occurring amino acid
  misc_feature (312)..(312): Xaa can be any naturally occurring amino acid
  unsure (1)..(355): unsure at all Xaa locations
HHHHHHTDPALRAIIERCRELALRAPARVVFPDALDQRVLKAAQYLHQQGLATPILVANPFELRQFALSHGVAXDGLQVIDPHGNLAXREEFAHRWLARAGEKTPPDALEKLTDPLXFAAAXVSAGKADVCIAGNLSSTANVLRAGLRIIGLQPGCKTLSSIFLXLPQYSGPALGFADCSVVPQPTAAQLADIALASAETWRAITGEEPRVAXLSFSSNGSARHPCVANVQQATEIVRERAPKLVVDGELQFDAAFVPEVAAQKAPASPLQGKANVXVFPSLEAGNIGYKIAQRLGGYRAVGPLIQGLAAPXHDLSRGCSVQEIIELALVAAVPRQTEVNRESSLQTLVEGLCGR

SEQ ID NO: 30128 - protein, 299 aa, Salmonella enterica subsp. enterica serovar Typhimurium
  misc_feature (6)..(6): Xaa can be any naturally occurring amino acid
  misc_feature (16)..(16): Xaa can be any naturally occurring amino acid
  misc_feature (20)..(20): Xaa can be any naturally occurring amino acid
  misc_feature (68)..(68): Xaa can be any naturally occurring amino acid
  misc_feature (98)..(98): Xaa can be any naturally occurring amino acid
  misc_feature (120)..(120): Xaa can be any naturally occurring amino acid
  misc_feature (140)..(140): Xaa can be any naturally occurring amino acid
  misc_feature (155)..(155): Xaa can be any naturally occurring amino acid
  misc_feature (158)..(158): Xaa can be any naturally occurring amino acid
  misc_feature (189)..(189): Xaa can be any naturally occurring amino acid
  misc_feature (226)..(226): Xaa can be any naturally occurring amino acid
  misc_feature (228)..(228): Xaa can be any naturally occurring amino acid
  misc_feature (266)..(266): Xaa can be any naturally occurring amino acid
  misc_feature (268)..(269): Xaa can be any naturally occurring amino acid
  unsure (1)..(299): unsure at all Xaa locations
SNAMTXKVGFIGLGIXGKPXSKNLLKAGYSLVVSDRNPEAIADVIAAGAETASTAKAIAEQCDVIITXLPNSPHVKEVALGENGIIEGAKPGTVLIDXSSIAPLASREISDALKAKGVEXLDAPVSGGEPKAIDGTLSVXVGGDKAIFDKYYDLXKAXAGSVVHTGDIGAGNVTKLANQVIVALNIAAXSEALTLATKAGVNPDLVYQAIRGGLAGSTVLDAKAPXVXDRNFKPGFRIDLHIKDLANALDTSHGVGAQLPLTAAVXEXXQALRADGHGNDDHSALACYYEKLAKVEVTR

SEQ ID NO: 30129 - protein, 647 aa, Saussurea medusa
MAGKGEGPAIGIDLGTTYSCVGVWQHDRVEIIANDQGNRTTPSYVAFTDSERLIGDAAKNQVAMNPTNTVFDAKRLIGRRFSDASVQSDIKLWPFKVTPGPAEKPMIAVMYKGEEKTFAAEEISSMVLIKMKEIAEAFLGSTVKNAVVTVPAYFNDSQRQATKDAGVISGLNVTRIINEPTAAAIAYGLDKKATSVGEKNVLIFDLGGGTFDVSLLTIEEGIFEVKATAGDTHLGGEDFDNRMVNHFVQEFKRKHKKDITGNPRALRRLRTSCERAKRTLSSTAQTTIEIDSLYEGVDFYSTITRARFEELNMDLFRKCMEPVEKCLRDAKMDKSSIHDVVLVGGSTRIPKVQQLLQDFFNGKELCKSINPDEAVAYGAAVQAAILSGEGNEKVQDLLLLDVTPLSLGLETAGGVMTVLIPRNTTIPTKKEQVFSTYSDNQPGVLIQVYEGERTRTRDNNLLGKFELSGIPPAPRGVPQITVCYDIDANGILNVSAEDKTTGQKNKITITNDKGRLSKEEIEKMVQEAEKYKSEDEEHKKKVEAKNALENYAYNMRNTVKDEKIGEKLTPGDKKKIEDAIDEAISWLDSNQLAEADEFEDKMKELENVCNPIIAKMYQGGAGDAAGGMDEDAAPSGGGAGPKIEEVD

SEQ ID NO: 30130 - protein, 649 aa, Medicago sativa
MAGKGEGPAIGIDLGTTYSCVGVWQHDRVEIIANDQGNRTTPSYVAFTDSERLIGDAAKNQVAMNPTNTVFDAKRLIGRRISDASVQSDMKLWPFKVTAGPGEKPMIGVNYKGEEKLFASEEISSMVLIKMREIAEAYLGVTIKNAVVTVPAYFNDSQRQATKDAGVIAGLNVLRIINEPTAAAIAYGLDKKATSVGEKNVLIFDLGGGTFDVSLLTIEEGIFEVKATAGDTHLGGEDFDNRMVNHFVQEFKRKNKKDISGNPRALRRLRTACERAKRTLSSTAQTTIEIDSLFEGVDFYTTITRARFEELNMDLFRKCMEPVEKCLRDAKMDKSTVHDVVLVGGSTRIPKVQQLLQDFFNGKELCKSINPDEAVAYGAAVQAAILSGEGNEKVQDLLLLDVTPLSQGLETAGGVMTVLIPRNTTIPTKKEQVFSTYSDNQPGVLIQVYEGERTRTKDNNLLGKFELSGIPPAPRGVPQITVCFDIDANGILNVSAEDKTTGQKNKITITNDKGRLSKEEIEKMVQEAEKYKSEDEEHKKKVEAKNSLENYAYNMRNTIKDEKISSKLSGGDKKQIEDAIEGAIQWLDANQLAEADEFEDKMKELETICNPIIAKMYQGGAGEGPEVDDDAAPPPSGSGGAGPKIEEVD

SEQ ID NO: 30131 - protein, 381 aa, Solanum lycopersicum
MAMRRVASTAARAIASPSSLVFTRELQASPGPKKIVGVFYKANEYAEMNPNFLGCAENALGIREWLESKGHQYIVTPDKEGPDCELEKHIPDLHVLISTPFHPAYVTAERIKKAKNLQLLLTAGIGSDHVDLKAAAAAGLTVAEVTGSNTVSVAEDELMRILILVRNFLPGHHQVINGEWNVAAIAHRAYDLEGKTVGTVGAGRIGRLLLQRLKPFNCNLLYHDRLKMDSELENQIGAKFEEDLDKMLSKCDIVVINTPLTEKTKGMFDKERIAKLKKGVLIVNNARGAIMDTQAVVDACNSGHIAGYSGDVWYPQPAPKDHLWRYMPNQAMTPHISGTTIDAQLRYAAGTKDMLDRYFKGEDFPAENYIVKDGELAPQYR

SEQ ID NO: 30132 - protein, 850 aa, Cryptococcus neoformans var. grubii
MCMFHSRGRIEMASTPYNIARIIEFLPPHTSPKKGSRVAPSSDIMVRLALYYRPSDISARNFADARLLLAAIHTDIQPISNVRGKCYVRHKDRIPDLLEWKRLPDHFYFSKFFDPYIKREFEVIRTVNVNNIPSTVKDVLMRRYEYLITEREMVADLTDDFRICCCCRQWSSFQDSVKCESCREYYHMTCLQPPLLAKPAKGYSWVCPSCFFQRNTQPEGQKLLLQNDWSGTGKLRAAKTKMKSNTLDFTPDTMFRGWPWRYFGHVRSGRCNIPPGRYSLADYMEHVRSLSLAVPPWDVERINLALSSYSSMGREAAYHFMCHTVLSDFHPVHFTEEESAVFEAELERNGGLDVISCSKILKRTTSDILRFSYIWKNDKLKVENEALRQHRRVSVSHARQNRTLGPPSLGKMRIGDKSKVEDDETSLYGSSIGESTMRCATCSTKLGQVWWKSPRTVPGIAMCESCGSNYRKYGVISFVRSDDSKRIDHREHVAKKGKNEVNDQPIGSLWSSKHNQCACCRRVEPKSQLVRCRNCNFIAHTGCYGTTLLDQKSDWECDLCVNEKTEECHVEPHCVLCPRTPHLAMKVKKKTAEYNLLTALKPSEGRRWAHLLCSAWTNGVEYGDAVSFKQIEGIMSIRGDIWAAACSLCGQNDGAVIKCSDCDIQFHVSCAWQCGFTLGFEFILAKPGKSQNQIVIKFKESEGVMNAGAWCKSHDLSNRTVYDMFDVESDGGETAFQVYVRAYKSATWHSAFPLLRKAIRLELITQSPSNTDSPENIQTDVVRCDSCGVLNSPMWHKHDTGTVPSGAPSDPADDSKSVSKSAVGDERGSEERQLCHLCWYQINLNGAPSF

SEQ ID NO: 30133 - protein, 847 aa, Cryptococcus neoformans var. grubii
MCMFHYPGPIEMASTPYNIARIIEFLPPHTSPKKGSRVAPSSDVMVRLSLYYRPSDISARNVADFRLLLAAIHTDIQPISNIRGKCYVRHKDRIPDLLEWKRSPDHFYFVKFFDPYIKREFEVIRTASVNNVPAAVKEVLLRRYEYLITEREMVADLTDNFRNCCRCRGWTSFQDSVKCESCREHYHMSCLQPPLLAKPAKGYSWVCPSCVFQRNTQTERQKVPLRIDSSGSSKPRRLKSKSKLITSDFTPDTMFRGWPWRYFGHSRSGRRHISSSRHSLADYMEHVKRLHLVVPPWDLERLNLALSSYTSMGRETAYSFMSHTALTDFRSIHFTEEESVVFEEELERNGGLDVISCSKILKRSTSDILRYSYLWKNEQLKNENEALRQHRRISISHARQNRTLGAPSLGKMRIGDKSEVEDDETSIYSQPLAGTGSTMVCATCSTKVGQVWWRCPRTVPGIAMCESCGSNYRKYGVISFSRSEDSKKSDRREHIGKKSKNESSHQTAGSLWSSKLNQCACCRRVEPSSQLFRCRNCSFIAHTGCYGIASLDQRSDWECELCSNEKTEECRVEPRCVLCPRTPQLTVKKKIRNVTEFNLLAALKPSEGRHWAHLLCSTWTTGVEYANTTLFKQVEGIMNIERNRWMTACSLCGQSDGAVINCTDCDIEFHASCAWLSGLTLGFEFNLAKPGKSQSEVVVKFKDSEGVMSAGVWCKSHDLSGRVIHEIFDVEPDGGETAFQVYVGAYKSPTWNSTFPLLRKAKRLELVTPSSLKLEETETNVEKCDFCGVSDSPMWHKDIDRTVQSDAASANEPPRDMGIVPKTAEDGQGREEQLPLLCHLCWFENQN

SEQ ID NO: 30134 - protein, 846 aa, Cryptococcus neoformans var. neoformans
MCMFHSRGPIEMASTPYNIARIIEFLPPHTSPKKGSRIAPSSDVMVRLALYYRPSDISARNFADFRLLLAAIHTDIQPISNVRGKCYVRHKDRIPDLLEWKRLPDHFYFTKFFDPYIKREFEVIRTANVNNIPSTVKDVLMRRYEYLITEREMVADLTDDFRICCCCRQWSSFQDSVKCESCREYYHMTCLQPPLLAKPAKGYSWVCPSCFFQRNTQQEGQKLLLHNNSSGTGKLRAAKTKIKSNTLDFTPDTMFRGWPWRYFGYVRSGRRNISPGRYSLADYMEQVKSLRLAVPPWDVERINLALFSYTSMGREAAYRFMCHTVLSDFHPVHFTEEESTVFEAELERNGGLDVISCSKILKRTTSDILRFSYIWKNNKLKDENEALRQHRRVSVSHARQNRTLGAPSLGKMRIGDKSKVEDDETSLYGSSTGESTMRCATCSTKLGQVWWRSPRTVPGIAMCESCGSNYRKYGVISFVRSEDSKKLDRREHVTKKGKSELSDQPAGSLWSSKHNQCACCRRAEPKSQLARCRNCNFVAHAGCYGTALLDQNSDWECDLCVNEKTEECHVEPHCVLCPRTPRLAMKVKRKAAEYDLLTALKPSEGRRWAHLLCSTWTNGVEYGDTVSFKQIEGIMSIRGDIWAATCSLCGQNDGAVIKCSDCDIQFHVSCAWQCGFTLGFEFNLAKPGKSQTQIVTRFKENEGVMNAGAWCKSHDLNNRIVYDIFDVEPDSGETAFQVYIRAYKSATWHSAFPLLRKAIRLELITQSPSNADSPENIEANVVRCDSCGVLDSPMWHKHDTETVPSDETPCGDPADDSKSVSKFVVNDERRPEGRQLCHLCWCTDSN

SEQ ID NO: 30135 - protein, 847 aa, Cryptococcus neoformans var. neoformans
MCMFHYLGPIETASTPYNIARIIEFLPPHTSPKKGSRVAPSSDVMVRLSLYYRPSDISARNVADFRVLLAAIHTDIQPISNIRGKCYVRHKDRIPDLLEWKRSPDHFYFVKFFDPYIKREFEVIRTASVNNVPAVVKEVLLRRYEYLITEREMVADLTDNFRTCCRCNAWSSFQDSVKCESCREHYHMSCLQPPLLAKPAKGYSWVCPSCVFQRNTQIERQKVPLRIDSSGFSKPRRSKSKSKLITSDFKPDTMFRGWPWRYFGHSRSGRRHISSSRHSLADYMEHVKRLHLVVPPWDLERLNLALSSYTSMGREAAYNFMSHTMLTDFRPIHFTEEESVVFEEELERNGGLDVISCSKILKRSTSDILRYSYLWKNEQLKDENEALRQHRRISISHARQNRTLGAPSLGKMRIGDKSDIEDDETSIYSQPLAGTGSTMVCATCSTKVGQVWWRCPRTVPGIAMCESCGSNYRKYGVISFARSEDSKKSDRKEHVSRKGKDESSHQTAGSLWSSKLSQCACCRRAEPNSQLFRCRNCSFIAHTGCYGIASLDQKSDWECELCSNEKTEECRVEPRCVLCPRTPHLTSKKKIKNVTEYDLLAALKPSEGRHWAHLLCSTWTNDVKYANATLFKQVEGIMSIGRNRWMAACSLCGQSDGAVINCSECDVEFHASCAWQSGLTLGFEFNLAKPGKSHNEIVVKFKDSEGVMSAGVWCKSHDLSGRVIHEIFDVEPDGGETAFQVYIGAYKSPTWNSAFPLLRKAKRLELITPSSLKLEETETNVEKCDLCGVSDSPMWHKDNDGTVQSDAASAKELPRDMGIVPKTAKDGQGREQQLRLLCHLCWFKNQN

SEQ ID NO: 30136 - protein, 235 aa, Oryza sativa Indica Group
MAPRAATVEKVAVAPPTGLGLGVGGGVGAGGPHYRGVRKRPWGRYAAEIRDPAKKSRVWLGTYDTAEEAARAYDAAAREFRGAKAKTNFPFASQSMVGCGGSPSSNSTVDTGGGGVQTPMRAMPLPPTLDLDLFHRAAAVTAVAGTGVRFPFRGYPVARPATHPYFFYEQAAAVAAAEAGYRMMKLAPPVTVAAVAQSDSDSSSVVDLAPSPPAVTANKAAAFDLDLNRPPPVEN

SEQ ID NO: 30137 - protein, 485 aa, Selenomonas ruminantium
MDRINQHTAPVYEAMLELRKRRVVPFDVPGHKRGRGNPELVDFLGEKCVGVDVNSMKMLDNLSHPISVIKEAEELTADAFGAQHAFFMVHGTTSAVQAMVLSTVRAGEEILLPRNVHKSVINALVLCGGIPVYVPVRVNHQIGIATGMALSDVERAIRQHPQARPSLSIIRLTMALPLDLKGIVELAHQAGMKVLVDEAHGTHLYFGDNLPISGMAAGADLAAVSMHKSGGSLTQSSIMLCGKDVDAEYVQQIINLTQTTSASYLLISSLDLSRRNLALHGRESFEKVSSMAEYARAEINEIGGFYAYGRELIDGDSVFDFDVTKLSVFTQGIGMTGIEVYDMLRDEYDIQIEFGDIGNILAYISIGDRIRDIERLVGALEDIADRSAAADRKELYCGEFIAPELVMSPREAFYAQGEKLPLEKTVGRVAGEMLMCYPPGIPILTPGERITQEIPDYIEYAREKGCSLQGTQDPECREMRILTEI

SEQ ID NO: 30138 - protein, 307 aa, Cucumis sativus
MIAESMLLNPTSHISTWDSLDDPSPAISSYFSTAHVSPLDSPTAALMDFDSSLWEDPDLPAPVDAYSCDQFRMYEFKVRSCARGRSHDWTKCPYAHTGEKARRRDPRKFNYSGAECPDLRHGCCKKGDACEYAHGTFEIWLHPDRYRTQPCRDGTGCRRRVCFFAHTSEQLRIPGKQSVRSPRAREMAIPAVSSPTSILLSPSSDSPPLSPISPVISGGESLSRLVALMHSLRLDELKTNPGVSSFSPNLRRSSGAAFDLWDRGNEEEPAMERVESGRNLRAQMYAKLMRENSVDRVRPMISAGSLN

SEQ ID NO: 30139 - protein, 242 aa, Oryza sativa Japonica Group
MVTVREEMRKGPWTEQEDLQLVCTVRLFGERRWDFIAKVSGLNRTGKSCRLRWVNYLHPGLKRGRMSPHEERLILELHARWGNRWSRIARRLPGRTDNEIKNYWRTHMRKKAQERKSNMSPSSSSSSLTYQSCHPETPSMIIGIEEQELHGGSGCITSIMKSTPVDMDGYPMDQIWMEIEAPNVLPGPCFDEAKDSASNSLSGPLLPYPMWDYYCPETCLRMDDEIKVAPQFGYGKGVGPCY

SEQ ID NO: 30140 - protein, 155 aa, Codonopsis lanceolata
MALIPSIFGGRRSNVFDPFSHDIWDPFQGLSSALANARDQETAAIANTRIDWKETPEAHVFKADLPGLKKEEIKVEVEDGRVLQISGERSKEQEEKTDTWHRVERSVGKFHRRFRLPENAKVDQVTASMENGVLTVTVPKKEEKEPEVKAIDISG

SEQ ID NO: 30141 - protein, 396 aa, Cystobacter fuscus
MNLANRLKVIKPSPTLALNTKAKELAAQGVDVVSFAAGEPDFDTPDFIKQAAIEALNKGFTKYTACAGIPELREAICAKLQRDNHLTYKPDQVLVSVGAKHSLYNIFQALLNEGDEVIILSPYWVSYPEMVQLAGGKPVIVHTREEDGFAPDPDAIRKALSPRTKALIINSPSNPSGVVFSRDTLAKIADAVRGHECLLVSDDIYEKLLYTGEFANIGNVAPDLLPRLVVVNGMSKAFSMTGWRLGYTAGPKWLIAGMQMVQDQSTSNASSFSQKAAVAALKGPDSIFEPMVKEYRARRDMVVELLNSFDGVRCRTPEGAFYVLPNISGLYGRSYKGTPLQGSIQVSEILLNDFRIAAVPGAPFGVDENIRLSFATSREQLQKGLERFREFTASVR

SEQ ID NO: 30142 - protein, 356 aa, Saccharum officinarum
MASLTDLVNLSLSDTTEKIIAEYIWIGGSGMDLRSKARTLSGPVTDPSKLPKWNYDGSSTGQAPGEDSEVILYPQAIFKDPFRRGNNILVMCDCYTPAGEPIPTNKRHNAAKIFSNPEVAAEEPWYGIEQEYTLLQKDTNWPLGWPIGGFPGPQGPYYCGIGADKSFGRDIVDAHYKACLYAGINISGINGEVMPGQWEFQVGPSVGISSGDQVWVARYILERITEIAGVVLTFDPKPIPGDWNGAGAHTNYSTKSMRNEGGYEVIKAAIEKLKLRHKEHIAAYGEGNERRLTGRHETADINTFSWGVANRGASVRVGRETEQNGKGYFEDRRPASNMDPYVVTSMIADTTILWKP

SEQ ID NO: 30143 - protein, 357 aa, Saccharum officinarum
MASLTDLVNLDLSDCTDKIIAEYIWIGGSGIDLRSKARTVKGPITDPSQLPKWNYDGSSTGQAPGEDSEVILYPQAIFKDPFRKGDNILVMCDCYTPQGEPIPTNKRYNAAKVFSHPDVAAEVPWYGIEQEYTLLQKDVSWPLGWPVGGYPGPQGPYYCAAGADKAFGRDVVDAHYKACLYAGINISGINGEVMPGQWEFQVGPSVGISAGDEIWVARYILERITEIAGIVLSLDPKPIQGDWNGAGAHTNYSTKSMREPGGYEVIKKAIEKLGKRHKEHIAAYGEGNERRLTGRHETADINTFKWGVANRGASIRVGRDTEREGKGYLEDRRPAFNMDPYVVTGMIAETTILWKGN

SEQ ID NO: 30144 - protein, 367 aa, Saccharum officinarum
MALLSDLINLDLSDCTEKIIAEYIWVGGSGMDVRSKARTLSGPVDDPSKLPKWNFDGSSTGQAPGDDSEVILCPRAIFRDPFRKGENILVMCDCYEPNGKPIPSNKRHGAATIFSHPDVMAEEPWFGIEQEYTLLQKDTNWPLGWPLGGYPGPQGPYYCAAGADKSYGRDIVDAHYKACLYAGIDISGINGEVMPGQWEFQVGPAVGVSAGDQLWVARYILERITEIAGVVVSFDPKPIPGDWNGAGAHTNYSTKSMRSDGGYEVIKKAISKLGLRHREHIAAYGDGNERRLTGRHETADINTFIWGVANRGASVRVGRDTEKEGKGYFEDRRPASNMDPYVVTSLIAETTILWEPSHSNGKDAVAP

SEQ ID NO: 30145 - protein, 165 aa, Saccharum officinarum
IEAGDHIWISRYILERITEQAGVVLTLDPKPIQGDWNGAGCHTNYSTKTMREDGGFEEIKRAILNLSLRHDLHISAYGEGNERRLTGKHETASIDTFSWGVANRGCSVRVGRDTEAKGKGYLEDRRPASNMDPYIVTGLLAETTILWQPTLEAEVLAAKKLALKV

SEQ ID NO: 30146 - protein, 716 aa, Lactobacillus rhamnosus
MANFNDPFFNHGMDDVFNQMLQGMGKGESARYVVNGHEMTPDEFAQYRATGQLPKQGDEIPVETTGKQAVKKGGILEKLGRNLTQEAKDGLLDPVIGRDHEIQETAEILSRRTKNNPILVGDAGVGKTAVVEGLAQAIVKGNVPESIKDKQIWSIDLSNLEAGTQYRGSFEEKIQNLIKEVKAAGNVILFFDEIHQILGAGATGGEESGGKGLADIIKPALSRGEITVIGATTQDEYRNTIMKDSALARRFNDVTINEPSAADTVKILEGVKKLYEQHHHVQLPENVLKAAVDYSIQYIPQRSLPDKAIDLIDMTAAHLASKHPIVDKVELEKQIKDLNAQKDAAAKAEDFEKAANLKKEIADKQHQLEGTNNEKPVVATPNDVAAAVERLTGIPVSKLGASDIERLKGIGKRLKGKVIGQDEAVDMVARAIRRNRAGFDEGNRPIGSFLFVGPTGVGKTELAKQLALDLFGSKDAIIRLDMSEYSDRTAVSKLIGTSAGYVGYNDNKNTLTEQVRRNPYSIVLLDEIEKADPQVLTLLLQVLDDGRLTDGQGNVVDFKNTVIIATSNAGFGNEALTGEKEKDEDLMKRLAPYFRPEFLNRFNGIVEFSHLTKNDLGKIVDLMLEDVNKTLAKKGITLTVTDAAKDWLIAQGYDEAMGARPLRRVIERNIRDKVTDFYLDHLKAKKLQADLIDGAIIVSEVQPASDKPKKEASGAK

SEQ ID NO: 30147 - protein, 364 aa, Aminobacter lissarensis
MATYHLKIISKRDEGNDTASLWLEVPQDLRGAFSYQPGQFLTVEREQSGERISRQYSLSSTPGAHRDLRITVKKIPGGAVSPWLVDIAGQGQALEVQVPRGRFFRGFNESRHVLMLACGSGIAPVLSIARHLLALDAGHRVTIVYGNRTPDAIILRDEVRELAESYPDVCRVEHVMSRAGEGWQGARGRIDRAFILSRMEDWLAAGQGLPPSIFLCGPQEFMDAAEATFTEKGVALKDIHRESFDLVLNDDDDEPGLSLAGVNDPGEAGACERIVAVVGGEEYEAVPEAGESILAALIRAEADVPFSCQEGTCASCISKLTEGSATVRPAVLQTLRQDDLDEGVTLACLSRPTTKHVRIDFDEI

SEQ ID NO: 30148 - protein, 751 aa, Silicibacter pomeroyi DSS-3
MPKAKITNEEALAFHLEPTPGKWEVQATVPMTTQRDLSLAYSPGVAVPCEAIAADPGLAYDYTNKGNLVAVISNGTAVLGLGNLGALGGKPVMEGKAVLFKRFADVNSIDIELDTEDPDEFCRAVRLMGPTFGGINLEDIKAPECFIIEQRLKEEMDIPVFHDDQHGTAVICAAGLINALHISGKKIEDVKIVLNGAGAAGIACIELLKTMGARHENCIVCDTKGVIFQGRTEGMNQWKSAHAIKTELRSLEEAMKGADVFLGVSVKGAVTQEMVQSMADNPVIFAMANPDPEITPEEAHEVRPDAIVATGRSDYPNQVNNVLGFPYLFRGALDIHARAINDEMKIACAHALAALAREDVPDEVAMAYGKSLAFGRDYIIPTPFDPRLIHRIPPAVARAGMDTGAARRPIIDMDAYELGLKSRMDPTASILRGINARARKAQSRMIFAEGDDPRVLRAAVTYQRSGYGKALVVGRHDDVKAKLEAAGLGDAVRELEVVNAANTTHLETYKEFLYSRLQRKGFDNKDVHRLAARDRHVFSALMLAHGHGDGLVTGATRKSAHVLHQISHVFDADAAHGAAGITALLHKGKIVLIGDTLVHEWPDEHDLATIAERAADVARHMGLEPRVAFVSFSTFGYPISERTEKLTKAPKVLEARGVSFEFEGEMTVDVALNPRSKEAYPFSRLTGPANILIVPARHSASISTKLMQEMAGATVIGPILTGVDKPIQICSTVSTANDILNMAVLASAEIG

SEQ ID NO: 30149 - protein, 409 aa, Silicibacter pomeroyi DSS-3
MSAPKKVVLAYSGGLDTSIILKWLQTEYGCEVVTFTADLGQGEELEPARKKAELLGIKPENIHIEDVREEFVRDFVFPMFRANAVYEGLYLLGTSIARPLISKRLVEIAAEHGADAVAHGATGKGNDQVRFELSAYALNPEIRVIAPWRLWDLTSRTRLLEFAEAHQIPISKDKRGEAPFSVDANLLHTSSEGKVLEDPGVEAPDYVAQRIVAVEDAPDTPEFIEVTFEKGDAVAINGEAMSPATILTRLNELGGKHGIGLLDFVENRFVGMKSRGVYETPGGTILLEAHRGIEQITLDSGAGHLKDSIMPRYAELIYNGFWFSPEREMLQALIDKSQEHVTGTVRLKLYKGSARTVARWSDHSLYSEAHVTFEEDAGAYDQQDAKGFIQLNALRLKLLATRNRRVAGK

SEQ ID NO: 30150 - protein, 190 aa, Silicibacter pomeroyi DSS-3
MAALARTGPGSSDFDLNPGTILPEGRRLRPAGVLVPVTLAHGAPRVILTKRSSALKHHPGQIAFPGGKQDEGDADVIAAALREAEEEIGLTRTLPQVLGTLPAHETVTAFTVTPVVAVVERTFDVRPEPGEVEEVFSVPLAHLMRPENYSVQSRRWRGQRRHYFTVPFGPYYIWGATARMLRGLAERMQQ

SEQ ID NO: 30151 - protein, 637 aa, Silicibacter pomeroyi DSS-3
MGKVIGIDLGTTNSCVAIMDGAQPKVIENSEGARTTPSIVAFTDEERLVGQPAKRQAVTNPSNTIFGVKRLIGRRVDDAEVTKDKKMVPFTIVNGGNGDAWVEAKGEKYSPSQISAVILGKMKETAESYLGEEVTQAVITVPAYFNDAQRQATKDAGKIAGLEVLRIINEPTAAALAYGLDKKNSQTIAVYDLGGGTFDVTILEIDDGLFEVKSTNGDTFLGGEDFDMRIVNYLADEFKKEHGVDLSGDKMALQRLKEAAEKAKIELSSTTQTEINQPFISMGANGQPLHLVMKLTRAKLESLVGDLIKKSMDPCKAALKDAGISPSDVDEVVLVGGMTRMPKVFEEVTKFFGKEPHKGVNPDEVVAMGAAIQAGVLQGDVKDVVLLDVTPLSLGIETLGGVFTRLIDRNTTIPTKKSQVFSTAEDNQNAVTIRVFQGEREMAADNKILGQFNLEDIPPAPRGMPQIEVTFDIDANGIVSVSAKDKGTGKEHKITIQASGGLSDEDIEKMVKDAEENAEADKARKELVEARNQAESLIHSTEKSVEEHGDKVDPTTVEAIELAIAALKDDLDKDGVSAEKIKSGLQNVTEAAMKLGEAIYKAQSEGGDDEPAAADARPSDDDIVDAEFEDLGEDKRK

SEQ ID NO: 30152 - protein, 322 aa, Silicibacter pomeroyi DSS-3
MTDRSSFIDTARQVVLDEARALDALSESLGDGFAEAVELILRTKGRVIVSGIGKSGHIGHKIAATLASTGTPAYFVHPAEASHGDLGMLSGDDVVLAISNSGEAPELANLLAFTRRFAIPLIGLSSKSESSLMQQADVHLLIPALGEACGFGMVPSISTTLTLAMGDALAIALMKYRDFRPENFRVFHPGGKLGARLSRVSDLMHGGEAVPLIAADTPMSEALLEISRKGFGVVGVTDGAGHLAGIVTDGDLRRHMSGLLDKTAAQVMTANPTTIAPDSLAEEAVAIMNARKITSLFVVDPAEPGVARGLLHIHDCLRVGLG

SEQ ID NO: 30153 - protein, 394 aa, Silicibacter pomeroyi DSS-3
MTDVVLVLNAGSSSIKFAVYPSGTNTVPLIRGKVAGVGRDPVFSAVRADGTAIDMVMPKNIDAAADHEALISLLLDWLAEHRADRRLVAVGHRVVHGGRDFLKPVIVDDSVLSQLEQLIPLAPLHQPHNLAAIRAISRLQPTVPQVACFDTSFHQTQDRLAQLFALPRDLSDEGIIRYGFHGLSYEYIAGILPDHLGERAEGRVIVAHLGNGASMCAMKNRQSVATSMGFTALDGLMMGRRCGALDAGVVLYLMQSKGLNATEIETLLYRRCGLLGVSGISNNMRELERSDDPKAREAIELFCFRAASVLGGLVTALGGLDAIVFTAGIGENSALVRKLICDRLACFGVDLDPNSNEGNSPRIGSVQSSIDVLVLPTDEEIVISNATNETVALG

SEQ ID NO: 30154 - protein, 391 aa, Silicibacter pomeroyi DSS-3
MTDIVILDGARTAIGTFGGALASTAPIDLATVVTEAALERSGVEGGQIGHVVFGHVINTEPRDMYLSRVAAMQAGIPNGTPAMNVNRLCGSGAQAIVSAVQSLMLGDAEFAVAGGAESMSRSPFIMTQARWGAKMGDVKSLDMMLGALNCPFGTGHMGVTAENVADEHQISREQMDQFAMTSQERAAAAIAAGHFDGQITPVQVKVKRDMVDFKVDEHPKATSVEVLAGLKPVFKKDGRVTAGNASGINDGAAAMVLATADAAEKAGLKPKARILGYAHAGVRPEVMGIGPVPAVQNLLARTGLSIGDFDVIESNEAFAAQALAVNKELGLDAAKVNPNGGAIALGHPVGATGAIITLKTLYELERTGGSKGLITMCIGGGQGIAIAIELL

SEQ ID NO: 30155 - protein, 371 aa, Silicibacter pomeroyi DSS-3
MKIGCPKEIKPQEFRVGMTPNAAREAVSHGHEVIIETNAGAGAGFDNADYVDAGARIVDTAAEVFATADMIVKVKEPQAIERKMLREGQLLFTYLHLAPDPDQTHDLLASGATCIAYETVTDRNGGLPLLAPMSEVAGRLAPQVGAWTLQKANGGRGVLMGGVPGVGPAKVLVIGGGVVGTHAAKIAAGMGADVTVLDRSIPRLRYLDDVFGGTFKNSYASAGNTIELARQADMIIGAVLIPGAAAPKLISRAQLSELKPGAALVDVAIDQGGCFETSKATTHQDPIYEVDGIMHYCVANMPGAVARTSTIALGNATMPFMLALADKGWKQACADDVHLLNGLNVHAGKLTYAAVGEALGLDVVSASQLVQ

SEQ ID NO: 30156 - protein, 233 aa, Silicibacter pomeroyi DSS-3
MSAFDAHLLIVDDDERIRDLLKKFLMRHGFLVTAARDAEHARRILSGLDFDLIVMDVMMPGEDGVSLTRALRQTLSTPILLLTARGETEHRIAGLEAGADDYLAKPFEPRELLLRINAILRRVPDTSAQDAAPKFLQLGPIRYDIERGEMWQGDQLVRLTATENQLMKIFAARPGEAITRTKLVEDLGRDRGQAQERAVDVQITRLRRKIEPNPKQPRYLQTVRGAGYMLAPD

SEQ ID NO: 30157 - protein, 391 aa, Silicibacter pomeroyi DSS-3
MTNVVIASAARTGVGSFGGSFANTPAHDLGAAVLEAVVERAGIDKAEVSETILGQVLTAAQGQNPARQAHVNAGLPKESSAWGINQVCGSGLRAVALGAQHILLGDAEIVAAGGQENMTLSPHAAALRAGHKMGDMKYIDTMIRDGLWDAFNGYHMGQTAENVAEQWQISREMQDEFAVASQNKAEAAQNAGKFADEIVPFIIKTRKGDIVMDKDEYIRHGATIEAMQKLRPAFTKDGSVTAANASGLNDGAAATLLMTAENAEKRGIEPLARIASYATAGLDPSIMGVGPIHASRKALAKAGWKVEDLDLVEANEAFAAQACAVNKDMGWDPAIVNVNGGAIAIGHPIGASGCRVLNTLLFEMKRRNAKKGLATLCIGGGMGVALCVERD

SEQ ID NO: 30158 - protein, 68 aa, Silicibacter pomeroyi DSS-3
MATGTVKWFNTTKGFGFIAPEEGGKDVFVHISAVERSGLTGLADNQKVSYELKPGRDGRESAVDLKLL

SEQ ID NO: 30159 - protein, 259 aa, Silicibacter pomeroyi DSS-3
MSDANPTGLDAYKPAEIARLVETAGVAKAGLGAAQTLTLAVLAGAFIGFGGAAYTMVMTGADTGFGPARFLGGVVFSLGLILVIVGGAELFTGNALMVMAAVDRRITLAALLRNWGLVYLGNLLGAVGLALAFALTGLLDGLMGDTAQAIARGKAALDPGAAFMRGVLCNAMVCLAVWLTFAARTAAGKILAILWPISAFVLLGLEHSVANMYLIPQGMLAGAEVTPGAALANLFWVTLGNILGGAGGVALAYRFAYLR

SEQ ID NO: 30160 - protein, 380 aa, Silicibacter pomeroyi DSS-3
MSDIAPKLGPIEGDSSFEIRSGANVCRSNRSGTGVENQEEVKMKKSVFLGALTVAGMAAGVAAAGTMDDVKARGKLNCGVTTGLVGFAAPDSNGEWKGFDVALCRAVAAAVLGDGNAVEFVPTTGKTRFTALASGEVDMLARNTTWTFSRDVDLKFEFVGVNYYDGQGFMVPKSLGVSSAKELDGATVCIQTGTTTELNLADFFRANNISYEPVPIETNAEAQQQYLAGACDVYTTDASGLAATRATFENPGDHVLLPEIISKEPLGPLVRHGDHEWGDVVRWTLNALVSAEEMGITSANIDEMSAGTNNPEINRILGSEGTLGEMLGLDAEWAKRAIKVGGNYGEVFAQNIGESTPIGLARGLNAQWTDGGLLYSPPFR

SEQ ID NO: 30161 - protein, 609 aa, Silicibacter pomeroyi DSS-3
MDDQNKNLILATALSFLVILVWFILFPPPEQTEAPATEIATTNGTAVQTPTAAATEGGAGEVPALDSAAPTQAEAPRVQIDTPRLKGSVSLLGGRIDELSLKDYRVSLDEDAEIVEMLTPAGSTSAYYALYGWAPGAGLNAADVPGPLTEWSLESGDTLSVGTPVTLSWSNGSGVTFRRTLAVDEDYMFTVTQSVENGSAAPIGAAPYGILARHGIGEDADLPGLKNFFILHEGVVAMNDGTLSEIDYKDVRKFDIDPNEGAQAEVFQNKSDGWIGFTDHYWMATLIPGSGTAFKSAAKYDARRKIYQAETVLPTMSVAPGESAEVTTRLFAGAKEWESIRAYQQDGVQKFLDSIDWGWFFFLTKPIFWLLHQINGLIGNMGWSIIGLTLIIKAIVFPLALKSYVSMAKMKELQPQMEALKEAAGDDRQKMQQGMMELYKKEKVNPAAGCLPILLQIPIFFSLYKVIFVTIELRQAPWFGPFRDLSMPDPTSIMNFFGWLPWAGPEAGSLTATILIGILPLLLGISMWLQQKLNPAPTDPTQAMIFAWMPWVFMFMLGSFASGLVVYWIANNTITFTQQYIIMRSHGYKPDVFGNIKSGFARRAKADKK

SEQ ID NO: 30162 - protein, 387 aa, Silicibacter pomeroyi DSS-3
MNISSDTGFRRAGRLDGIELSEIVQISERVAQLRADGADIVALSTGEPDFPTPTHVIEAAHRAALAGQTRYPATAGTPALRAAIAAEAGVEPANVIVSTGAKQVLAGAFLATLDPGDEVITTAPFWTSYADMVRLAGGVPVVLDCPGAQGFKLTPAQLEAAITSRTRWLLLNTPSNPTGAIYSEAELQALGAVLDRHPHVWVISDEIYQHLAYVPFTPFVQAVPTLADRTLIVNGVSKAYSMTGWRIGWGIGPAPLIKAMVAVQGQITSGACSIAQAAALAALSGPQDLLVERRAEMLARRDLVVAGLNAAGLECASPDGAFYVFPKTPARMPVDHDFCHHLLDTAGVALVPGRAFGMSGHLRLSFAYARQSLEEGLARIARAVAAL

SEQ ID NO: 30163 - protein, 282 aa, Silicibacter pomeroyi DSS-3
MSIFLDSELTTAERGEDARFRIIPVPLERTVSYGSGTAGGPAAIIEASNELERITNGAEPCAQGIYTEPPLDCDGPLPEVMERLAQRTEAAIRAGRVPVMLGGEHSLSFGAVMGVARALGQPLGLVQIDAHADLRIAYQGEKHSHASVMHLLAEEGIRLAQFGVRALCQQEMDERARHGVFYKDAEELVTTNIHAIDLPEDFPQLVYVSFDVDGLDPAQMPATGTPVPGGLGYYQALHLVEHALKGRKCVGLDVVELAPDGNAAWDFTAAQIVYRLMAACTA

SEQ ID NO: 30164 - protein, 328 aa, Silicibacter pomeroyi DSS-3
MPRERLSVVVTRRLPEVVETRLSELFNVRLRDDDTPMSRDELAAALREADVLVPTLNDRIDAGLLAQAGERMRLIANYGAGVDHIDVATARQRGILVSNTPGVLTDDTADMTMALILAVTRRIPEGLAVMQKNEWTGWAPTALLGGRVGGRRLGILGMGRIGQAVARRASAFGMQIHYHNRRRLRPEVEDALEATWWDSLDQMIARMDVISVNCPSTPSTFHLMNARRLKLMKPTGVIVNTSRGEVIDENALTRMIRTGEIAGAGLDVYEHGTQVNPRLRELPNVVLLPHMGSATLEGRIEMGEKVIINIKTFADGHRPPDQVVPAML

SEQ ID NO: 30165 - protein, 319 aa, Silicibacter pomeroyi DSS-3
MASHGYDSGRLNLPFVGICTFGKYPYVEDWDSIDADAAILGAPFDFGAQWRSGARMGPRAIREASTLFSFGHAGAYDFEDDITYLDPAKVRIVDIGDADIVHTDTIKSHANIEFGVRKILQAGALPVVLGGDHSINIPCINAFDDQDPIHVVQIDAHLDFVDERHGVRYGHGNPMRRAAEKAHVTGLTQIGIRNVSSTAKDGYDAARAMGSDIQSVRHVRRMGTAAMLARIPEGVRYYLTIDIDAFDPSIAPGTGTPSHGGFLYYEVLELIDGLARRGEIAGIDLVEVAPDYDQSGSTSILAAQLLMNTLGRVLHHRRR

SEQ ID NO: 30166 - protein, 301 aa, Silicibacter pomeroyi DSS-3
MTTRAGFVALIGEPNAGKSTLLNRMVGAKVSIVTHKVQTTRTRIRGVAMEGEAQIVFVDTPGLFQPRRRLDRAMVAAAWGGAADADIVVLMIEAHRGITEGVERILEGLAEIAKGRTVALAINKIDRVPAEKLLGLSEALNARFEFARTFMISAERGHGVEDLRKWLAAELPESPWLYPEDQIADLPMRMIAAEITREKLTLRLHQELPYQLTVETENWEERKDGSARIDQVIYVMRDGHKGIVLGKRGETVKAVGQAARVELEEFLDRKVHLFLQVKVRPNWLEEAERYSEMGLDFKDGN

SEQ ID NO: 30167 - protein, 357 aa, Silicibacter pomeroyi DSS-3
MARFHDLEVTDIHKTIRDAVVVTLKPANGAASEFDFTQGQYLTFRRAFEGEELRRSYSICSGKDDGVLQIGIKRVDGGAFSTWANEELKVGDTVQAMPPMGGFHTPLDPGAEKQYLGFAGGSGITPVLSIIKTTLAREPRSQFTLVYANKGVNTIMFREELEDLKNLYMGRFNVLHILETDAQEIELFTGLVTEEKCGQLFEHWIDIQHVDTAFICGPEPMMLGIAAALRAHGLSDAQIKFELFASAQPGRAKRKAVSSEAAKGANQTRAAITLDGATQSFDMPKDLSILDAALQNSLDAPFACKAGVCSTCRCRVLEGEVEMVANHALEDYEVEKGYVLSCQAYPLTDTVVVDYDQ

SEQ ID NO: 30168 - protein, 400 aa, Silicibacter pomeroyi DSS-3
MDAFICDAQRTPIGRYGGALSQVRTDDLAAVPLAALVARNPQVDWASLDDVIYGDANQAGESNRNVARMAALLAGLPVDVPGTTVNRLCASGMDAVGMAARAIKAGDYDMAIAGGVESMSRAPFVMPKATSAFTRANAVYDTTIGWRFVNKKMHEMYGTDSMPQTADNVAEDYDISRADQDAFAARSQARWAAAHAAGVFGDEITPVTIPQRKGDAIVVDTDEHPRPGTTAEQLGKLKGVNGPDKSVTAGNASGVNDGAAAILMASEAAAVKNGLTPIARVVGMSVAGVEPRVMGIGPVPASRKVLARAGLTIGQMDVIELNEAFASQGLATLRALGVADDAPHVNPNGGAIAIGHPLGMSGARLVMTAAYQLKRTGGRYALCTMCVGVGQGAALILERV

SEQ ID NO: 30169 - protein, 290 aa, Silicibacter pomeroyi DSS-3
MAKVAFLGLGVMGYPMAGHLKSAGHDVTVYNRSAAKAEKWVTQHGGAMATTPRAAAEGAEFVMACVGNDDDLRSVCAGPDGALAGMAAGSVFVDHTTVSAKVTRELYAAARDGGVGFVDAPVSGGQAGAENGVLSVMCGGDQAEYDRAEPVIAAYARICRRIGESGAGQVTKMCNQIAIAGLVQGLAESLHFAEKAGLDGRAVVEVISQGAAGSWQMANRYETMLDDHWTHGFAVDWMRKDLGICLDTANETGASLPVTALVDQFYKDVQKMGGGRWDTSSLLARLRKLD

SEQ ID NO: 30170 - protein, 317 aa, Silicibacter pomeroyi DSS-3
MKLLIARPMTAAVEARARAEFETEIRTSTTPLSEAEMLRALREFDIVMPTLGDMFSADVFAQVPEPRCRLLANFGVGYNHIAVAAARAAGVAVTNTPGAVTDATADIAMTLLLMTARRAGEGERLVRSGAWEGWHPTQMLGHHVTGKHVGIVGLGRIGQAIARRCHFGFGMQVSYVARSDKDVDFPVSRMESLAALAGAVDFLVIAVPGGGETRHLIDAQILAAMKPSGILVNIARGEVVDEAALIAALSERQIAGAGLDVYEFEPKVPEALRAMEQVTLLPHLGTATEEVRSSMGHMALDNVAAFAAGRDLPNPVS

SEQ ID NO: 30171 - protein, 400 aa, Silicibacter pomeroyi DSS-3
MILNSILSIGLLLTFGLVAFCVIKWRDVECIGPTPVHLFTFIAILFTSGLDVGLIMFPLAEFGGYAEDPAYAFANPLAIEFGFWGFLIWAFYFLTAFYFCVIEPRVGFFEIPLVKLVNNIVIIGTCAFTASLFLIYLPGYIPEIGDGETVVPAFYVIVFLTILAAAYSSTDLKYVRVLSVGSTFLFLALILGMWAAAGMGLGGVGQNLGLLGAYFGNLHEFVLPLTDYHAFYLFWWFAWSIMIGQFTSRFVGGLKTWQLLIALLVFPSIPLAIWFSVLYFYHENGISTAGLTNVAMIVVGITFVINSLDSLIRLYTDNLSITVERLGRPVYIAGNVGVLFALTLLFQSQWLQIQWVGSIVIGLYLACVLFIALRHRSTVMAIRTSPEDRALDFHKVESVH

SEQ ID NO: 30172 - protein, 402 aa, Silicibacter pomeroyi DSS-3
MLHRRGIMAAPLKRRIGLGLLTAYGVGVMVGAGIYVLVGAVAGDAGVWAPVAFLLAGLIAAPTALSYAEFSTRLPEAAGEAAYVGTGLNSQSLALLVGLAVVVAGTVSAGAVLRGGVGYLSAVTEINPVWAMIGLGGALTLVAVAGVLESLALAAVFTVVELAGLALVVWAGLGADPSPDWVAPAPPVWTGIGLGGVLAFFAFIGFEDIVNMAEEVEAPERTLPRAILISLVVTSVLYALVAWAAVRAVPLDVLGQSESPLALVWQYGRGSGAGFLSAIAVFAALNGILAQIVMATRVLYGLGGRTKALALFHTAHPRFGTPVLATFLVGAAVIFCALYVPVETLAETTSSILLAVFALVNGALIVQKRRAPEARFRVPMAVPVLGLVLSLAALSVAVRGIL

SEQ ID NO: 30173 - protein, 400 aa, Silicibacter pomeroyi DSS-3
MSFLSATLSRVKPSPTVAMTAKAAELKAGGRDIIGLSAGEPDFDTPQNIKDAATAAIAAGKTKYTAPDGIIELKQAVCAKMQRDHGLSYTPAQVSVGSGGKQTLYNALMATLNPGDEVIIPAPYWVSYPDMVLLGGGTPVVVETALESAFKLTPAQLEAAITPRTKWFIFNSPSNPTGAGYSRDELKGLTDVLMRHPHVWVMSDDMYEHLAYDGFAFCTPAQVEPGLYERTLTCNGTSKAYAMTGWRIGYAAGPVGLIAAMRKIQSQSTSNPCTISQWAAVEALNGTQEFLAPNNALFKRRRDLVLSMLNAIEGIDCPTPEGAFYVYPSIAGLIGKTTPKGTRIDSDETFCTALLEEADVAVVFGAAFGLSPNFRVSYAASDAALTEACTRIQRFCASLT

SEQ ID NO: 30174 - protein, 68 aa, Silicibacter pomeroyi DSS-3
MPTGTVKWFNATKGYGFIAPDDGGKDVFVHISAVERSGLTGLADNQKVSFEMLDGRDGRKMAGDIKPL

SEQ ID NO: 30175 - protein, 403 aa, Silicibacter pomeroyi DSS-3
MTETLHISAFMTVTLGLAVYLVGVRINDRLPFLERFSIPEPVTGGLLASLVVLGLNSVFGIELAFDLTGRDFLLVLFFTGIGLNARLGDLIAGGKPLAILLVLTLLTILAQNVIGVLGAVVFGFPPQAGVLFGSAALIGGHGTAIAWAPEVAQATGLASATELGVAVATLGLVIAALIGGPIATYLVESRKLTPNRPDEELTVGLPNEMDEEPPQIDHKSLMRVLLTLNVAILLGYGLQESIEELGLKLPLFVPCLLSAIVVGNLRTALFPRALRVSRTPTLALISEFALGAFLAMSLMSLQLWTIAETGLALAVIIAAQTLFALGFILLVLFRAMGGGYRAAVLAAGFGGFALGATPTAIANMTAVTKRYGPSPLAFIVLPLVSAFFVDIANAVVIQMIVNF

SEQ ID NO: 30176 - protein, 308 aa, Silicibacter pomeroyi DSS-3
MLLLRIAQKQAVTKRISAFTLVAAEGGPLPDHGAGAHIEVQTAAGPRAYSLIDWPERQPGAWQIAVQREDDGDGGSRAMHALNPGDTIEATEPKNDFELRPGDMPVALLAGGIGVTPLISMATELAASGRPFVFHHAGRSAGDMAYVEQLATIFGDRYSPHFDDTAPLDLGALMAGLSGHALYICGPKGMIEAARAAAEAAGLTDIHVELFTNAAHAAGDSAFEVEIASSGQVITVAPDQTIIEALEAAGLDPLYDCQRGDCGICQTEVIAGTPDHRDVVLSQAERDSGKVMQICVSRARSTRLVLDL

SEQ ID NO: 30177 - protein, 330 aa, Silicibacter pomeroyi DSS-3
MNMPVIMNSKPRVLVTRRWPAAVEAQLAERFDTQFNRTDTPLTSAEFRSALARFDAILPTVTDKLGAEALDVTAPQTRLLANYGVGYSHIDSDAVRAHGITVSNTPDVLSECTADIAMTLMLMVARRAGEGERELRAGQWTGWRPTHLVGSKVSGKVLGIVGFGRIGQAMAQRAHHGFGMKILVQNRSAVPQDVLDRYGATQVETLDAMLPQCDFVSLHCPGGAANRHLINSRRLDLMKPDAFLINTARGEVVDEHALAQALMFDCIGGAALDVFDGEPRIAPVLLDCDNLVMLPHLGSATRETREAMGMRVLDNLVDYFEGRDPRDKVL

SEQ ID NO: 30178 - protein, 450 aa, Silicibacter pomeroyi DSS-3
MTVKDNKENAPPRTVPIQSATFSNPINAEIRRAAATGIYDIRGGGAKRRVPHFDDLLFLGASISRYPLEGYRERCDTRVTLGTRFAKKPIELDIPITIAGMSFGALSGPAKEALGRGASEAGTSTTTGDGGMTPEERGHSTKLVYQYLPSRYGMNPDDLRKADAIEVVVGQGAKPGGGGMLLGQKISDRVAEMRNLPKGIDQRSACRHPDWTGPDDLEIKILELREITAWEKPIYVKVGGTRPYYDTALAVKAGADVVVLDGMQGGTAATQDVFIEHVGLPTLACIRPAVQALQDLGVHREVQLIVSGGIRTGADVAKAMALGADAVAIGTAALIALGDNDPKWEAEYQKLGTTTGAYDDWHEGLDPAGITTQDPVLQARLDPVDAGRRLRNYLNVMTLEAQTIARACGHNNLHNLEPEDLCALTMEAAAMARVPLAGTEWWPGKTGAGF

SEQ ID NO: 30179 - protein, 328 aa, Silicibacter pomeroyi DSS-3
MSAAPQKAKAGAEKIEVTVSAVVPLNPLVTRFEFTRRDGQPFPPFSAGAHTVVEMRDGERTRLNPYSLMSDPGDNSIYAISVRRDDQGRGGSLFLHNKVKVGDPMTITFPVNLFPLDLRGRKHVFLAGGIGITPFLAMIAHLERMGGAWELHYSCRSRELGTYVDELTYKHPNKVHVYFDDQDQAIGLEDLLDGQPLGTHVYVCGPKGMIDWVHATAAAHGWPDENVHSEEFLAPQPGKPFEVRLCKSDITIQVGEHESLLEAMERCGVDAPFLCRGGACGQCETDVVDSDGDFVHRDHWLDDDEHASGKKIMPCVSRFVGKTLVLDR

SEQ ID NO: 30180 - protein, 120 aa, Silicibacter pomeroyi DSS-3
MTDAKTRIDETVKANDVVLYMKGTKEMPQCGFSSRVAGVLNYMGVAYADVNVLADDEIRQGIKDYSDWPTIPQLYVKGEFVGGCDIITEMTLSGELDTLFEENGVAYDKDAADKIRAANA

SEQ ID NO: 30181 - protein, 434 aa, Silicibacter pomeroyi DSS-3
MTETVKNTALFLGIAVLVAITGFMQSWNSAILIVNMGLISAIMAIGVNLQWGFAGLFNVGIMGFVALGGLAVVLVSEPLSPEAWSAGGFGIVLALLLGAATVVAAVLVARHMPKGRSRNLAMLAVLVLGFIIYRAVFDPNVMAVEAINPAAAGNIGGLGLPVLLAWPAGGLLAAGAAWLIGKTALGLRSDYLAIATLGIAEIIIAVMKNEDWLARGVKNVIGLPRPVPYEIDLQNDAGFVESAASLGIDPVTASTLYVKLGYSVLFMVVLLILLWMAQMALKSPWGRMMRAIRDNEVAAEAMGKDVTRRHLQIFVLGSAVCGIAGAMMTTLDGQLTPGTYQPLRFTFLVWVMVIVGGSGNNFGAVLGAMLIWFLWVQVEPLGLFLMQVITSGMAEGSALKSHLIDSAAHMRLLTMGIILLLVLRFSPRGLIPEK

SEQ ID NO: 30182 - protein, 582 aa, Silicibacter pomeroyi DSS-3
MNQQLRGLARTYLPILDWGRSYGRGELSGDLIAAVIVTVMLIPQSLAYALLAGLPAEVGLYASILPLVAYALFGTSRALAVGPVAVISLMTASALAPLNLSSVSEYVAAAGVLALLSGAMLLLMGALRLGVVANFLSHPVIAGFITASGLLIAASQLKHILGVPLHGHTLPEILLDLARHLGQINLATLVTGIVALAFLFWVRKGLAQVFHARLGLTKPLAATLARVGPIFAVIGTTLAAWVLNLPSLGVAVVGEVPTGLPPLGLSGVDWGLVPALIGPAALLSIIGYVESVSVAQTLATKRKQRIDPNQELIALGAANISSSLSGGYPVTGGFARSVVNFDAGAETPAAGVFTAVGLLVAALFLTPLLYFLPKATLAATIIVAVLSLVDLSILSRAWRYSRADFAAVFATIALTLLAGVEVGVASGVLISLLLFVWKTSRPHVAEVGQVPGSQHFRNILRHKVETDPGVVTLRIDESLYFANARRMEDLILNRVLRDRDSLRHVILMCSAVNEVDFSALESLEAINRRLDDLGVKLHLSEVKGPVMDRLARSHFLEDLTGRVFLSQYDAFAALRMNRADRM

SEQ ID NO: 30183 - protein, 344 aa, Silicibacter pomeroyi DSS-3
MKFLDLAKVYIRSGSGGNGCVSFRREKFIEYGGPDGGDGGKGGSVWAEAVDGLNTLIDFRYQQHFFAQNGVPGKGQQRSGKDGEDIVLRVPVGTEILDEDEETVLADLTEVGQRVLLAKGGNGGFGNLHFKSATNQAPRRANPGQAGVDRTIWLRLKLIADVGLLGLPNAGKSTFLAATSNARPKIADYPFTTLHPNLGVVGVDNVEFVIADIPGLIAGAHEGRGIGDRFLGHVERCAVLLHLVDGTSGDLVEDYHTIIGELEAYGGDLAGKPRVTVLNKIDTLDDEERAFLVEELETASGGPVMMMSGASREGVTEVLRALRARIDANRLREKPVEESQPWQP

SEQ ID NO: 30184 - protein, 193 aa, Silicibacter pomeroyi DSS-3
MFAVLKTGGKQYKVQAGDVLRVEKLAADAGEKVQFNDVLMLGGDAPVVGAPLVDGAAVQAEVIDQIKGEKLIHFVKRRRKHSSQRTKGHRQKLTLVRITEILTSGADKTGVKAATGQAAAGAAAPAAAAPAAAGSDDLTKITGVGPAAAKKLVEAGIGSFAALAALSDEQIAAIDAVKVKPEWVEQAKELAQG

SEQ ID NO: 30185 - protein, 251 aa, Silicibacter pomeroyi DSS-3
MLEIKNLHVKLEEEDKQILKGVDLTVEAGKVHAIMGPNGSGKSTLSYVLSGRDGYEVTEGGATLSGADLLEMEPEERAAAGLFLAFQYPVEIPGVGNMTFLRTAVNAQRKARGEEELSAADFLKEVRAKAKALKIDADMLKRPVNVGFSGGEKKRNEILQMAMLEPKMCILDETDSGLDVDAMKLVAEGVNALRDAGRGFLVITHYQRLLDHIKPDVVHIMADGRIVKSGGPELALEVENNGYADILAEVN

SEQ ID NO: 30186 - protein, 431 aa, Silicibacter pomeroyi DSS-3
MKKSGKNRHVSGRPPLFPATEIRSTAPDTRNRSKGERPMNGADTAWIIVATALVLFMTLPGLALFYGGLVRARNVLSVFMHCFAIACLMSILWLVAGYSIAFGGGTSGFWGGLDKVMLIGVTADSLSGTLPEILFFAFQMTFAIITPALIVGAYVERVGFGFVLTFSGLWMLLCYAPVVHWIWGGGMMSDGGIFGETGVRDFAGGIVVHETAGLAALIIAVMLGPRRNRTTPPHNPGFVMIGAAMLWVGWFGFNGGSQLAADGGAAMALTVTHISAATASLSWALWERIKYGKASLVGLVTGTIAGLASITPASGFVGPAAALLIGAVAGILCQEAVNLVRNWLRIDDTLDVFAVHGVGGIFGTLMIAVLGAGSWVAQLGGLVFVGLFTTGVTIVLVKVVALVTPLRVDAETETNGLDLSVHGERAYDMSS

SEQ ID NO: 30187 - protein, 337 aa, Silicibacter pomeroyi DSS-3
MTLLYDQNHHWISTRFDQTLAKTATRPHLMSRKTCILIGAPVDSGKRRTGCLMGPDSYRTAGLAEALADLGHRVEDLGNLSPAEHAPEPSDTHLHQPNRTIGWTNRLIRAAEQAMPRGLPIFLGGDHALALGSVAGVANHAARVGRPQFVLWLDAHSDYHTPETSASGNLHGTPLGYVTGRGGFAGFPVIKNPVKQRNICILGLRSVDHAEREALQRTKIRFHDMRQIDEHGIARPLQAFLDTWAKENGMLHVSLDVDFLDPSIAPAVGTTVPGGATMREGHLVMEMICDSGLMTSLDLVELNPFLDERGRTAQLIVDLAASALGRRVFDRPTRSFS

SEQ ID NO: 30188 - protein, 395 aa, Silicibacter pomeroyi DSS-3
MRLSRRITGLTGGGSDGWDLFLQARRMIAEGIAVTELTIGEHDTRTHSSILDAMDRSARGGHTGYAMVPGTALLRDTVAARVQERTGQRTTRDNVLITPGGQAALFAAHSAACDPGDTALFVDPYYATYPGTIRGVGALPRAVIARAEDGFQPRPDVIEAEADGAVSLLINSPNNPTGVVYGRETLEGIAKVCQDRDLWLISDEVYDTQIWEGAHLSPRALPGMAERTLVVGSMSKSHAMTGSRCGWIVGPEAAISHLITLATHTTYGVPGFVQDAAVFALGQGRDLEEEIAAPFRRRRDLAWHILAGQNAVRLSPAQGAMYLMLDIRATGLSGEAFATALLETHHIAVMPGESFGKAAAGHVRVAMTVADDAFVKALKTLCHFAAQQASGLPEG

SEQ ID NO: 30189 - protein, 303 aa, Silicibacter pomeroyi DSS-3
MDRPVIGFIGLGFMGHGMAKNILKGGYPLWVRGNVNRTPIDSLVALGAQEAASPADMAARCDIIHICLGNSKQVEAVIRGPEGILAAARPGLIVIDTTTADPVSTLALAAEMAAQGVHMVDAPLGRTPKEAEDGTLDAMVGCDEALMKTITPVIDCWAGTITRIGPVGAGHKMKLLMNFLGGAYAALYSEAVVLGARVGISPHTFREVIGPSRLGSGFFATFMQYVCERDENAHKFSIANLSKDMRYVNAMATEAGVVNIMASAARHYYTHAEAQGAGQDFVPMLSNHVGALNGLDMDEVTRK

SEQ ID NO: 30190 - protein, 313 aa, Silicibacter pomeroyi DSS-3
MTQTLAIGPYNDNDRQALQQEFGALMLGGIAEVAGLEPAMRAGISAVAYMGHTAFGGAEMDLLPGLGVIANFGVGYDAIDVAAATARGITVTNTPGVLNDDVADLAVTMLLMQCRRMEQGGAWVREGHWETANFPLNRKASGGVAGVVGLGRIGREIADRLAAFKMDIHYFARSEKDTPGWTYHADPVSLAKAVDFLVVALVGGPETEKFISREVIEALGPRGVVVNISRGSTIDETALLDALERGRIAGAALDVFLNEPTIDPRFLALSNVVLQPHQGSGTVETRAAMGALQRGNIAAHLAGKPVLTPVNKP

SEQ ID NO: 30191 - protein, 315 aa, Silicibacter pomeroyi DSS-3
MSDFNQPIGGNDLARFSGPNTFMRLPQAQALDGLDVAILGIPMDIGTSWRSGTRFGPKQIRAESAMIRPYNMATGAAPFDSLQIADIGDLAINTFSLADSLRIIKESYDAILTHDVIPVAMGGDHSITLPILRAIAARHGPVALVHVDAHADVNDQMFGERETHGTVFRRAYEEGLIQPDKTYQIGIRGSGYAATDFTEAQGWGFQQFPAWELWHKSLVNLGTEIRRDIGDRPVYVTYDIDSLDPAYAPGTGTPEIGGLTTPQALELIQSLRGLKIVGCDLVEVSPPYDTSGNTALTAANLLYELLCVLPGVQAR

SEQ ID NO: 30192 - protein, 327 aa, Silicibacter pomeroyi DSS-3
MKVALEDAKKQVDEAFTNPELKGLSFENTFGGATSFLRRLYTKNLTGVDIAVTGVPFDQAVTNRPGTRLGPRAIREASALQSPDAPYGWPFDALSELAIVDYGDVAYDYANIPAFPDTLSDHIRTILAADVASVTLGGDHYISFPILKAYAEKYGPMSLLQFDAHTDTWADDDMSRVDHGTMFYKAVKSGIVDPARSVQIGIRTTNEDTLGVNIIDAREVHESGPAAVAQKVRAILGDSPVYLTFDIDALDPAFAPGTGTPVWGGLSSAQAQIILRDIAGINIKGGDVVEVSPPFDPSGATAIAGAHVATQIICLLGWNKLGGAAAG

SEQ ID NO: 30193 - protein, 554 aa, Silicibacter pomeroyi DSS-3
MYRYSEFDTAFLAERNAQFRAQVERRIDGSLTEDEFKPLRLMNGLYLQLHAYMLRVAIPYGTLNAAQMRQLALLAEKWDKGYGHFTTRQNIQYNWPKLRDVPDMLDALAEVGLHAIQTSGNTIRNVTADHFAGAAADEVADPRPYAELLRQWSTDHPEFQFMPRKFKIAITGSANDRAVIKAHDIGLQLVVRDGVLGARVIVGGGLGRTPMIGQELSPFVAFDDLLAYLEATVSVWNQIGRRDNKYKARIKITVFEHGIEAIRARVNERFVKVRGRFKGADMALLDEIKGHFAPPSWRTSSLAPFEAAYAKDPVFRSWVDTNIAAHKQADHAIVTISLKAHGATPGDATAEQMRVMADLAERYGYDELRISHEQNVILPHVHKSDLPAIHAELAANGLGTANIGLISDIIACPGMDYCALATARSIPVAQEIATRFEELKLEHEIGALKIKISGCINACGHHHVGHIGILGLDRAGVENYQITLGGDATETAAIGERTGPGFAYDQIVPAVERIVETYLDQRRDREESFIETYRRVGMAPFKAALYPEARADAA

SEQ ID NO: 30194 - protein, 277 aa, Silicibacter pomeroyi DSS-3
MNNFVGGTTIAAMLMSTGAAMAEQCTNETWNKIAQRGTIVVGVKADTRPWGYRDQTGGIIGMEADMARQVADTLGVALELVAVESSNRMQFLEGGRIDLMIATMSDRKDRREIVGIVGPNYYSSGTNVMTPKALGVTAWSDLKNRPVCGKQGAFYNQIVEQRYGAQIIAFGSNAEALQALRDKKCIAWVYDDSSIAADLASGHYDEFEMPLVSEDNNPWGLAVPIAERDCVFGRFMSGMQYSWHQSGELVALEQKWGIQATAYLAEQHARFADWLAD

SEQ ID NO: 30195 - protein, 523 aa, Silicibacter pomeroyi DSS-3
MKIGTPKEIFEGENRVAMTPDSAVQLQKLGYDCAIESGAGAAAGFSDALYEAAGVEIIKTAAALWKEVDIVAKVRQPDATELKRLSKGKTLISFFNPAGNEDGMAAAKSKGANVIAMEMVPRISRAQKMDALSSMANIAGYRAVIEAGNNFGRFFTGQVTAAGKVPPAKVLIVGAGVAGLAAIGTSTSLGAITYAFDVRPEVAEQVESMGAEFVYLDFEEEQQDGAATGGYASVSSPEFAAAQLAKFRELAPEMDIVITTALIPNREAPELWTEDMVAAMKPGSVIVDLAAEKGGNCKLTVKDEKIVTENGVTIIGYTDFPSRMAAQASTLYATNIRHMMTDLTPEKDGQINHNMEDDVIRGATVTFEGDITFPPPPPKVQAIAAKSKEKPKELTPEEKRAQEVAAFKAQTKNQVTLLTVGGLLLLLVGLVAPASFMQHFIVFVLAVFVGFQVIWNVSHSLHTPLMAVTNAISSIIILGALMQIGSGSFLVILLAGLSVFMAGINIFGGFLVTRRMLAMFQKS

SEQ ID NO: 30196 - protein, 320 aa, Silicibacter pomeroyi DSS-3
MKVGFIGLGNVGGKLSGSLLRNGIDLTVHDLNPDLVAGFVSRGAKAAEGPAQMMRDCDAVITCLPSPAASAAVMAEMLPEVGPGKIWMEMSTTDEAEVKRLGEQVIARGGAAVDCPVSGGCHRADTGNISIFAGCDRATFERILPFLTVMGRRILHTGPLGSASVLKVMTNYLATANLLTCCEALVTMKAAGMDLNTTYEAIKISSGTSFVHETESQVILNGSRDINFTMDLVKKDIGLFQSIAERTGVPLEISPLMISIFEDGIARYGMRAQSDDIIRRLEEATGLDITAPGFPPEMVDDEPEEPGYEVVPQGLERQAG

SEQ ID NO: 30197 - protein, 539 aa, Silicibacter pomeroyi DSS-3
MSDPLPRAADLLARRLYEAGCRHAFGMPGGEVLTLVDALDKAGITFHLAKHENAAGFMAEAVHHRDGAPAILLATLGPGAMNGVNVVANALQDRVPMIVLTGCVDADEALTYTHQVMDHAQVFRPITKGSFRLTAEGSDIIADKAVSLAMQPRPGPVHIDVPIGVAATPVRETRRRRLTPAAPVAPGGTCLESARRWVAEARHPLAVIGLDVLADGSKCVLQAFLEHFEIPFVTTYKAKGILPEDHRLCLGGAGLSPLADGHLLPLVQAADLILCLGYDPIEMRPGWREVWDPESQRVIDISAVVNDHYMHQAGINIVADTGATLEAIAKGTTGHATWPGGEPQAARAALARAFPQDEVWGPAAIIAETRATLPEGTLATADSGAHRILLSQMWRCDEPRGLIQSSGLCTMGCALPMAIGLKLAEPDRPVISFSGDAGFLMVAGELSTAAEMGGNPIFLVFVDASLSLIELKQRGRQLPNRGVDFGHHDFAAIGRAFGGHGHTVRSRAELRAALEAAQAADRFTVIAAEIARGDYDGRI

SEQ ID NO: 30198 - protein, 757 aa, Silicibacter pomeroyi DSS-3
MSDQPSLRQAALDYHAFPKPGKLEIRATKPMANGRDLARAYSPGVAEACLEIKDNAAHAETYTARGNLVAVVSNGTAVLGLGNIGALASKPVMEGKAVLFKKFAGIDCFDLEVNESDPEKLADIVCALEPTFGAINLEDIKAPDCFIVEKLCRERMNIPVFHDDQHGTAIVVGAAARNALHVAGKAFGDIKIVSTGGGAAGIACLNMLVKLGVKRENIWLCDIHGLVYEGRAEDMNPQKAAFAQATDLRTLDDVIAGADLFLGLSGPNVLKPEMVARMAKRPIIFALANPTPEILPDAARAVAPDAIIATGRSDFPNQVNNVLCFPFIFRGALDVGATEINDAMQIACVEGIAELARITTSAEAAAAYQGEQLTFGADYLIPKPFDPRLVGVVSSAVARAAMESGVARRPITDLEAYRQKLNQSVFKSALLMRPVFEAAAKAARRLVFAEGEDERVLRAAQAILEETTETPILIGRPEVIEARCEKMGLSVRPGQDFQIVNPENDPRYYDYWTSYHQLMERRGVTPDIAKAIMRTNTTAIGAIMVHRGEADSLICGTFGEYRWHLNYVEQVLGSKDLRPHGALSLMILEDGPLFIADTHVRSRPSPEELAEITLGAARHVRRFGIEPQIALCSQSQFGNQAEGSGQRLRQAIEILDSRPRDFVYEGEMNLDSALDPELRQRIFPNSRLYGAANVLIFAHADAASGVRNVLKMKANGIEVGPILMGMGNRAHIVTPSITARGLLNMAAIAGTPVAHYG

SEQ ID NO: 30199 - protein, 643 aa, Silicibacter pomeroyi DSS-3
MRHLDLFEGSVRADCLTLMDRAAMKLDLARVAGRIRTQGRISQPMARRPTSPVASEERAGSKKVGVLSALWPFMMPYKALMAGALMALVLTASMSLALPLAVRRVVDNFRIENGDLLDVYFLAALGIAAVLALGTGIRYALVTRLGERVVADIRKAVFDRVIGMSPEFYERIMTGEVLSRITTDTTLIQSVLGSSASIALRNMLLFAGGLVLMLLTSAKLTGLVLLLVPAVLVPILVLGRRLRAISRENQDWIAASSGNASEALSAVQTVQSYTNETASRAAFAEVTETAYDVSRRRIATRAVLTVIVIFLVFSGIVGVLWMGANDVRAGVMTEGTLIQFVIYSVIMAGAVAALSEIWSELQRAAGATERLVELLNAADSVNDPVQPAALALPVQGEIAFDNVTFRYPARPDQVALDGMSLTVRPGETVAFVGPSGAGKTTVIQLIQRFYDPQSGRVLLDGQDLTTLSRADFRRHIALVPQDPVIFAASARENIRFGRPSASDAEVEEAARAAAAHEFIAALPEGYDSFVGERGVMLSGGQKQRIAIARAILRDAPVLLLDEATSALDAESERAVQQAVERLSADRTTLIVAHRLATVKKADRIVVLEAGRIVAQGTHDELVAGGGLYARLARLQFTDGLAAE

SEQ ID NO: 30200 - protein, 412 aa, Silicibacter pomeroyi DSS-3
MPTLVMKFGGTSVANLDRIRRAAKRVGVEVAKGYDVIVIVSAMAGKTNELVGWVNETSPLFDAREYDAVVSSGENITAGLMALTLQEMDIPARSWQGWQVPLMTNSAHSQARIEEIPPHNINQKFAEGMKVAVIAGFQGVSPEGRITTLGRGGSDTTAVAFAAAFEADRCDIYTDVDGVYTTDPRICTKARKLEKISFEEMLELASLGAKVLQTRSVELAMRYKVKLRVLSSFEEQSDTAGTLVVDEEEIMESNVVSGVAYSRDEAKMTVVSVQDRPGVAATIFNALSEGGVNVDMIVQNVSEEGITDMTFSCPTDQVARAEKAMNAVKDAGELEFEDLLVDYDVCKVSVVGIGMRSQSGVAAKMFKILSDEGINIKVITTSEIKISVLIDRKYMELAVQALHDAFELDKAA

SEQ ID NO: 30201 - protein, 277 aa, Silicibacter pomeroyi DSS-3
MKHLIATTALASLTLAPIAATAAECTNDAWNRIQERGKIVVGVKADYKPWGFRDTDGSIIGMEIDMAAEVAKTLGVELELTPVVASNRMQFLEQGQIDLMIATMTDRADRREIVGIVGPNYYTSGTNILAPKALGFSSWNELNGKPVCGVQGAFYNQIVEDKYGAQIVAFAGAAEARQALRDKKCVAFVYDDSSIGSAIASGEWEDFEMPLASEDDSPWGLAVPKGEENCIFGRFMTGMQYSWHQNGSLINWEAKWGIKPTAYLQELNAKLADQVAE

SEQ ID NO: 30202 - protein, 639 aa, Silicibacter pomeroyi DSS-3
MSLGNARNIAFWVVLFLLILALFNLFSGSGGTLQSQEKTYSEFVSAVDEGNVTKVILDGEQIRYRTSDGRDFVTIKPGDAEVTTLLIDKNIPVRAEKQQQSGFQSFIITLLPFLLLIGVWVYFMNRMQGGGRGGAMGFGKSKAKMLTEKHGRVTFDDVAGIDEAKEELEEIVEFLRNPQKFSRLGGKIPKGALLVGPPGTGKTLLARAIAGEAGVPFFTISGSDFVEMFVGVGASRVRDMFEQAKKNAPCIVFIDEIDAVGRHRGAGYGGGNDEREQTLNQLLVEMDGFEANEGVIILAATNRKDVLDPALLRPGRFDRNVTVGNPDIKGREKILGVHARKTPLGPDVDLRIIARGTPGFSGADLANLVNEAALMAARVGRRFVTMEDFENAKDKVMMGAERRSMVLTQDQKEKTAYHEAGHAVVGLALPMCDPVYKATIIPRGGALGMVVSLPEMDRLNWHRDECQQKLAMTMAGKAAEILKYGEDHVSNGPAGDIQQASQLARAMVMRWGMSDKVGNIDYAEAHEGYSGNTAGFSVSAHTKELIEEEVKRFIQQGYDQAHAILTERREDWDRLAQGLLEYETLTGEEIKRVMKGEPPHAGDDEDQGTDQGNAASVTAIPKTKPKAPPAGGMEPEPTA

SEQ ID NO: 30203 - protein, 217 aa, Silicibacter pomeroyi DSS-3
MKFFVDTAEIDAIAELNDLGMVDGVTTNPSLIKKSGRDIIEVTREICAMVDGPVSAEVTATDAETMIAEGRKLVEIAGNIAVKVPLTWDGLKACKVLSDDGHMVNVTLCFSANQALLAAKAGATFISPFIGRLDDINLDGMELIEDIRTIYDNYGFETQILAASIRSVNHILDSARIGADVITAPPAVIKAMVNHPLTDKGLDAFLADIKAADIKIL

SEQ ID NO: 30204 - protein, 339 aa, Silicibacter pomeroyi DSS-3
MPSLTEPKLIAGNANLPLARSIARRMSLYRGVDQGLVDARVERFNDGEIFVEVFENVRGEDMFIIQPTSNPANDNLMELLIIADALRRSSASRITAVIPYFGYARQDRRTKARTPISAKLVANMLTGAGIERILTMDLHAAQIQGFFDIPVDNLYASPIFALDVQTQFKQQMSDLMVVSPDVGGVARARELAKRINAPLSIVDKRREKPGEVAEMTVIGDVTDKICLIVDDICDTAGTLCKAAQVLLDNGAREVHSYISHGVMSGPAVERVSNSVMKSLVITDSIQPTPEILAAPNIRVVPTAPIFTQAILNIWNGTSVSSLFEDKTLRPIYESLYHMD

SEQ ID NO: 30205 - protein, 611 aa, Silicibacter pomeroyi DSS-3
MSIKPPFTDIEVKRAASGFYQGHSVEIALFSKAIMVGLVLWALVWPANANGVLGSLNWRLLEDFNVFYIVIVGFFAVFLFVLAALPQTGKRIMGRPGEGTEFSNFSWFSMMFGAGLGVGLMVFATAEPLGLWGSNPVVVSGAVQGNTEEALQSAYRYTFAHYGFHAWAIYVVTGLALAYYAYTRDMPLTIRSALTPLFGSLMNGFLGHVVDVLGVLATILGVSVTIGFGVSQFIDGMYAITGMEWMMDMTGEAPAPGTVGLIAGLVVIMGLSIVSAVSGVGRGVKYLSNLNLVLSLILLFTFVLFGSFLFAMTTYASALVDYLLNFLSISFGAYGPQDPAAFVAALPAEAAPYADALRGGATNAWGSFEGFKSGLEGEAAALSDEVLAAAYAAGEPGRQFGWQAGWTTFYWAWWIAFSPFVGLFLARISRGRTVREFIIGCLFAPALVCFAWMTILGGTAIDLELTGDANGAIIGASNTAKLFVTLGQMLSGGFLSAITIMCVVLIMTFLVTSADSGILVMNTIMSGGDQNVGNKHKIVWGVILTAVIGTLLIAGKTNGGADPMEALKSAMIIGALPFTAVMGLMCVSLAKALYRDGKREKLGLAVGDPAE

SEQ ID NO: 30206 - protein, 528 aa, Silicibacter pomeroyi DSS-3
MRHINIYRSFRMGFAYNAIEVMAFVFVSVIGLMMLTAVVLFIVDRFQTGDAIRRNYPVIGRFRNIFTELGEFFRQYFFAMDREEMPFNRAQRNWVYNASEAKGNTVAFGSTRNLNIPGTPIFMNAPFPPLDDQFGASEPLVIGPTCRQPYSAPSIFNISGMSYGAISKPAVLALSKGAKAAGVWMNTGEGGLSPYHLEGGADIVFQIGTAKFGVRDAEGNLSDDKLREVAAHPQVKMFEIKLSQGAKPGKGGILPAAKIDAEISQIRGVPMGMDAISPNRHREVDDFDGLLDLIAHLREVTGKPVGIKTCMGSADPWFDFFRRIRERGADSAPDFITVDGGEGGTGAAPMPLIDLVGLPLREALIRMVDLRDLSGLHDRIRIVASGKLVAPGDVAWAICLGADFITSARGFMFSLGCIQALKCNKNTCPTGITTHIPSLQKGLVVHEKEKRVAAYARSVIHEVETIAHSVGVPEPRLMRRRHVRIVCDDGTSVQMDDLYPSVKSDAEGLDRARGNRQFEDGLRRLGVV

SEQ ID NO: 30207 - protein, 531 aa, Silicibacter pomeroyi DSS-3
MAPKVLISDKLSDAAVQIFRDRGIDVDFQPDLGKDKDKLAEVIGQYDGLAIRSATKVTEKILENATNLKVIGRAGIGTDNVDKDAASKKGVIVMNTPFGNMITTAEHAIAMMFAVARQIPEASASTHAGKWEKSKFMGVELTNKTLGVIGAGNIGGIVCDRARGLKMKVIAYDPFLGEEKANKMGVEKVELDDLLKRADFITLHVPLTDQTRNILGRENLAKTKKGVRIINCARGGLVDEEALAEMLQSGHVAGAAFDVFSVEPAKENPLFGLPNVVCTPHLGAATTEAQENVALQVAEQMSNYLLTGAVENALNMPSVTAEEAKVMGPWIALAGHLGSFVGQMTDEPIKAINILYDGTASTMNLAALNCATVAGIMKKANPEVNMVSAPVVAKERGIQISTTNQDKSGAFDGYVKVTVVTAKRERSVAGTVFSDGKPRFIQIKGINVDAEIGAHMLYTTNEDVPGIIGTLGQTMGENGVNIANFTLGRAAAGGEAIALLYVDEPVPAEARAKLAETGLFNQIKPLEFDVA

SEQ ID NO: 30208 - protein, 390 aa, Silicibacter pomeroyi DSS-3
MKEVVIAGAARTPMGGFQGMYDGVSAAELGGAAIRAALAGAGAATVDEVLMGCVLPAGQGQAPARQAGFAGGLGEEVPATTLNKMCGSGMKAAMIAFDQIALGQTGTMIAGGMDSMSNAPYLLPKMRGGARIGHGQVIDHMFLDGLEDAYDKGRLMGTFAEDCAEHYQFTREAQDEYALRSLQNALEAQASGAFDGEIAAVTVKTRKGEVVTDADEQPKSARPDKIPTLKPAFRKDGTVTAANASSISDGAAALVLASAEAAAAQGLTVRARILGHASHAQAPGWFTTAPVPAAKKLLANIGWSVEDVDLWEVNEAFAVVPMAFMHEMGLSRDKVNVNGGACALGHPIGASGARIMVTLLNALEKRGLKRGVAAICIGGGEGTAIAIERV

SEQ ID NO: 30209 - protein, 337 aa, Silicibacter pomeroyi DSS-3
MMTQTPIDLLLSDPPARRATVALSEGSDPRVVAGALAAHSAGIADVILVGQAAEIRAALKAQGAPADSLTIHDPDSSPLTAEFAAAYYGLRRHKGVSEAAALAAVRTPLVYAAMLVRGDHAVGTVGGAVATTSDVVRTAIQVIGAAPGAAMVSSFFLMYPPEAATAHARAMLYSDSGLVIDPSVAELAAIAAASAASCRALLRAEPKIAMLSFSTKGSARHPHVSKVTDALARLRADHPDLDADGELQFDAAFVPSVGASKAPGSDVAGQANVMIFPNLDAGNIGYKITQRLGGYTAIGPVLQGLAKPANDLSRGCVAGDVTQMIAVTVLQAMAQTQ

SEQ ID NO: 30210 - protein, 68 aa, Silicibacter pomeroyi DSS-3
MANGTVKWFNSQKGFGFIAPEQGSKDVFVHISALERSGIQKLDDGQAVTFDIESGRDGRESAINLALA

SEQ ID NO: 30211 - protein, 395 aa, Silicibacter pomeroyi DSS-3
MSAERILIAGGGIGGLAAALGLARQGRRVLVLEKAAQLGEIGAGIQLGPNAFHAFDYLGVGDAARALAVYIDNLRLMDAITGVEITRIPLDDPFRARMGNPYAVVHRGDLHGVFLRACQDSPLVELRTSSAVVGYEQDGTSATALLQDGTRETGAALIGADGLWSKVRAQMLDDGPPRVSGHTTYRSVIPVEDMPEELRWNAATLWAGPKCHIVHYPLQGWRSFNLVVTYHNDAPDPVAGMPVTADEVRKGFEHVSPVARQVIDKGQDWKLWVLCDRDPVMTWTEGRVALLGDAAHPMLQYFAQGACMAMEDAVRLSALVGEGGEIETLLRRYQDSRRLRTARVQLQSREIGEHIYHPDGAHAALRNAMMSAKTPEEWYDSIEWLYGGTGLTGAV

SEQ ID NO: 30212 - protein, 372 aa, Silicibacter pomeroyi DSS-3
MTCPEQAIEHDDMNVVVDVEKCKFCMDCIPVCPTGSIDNWRVVDTPYSLEDQYGWMDLPPQEDVAGDEAGLEALDDAMAALLAEAHKGAGGKSRAPATASKPTINLYTLGKPAEARVTGNYRLTAESSDSDVRHIILDFGGQPFPVLEGQSIGIIPPGTDEAGNPHLPRLYSVSSPRDGERPNFNNLSLTVKREPHGICSNHVCDLKPGDTVRVTGPFGATFLMPSDPAAHLLMICTGTGSAPFRAFTMRRQRESPKLRNSLTLVFGARRPQELPYFGPLAKVPEQFMAKHFAFSRQDGAPKHYVQDRLRAEADRVGELLADPLTHVYVCGLKAMEQGVEEAFKDIARAQGIDWTGLRDRMRDEGRYHVETY

SEQ ID NO: 30213 - protein, 442 aa, Silicibacter pomeroyi DSS-3
MTLIKTLLPAAAVIALPTLGLAQEATADITPPNEEIGYIFTTFMFLVSGFLVMWMAAGFTMLEAGLVRQKNVTMQLTKNIALFSLAALMYYLIGYNLMYPGDGWSIDGVLGAFSPAAMEPVGLADTETDLTYASVGSDFYFQLMFCATTASIVSGTLAERIKLWPFLVFVLVLTGLIYPIQASWKWGGGFLDAAGFLDFAGSTVVHSVGGWAALAGALILGPRLGKYKDGRVIPFMGSNLPLATLGTFILWLGWFGFNGGSQLYMDTAGNVADISRIFANTNTAAAGGAVAALLLTQLLYKKVDLTMVLNGALAGLVSITAEPLTPGLGSATLIGAVGGVIVVFAVPFLDRLKIDDVVGAIPVHLMAGVWGTLAVCLTNGDANLGTQLYAIVVVGLFTFVVSGAVWFILKMVMGIRVSEEEEINGLDMAELGMEAYPEFSKS

SEQ ID NO: 30214 - protein, 1510 aa, Silicibacter pomeroyi DSS-3
MTKYDADWVRAEEAKRKWLAENGLYSEEEEHSSCGVGLVVSVNGKRSRKVVEAGIDALKAVWHRGAVDADGKTGDGAGIHVQIPVPFFYDQIRRTGHEPRMNELVAVGQVFLPRTDFGAQERCRTIVETEILRMGYFIYGWRHVPVDVTCLGEKANATRPEIEQILISNSKGVDEETFERELYVIRRRIEKAAQAAGIAGLYLASLSCRSIIYKGMMLAEQVAVFYPDLMDERFESAFAIYHQRYSTNTFPQWWLAQPFRMLAHNGEINTLKGNLNWMKSHEIRMASSYFGEKAEDIKPIVPGGSSDSAALDAVFEVLVRAGRNAPMAKTMLVPESWSKQAVELPQAWVDMYSYCNSVIEPWDGPAALAMTDGRWVCGGLDRNGLRPMRYVVTGDGLLIAGSEAGMVPTDEATVVEKGALGPGQMIAVDMAKGKLYHDRALKDKLAASRPFGDWVGKINNLEDQLGDVEETPLFTGAELRKRQIAAGYSVEELEQVLAPMAEDGKEALASMGDDTPAAVLSKQYRPLSHFFRQNFSQVTNPPIDSLREYRVMSLKTRFGNLKNVLDEDSSQTEIIVAESPFVGNAQWETLKKNFNAPLVEIDCSFEQGSAGLGAALARIRSEAEEAVSSGAGHLLLTDQYSGPGKVAMPMILATSAVHSHLTRKGLRTFCSLNVRSAECIDPHYFAVLIGCGATVVNAYLAEDSIADRIKRGLLDGSLTENIARYREAIDQGLLKIMAKMGISVVSSYRGGLNFEAVGLSRAMVAEFFPGMTSRISGIGIKGIQTKAEEIHARGWDSGLDVLPHRGFYKARKSGETHAWEATSMHMMQMACNRASFELWKQYSAKMQSNPPIHLRDLLDIKPLGKPVPIEEVESITSIRKRFVTPGMSLGALSPEAHKTLNVAMNRIGAKSDSGEGGEDPAHFVPESNGDNPSAKIKQVASGRFGVTAEYLNHCEELEIKVAQGAKPGEGGQLPGMKVTDLIARLRHSTKGVTLISPPPHHDIYSIEDLAQLIYDLKQINPRAKVTVKLVASSGVGTIAAGVAKAKADIILISGGNGGTGASPATSIKFAGLPWEMGLTEAHQVLSMNNLRDRITLRTDGGLRTGRDIVMAAMMGAEEYGIGTAALIAMGCIMVRQCQSNTCPVGVCTQDESLRAKFTGNADKVVNLITFYAQEVREILASIGARSLDEVIGRADLLAQVSRGSAHLDDLDLNPLLITVDGAQNIVYDRAKPRNVVPDTLDAEIVRDAARFLEDGEKMQLSYSVQNTHRTVGTRVSSHIVKRFGMRNDLQPDHLHIKLRGSAGQSLGAFAAPGLKIEVSGDANDYVGKGLSGGTIVVRQPQVSPLKADENTIIGNTVLYGATDGHLFAAGRAGERFAVRNSGAKVVIEGCGTNGCEYMTGGVAVILGGIGANFGAGMTGGMAYLYDPDGQAQLLMNMETLVTCPVSVAHWEAQLKELVERHAEETRSAKAAHILQHWDIEKGNFLQVCPKEMLNKLPRPLSHDSLAMPAE

SEQ ID NO: 30215 - protein, 709 aa, Silicibacter pomeroyi DSS-3
MDKCASLRYMAQSLRRGESRALLDIPLMTSPLLDALAERGFDTLTDVQQAVTDPELASADLLVSARTGSGKTVGFGLAIAPTLLGEAETLGPPAAPLALIVAPTRELALQVSRELTWLFAKAGGRIATCIGGMDARTERRTLERGAHIVVGTPGRLRDHITRGALDLADIRAVVLDEADEMLDLGFREDLEFMLGEAPEDRRTLLFSATVSPAIAELAKTYQRQAARISTLGGERQHSDISYQAVQVSGGDGEHAIINLLRFHDAPTAIVFANTRAAVARLTARLANRGFAVVSLSGELSQDERSHALQAMRDGRARVCVATDVAARGIDLPNLDLVIHADLPTNTEGLLHRSGRTGRAGRKGISALIVPDKISKKASRLLKWAKIEAEWTQAPTPEDILAKDEARLLADPLWTDPVEDEETRIAAGLMEQFTAQQIAVACLRLYRAKLTAPEELNQPPARGAPSVAASFGPSRWISLSVGREQRAEPRWLLPLLCRAGNLEKSQIGKITMQAQETHVELAEAAVQGFLDQIGPSGVVEGEITARLLDGVPEMTRGPQGKPRPRSDRPAAKPFKPAKPRHKADRDSAAPAAEPRPFREREATPAPAKPRRAREDGADRPAKPARATLHAGKSEKPYKPRKPASGPGVKPSSKPGGKPSDKPGGKPWAKPGAKPGVKPGGKKPGGKPTAGASRPAAGRPGGEAPPKRKRD

SEQ ID NO: 30216 - protein, 109 aa, Francisella tularensis subsp. tularensis SCHU S4
MYTPEEQKVVERIEKQLKENDIILYMKGSPNLPQCGFSAHAATAIRSCGKPFAFVNILENPDIRAILPKYADWPTFPQLWVKGELIGGCDIIMEMNESGELKKLIDSVK

SEQ ID NO: 30217 - protein, 609 aa, Francisella tularensis subsp. tularensis SCHU S4
MANMIDKIDLKSQGSSNLSGEMTNHQKVGTLYKRLLLQVKHLWHFLLLAAIGSIFFSAADASMIYLINPILNYGFGPGGGITKQSATILMLMGVGMVGLLALRSVGSFVSQYFIGSLGQKVVYKFRKDIYKRLMDLPASFFDKHSTGQIISRLLYNVDQVIEATSTAIITVVQDGTFVIGLIVVMFVSSWQLSLFLIVVGPFLGLFISIINKKFRNLSRNTQSSMGNVTHTAEETIRNYKEIRIFGAQQKQQNKFFKNLDYTYSQQIRTIALDALTSPVIQIIASLVLAFSLFTIAIFGTNEGDGSSWLTAGSFASFFAAAAAILKPIKNLTKVNVVIQKAVAATEDIFYILDYPAEKETGSKELAKVDGNVTIKDLSFAFGEHKVLSGVSVDIKAGQTVAFVGKSGSGKTTLTSIISRFYTQHEGEILLDGVDTRELTLENLRSHLSIVSQNVHLFDDTVYNNIAFGLSREVSEEEVIDALKRANAYEFVQELSDGINTNIGNNGSKLSGGQRQRISIARALLKNAPVLIFDEATSALDNESERVVQQALESLTKSCTTIVIAHRLSTVENADKIVVMDGGRVVESGKHQELLEQGGLYTRLYQSGLQ

SEQ ID NO: 30218 - protein, 345 aa, Francisella tularensis subsp. tularensis SCHU S4
MKVITAEYIWVDGSDPVPHLRSKARVLPFKEFETPDEFPEWSFDGSSTNQATGDNSDCILKPVNFVIDPLRDYGYLVLCEVYNPDGQTPHATNNRAKLRALLASADCQDMWAGFEQEYTMFKDGRPLGWPTTGFPGPQGPYYCSAGNSKAFGRDLVEAHMQACLEAGILFYGINAEVMPGQWEFQIGYRGVDGEDAGILNVADHTHLARWLLERLGEEYGIDISFDNKPIKGDWNGAGLHTNFSTSKTRNPQTGREAIKKICAALEKNHKKDILNYGHNLHERLTGKLETSDMNTFSVGDADRGCSIRIPRPVALKGYGYLEDRRPGANADPYVIAMALANAAIN

SEQ ID NO: 30219 - protein, 551 aa, Francisella tularensis subsp. tularensis SCHU S4
MKANHIRILLLVTIAIMFISLMGKWEQTFPADNTKQQTSATQNNSHYDNADSSTNTDVTTTDAKSSLAKETNFSKYDNAKSITINTGVFKDVKVSLLDGAIISASLKDYSISLDDKTPMSLLTDKSGSEYIAKSTIVVNKQPISVNFEDQGIKIENGKQILTLTGSADGLQITRTYTFDDTKYNISVSQNIKNTTSAPVNVIVDDSFARDFDPAGDSFSLLNAHSYTFTGVAYSTAKDSFRKESFKDISKTNGQPTVINSDGQGWVAFLQHYFVSAWIPQSTNAKIYYKNLNGDVFEAGAFTGATIAPNQSENISSILYTGPIIKANLVDLAPNLEKTLDYGMLSFFSEIIFWVMNHIHSLVGNWGLAIILVTCLIKLIFYPLSAKSYRSMAKMRMLQPRIKRLQETYKDDRQALGKKMMELYKEEKVNPLSGCLPMLIQIPIFISLYWVLLESVELRQAPFIFWIHDLSMKDPYFVLPVLMGLSMFLQQKLSPAPADPMQAKVMMFLPVIFTFLFASFPSGLVLYWLTNNLISISQQWIITRHYQATHKK

SEQ ID NO: 30220 - protein, 484 aa, Francisella tularensis subsp. tularensis SCHU S4
MFAAYYASKQAGSASVISWLIGAGMVLILSLLLGEVASFRPVRGLFGRLLTISHNPDMGFVVAISNWVGLLLTIPSEAQATIQYLSTAYPKIEPYIFTNHNLTYLGILCVVVLIFFYGLINYWGVKTLTKFTNFMTIFKVGVPVLIAIVLFYTSYNSHNFVAYHNSFNPYGYGAVFSAVVTCGIFYSFYGFGTIATFCSEIKNPKRNIPLALTGCILICLIVYLMLQVAFIGALPSSFLAHGWHQLNFTSPLAQLMLLLNLNVFAICLYIDAAISPSGTATVYAGSAGRIFTGMAQDKQMPAFFAKMNEEFNLSRRLLIFGLLICIAIVLFFRSWQQLMIVVAVFQLLTCVAIPIAYVKLNKEMKKTSDIFHVPCGRILSGFVYLLVSYLIIQSGLKAVLFSLIIHLILFAVYALSYYRSAKGIKKAFASSWSIFFYMILTVIGAYFQGVNELDSISSVLVFFIVMLICYCFLLRQKTFANSIL

SEQ ID NO: 30221 - protein, 67 aa, Francisella tularensis subsp. tularensis SCHU S4
MNNKSQGTVKFFNEQKGFGFITPENGGKDVFVHISKLNGETLAEGQQVTFETQEGRKGPEAINIEVL

SEQ ID NO: 30222 - protein, 548 aa, Francisella tularensis subsp. tularensis SCHU S4
MTSEIKVNKTNFIKNIIKKDLETNKVSSILTRFPPEPNGYLHIGHAKSICLNFGIAQEFDGKCNLRFDDTNPDKEDIEYINAIQEDVEWLGFKWENQPRFASEYFDKMYELAILLIKKGKAYVCDLSAEEIRAYRGTLKEPGKNSPYRERSITENLELFEEMKNGKFAEGSKTLRAKIDMSSGNINLRDPALYRIKFSHHPKTGDKWCIYPMYTFAHPLEDAIEEITHSLCTLEFQDQRPFYDWVIEETEFSIKPQQIEFSRLNLNYTITSKRKLKYLVDNKLVNGWDDPRMPTIKGYRRRGYTPESIRNFCEMIGISKQDSVIDVSVLEDAVRDDLNKSVLRKNVVLDPIRVSIKDMPNHHLDVPNHPQDPEFGRREITISSQIFIERDDFVFKLEKDMKKLSPNGRVRLLNGYVIECQEVITDTSGEVIELKCSYLPETLGGKKPNDGIKPNGIIHWVDANNCLDAEVRIYDRLFNDENPANADRIEDVLNPDSLQVIKNAKVERSLESVKAEERFQFNRVGYFIADLKDCSNDTLVFNHIATLRN

SEQ ID NO: 30223 - protein, 322 aa, Francisella tularensis subsp. tularensis SCHU S4
MSEDLMIFSGNASKKLASEVAKELGATLGNATVDRFKDGEIHVVLNENVRGKDVFVIQSTCPPSDNLMELILLIDALKRSSAERVTAVLPYFGYARQDRRSKSARVPISAKVVANLLQAVGLDRILSVDIHAEQIQGFFDIPFDNAFATKIFLEYVRKNPEKYQNIKIVSPDMGGVVRARSVAKNLGVEIAVVDKRRPKPNVAEVMNIIGEVDGKHCILVDDIMDTGGTMCQAAKALIEKGGAAKVSAFCIHPLLSGDAIKNIEDSAIDELIVTDSIPLKPHAEACSKIKVITLAPLLAQIVEKTNGEESVSDIFRIDGLVD

SEQ ID NO: 30224 - protein, 67 aa, Francisella tularensis subsp. tularensis SCHU S4
MRQGTVKFFNTSKGFGFIEPQDGGKDVFVHISAVENAGLSSLREGEKVSFEVEENRGKMAAVNIKSI

SEQ ID NO: 30225 - protein, 327 aa, Francisella tularensis subsp. tularensis SCHU S4
MEISMTSHINNAVETFRLEIETLEKLKNSIDENFEKACEIILENNRDKSRVIITGMGKSGHIGKKMAATFASTGTPAFFVHPGEAGHGDFGMITKNDVLIAISNSGTSSEIMGLLPMIKHLDIPIIAITSNPKSILARNSNVTLNLHVDKEACPLNLAPTSSTTATLVLGDALAIALLKAKNFSEKDFAFSHPNGALGRKLILKVENIMRKGNEIPIVKPTDNIRKAILEISDKGVGNTLVAENNTLLGIFTDGDLRRMFEAESFNSQRAISEVMTKNPKSISKEEMAITALEKMEKYEITSLAVVDNGHNILGIVTMHDLIKLELR

SEQ ID NO: 30226 - protein, 396 aa, Francisella tularensis subsp. tularensis SCHU S4
MQLSRRVKAMQASPVRKLVPYSIQAEKQGKKVYHLNIGQPDIKTPNEFMDAIRACDKETIAYSIASGEPSLIKAISKYYKRFDMDFAEDEILITNGGSEALIFAAIATCNAGDEILVPEPFYTNYNGFTTAVDVSIRPITTKAEEGFHLPSKEEILACVTDKNRAIMISNPGNPTGVVYTKQELETLAEVAKEKDLFIISDEVYREFTYDGLVCTSFGNIKGVEDRVIIVDSVSKRYSACGARIGSLCSKNKEFIKEATKLCQARLCVPTLEQIGAAALYEVSEDYLKEVNTEYQKRRDITFEALSKMDNVVCEKPTGAFYVIAKLPIDDAEKFALWLLTDFEDNRETVMISPAGDFYATKGLGKDEIRIAYILEEKSLRRALELLDKAIKAYNSK

SEQ ID NO: 30227 - protein, 249 aa, Francisella tularensis subsp. tularensis SCHU S4
MLLEIKDLHVSVGEQKKQILKGLNLTVKKGEVHAIMGPNGAGKSTLSNVLAGKDGYEITQGSITFDGKDLNDLSISERAAAGIFLSLQYPIEIPGVSNVQFLKTALNSIRKQNGEDEIDAISFMKKLKENMQVLKIDQKYMSRGVNEGFSGGEKKRNEMLQLMMLEPKLAILDETDSGLDIDALQVVSQGANSMRSADRSFLVITHYQRLLDHIQPDFVHVLADGKIVKTGGKELALELEEKGYSWLNS

SEQ ID NO: 30228 - protein, 455 aa, Francisella tularensis subsp. tularensis SCHU S4
MDNNQDKLKRDILSRHIVMISLGGTISASFFLGIGSILNTVGAFGTVIGFFIGGIIMMLVMISLAEMAFEMPISGSFQSYATKFISPYSGFLTGWLYLLNWLTAAAGGLVAAGIICNNFYPAISVWQFCLAIILIVSLLNLCAVRVFAEIEFWLSAIKIITIIIFIIIGIGIIGGFLHSNKPIAGLVNFYVDGLFPNGFKAFLFGLVIIVCTFQGAEVVGIAAGETKEPEKNIRKAIRSVAVRILLFFVFSSFIIAYVIPYKDSGITNTPFVTVLQLVNIKYVDTIMQLVILSASLSAVNSCFYTCARLMWSMAEANQAPKIFAKISKKQVPIYGVVFVALLSCICLITKFIGAEKIFILVISSSGMVGCMIWIIISMCHIYFRKSLTASQIESLRFKAWGFPLIPYTSILFNSCVILAMFWDPEQRMVVYSGVILILLFSFLYKFYYKKIIVKT

SEQ ID NO: 30229 - protein, 297 aa, Francisella tularensis subsp. tularensis SCHU S4
MKKCGYISIIGRPNVGKSTLLNNILKYKVSITSRKPQTTRHQITGIKTLGDTQFIYVDTPGIHIKEPKAINKFMNKAATTMFKDVDVILFVVEMGKWTELEDNIVEKLKHSEIPIFLVVNKVDKKKSLEAAMFIESIKEKLSFYDVIYVSAKQGHNINELESRIEKLLPESEYFFYEEDQITDRSIKFMVAEIIREKIMRTIGSEVPYQIAVEIDSYKVDQEKNIVYIYASILVERDSQKGIVIGAKGAKLKKIGTDSRIDIERLVGMQVNLKTHVKVKSGWSDDDRALKSLGYDLI

SEQ ID NO: 30230 - protein, 397 aa, Francisella tularensis subsp. tularensis SCHU S4
MASLNKKIQNVSTSPTNAMAALAKQIKDQGNDVISLAIGEPGFSTPDIIKAAGIEAINKDITKYTNVDGLKELREAIVARYKREYGIEFAADQVCVTSGAKHSLHNIFNCILEAGDEAIFFAPYWVSYPDMIALTGAKPVVVETKFENNFEIDVTDLEKHITAKTKAVIINSPNNPTGLIYSKKCIEDLANLLIKYPNIWIIGDDIYDQLYFKDRVTLITEVAPDLADRYVIASGVSKNFAMTGWRVGFTIAPKLLNDALKKFQSQSATCACSISQYAAITAMNMPAQDLQYFVESYKQKAQFVTKYLEAMPYVDVKSAEGTFYLFPDLRKLLEHTNFSTDVELCNALLREEYVAMMPGVAFGLSGFARISCANEMPELEEAMTRVARFINKHVSTK

SEQ ID NO: 30231 - protein, 391 aa, Francisella tularensis subsp. tularensis SCHU S4
MSLIYLDYAATTPLSQSVKNSMLNSITSDDDFFNSGSLTYQQAEIVSNKIEQARATIAQTLEVLPREVIFTSGATESNNLAIKGVAYAYKDRGRHIITSKAEHKAVLDVCKFLETQGFDVTYLDVNQFGEVDLEQLKKAITPQTILVSLMAVNNELGTKNNLIEIGKITKQKGVMLHVDAAQGYGKVDIDIKAMNIDLLSVSGHKLYAPKGVGFLYLRSKRPKVRLVKQIHGGAQEFNLRAGTLATYQIFALAIAVKEMFAKKQQNFEYVLEMRRVFLDIIQDLASIKINTDLENSYPGILSVTFLGVKGETLLALVDGVCMSMGSACNSQAVEPSHVLSAIGLTATQAESTLRISFGLQTNKKQVIQAANLLKEKVQLLRALSPQGEVNV

SEQ ID NO: 30232 - protein, 642 aa, Francisella tularensis subsp. tularensis SCHU S4
MGKIIGIDLGTTNSCLAIMDGKTAKVIENAEGHRTTPSVVAYTDSGEILVGQAAKRQAVTNPDNTFFAIKRLIGRKYDDKAVQEDIKKKVPYAVIKADNGDAWVATKEGKKMAPPQVSAEVLRKMKKTAEDYLGEPVTEAVITVPAYFNDSQRQATKDAGKIAGLEVKRIINEPTAAALAYGVDSKKGEQTVAVYDLGGGTFDISIIEIADVDGDNQIEVLSTNGDTFLGGEDFDLALMNYLIDEFKKEQGIDLHNDKLALQRVREAAEKAKVELSSAQQTDVNLPYITADATGPKHLNIKVTRAKFESLVSDLVMRSLEPCKKALEDAGLSKSDITEVLLVGGQTRMPLVQEKVKEFFGKEPRKDVNPDEAVAVGAAIQGGVLAGDVKDILLLDVTPLSLGIETMGGVMTKLIERNTTIPTKKSQVFSTAEDNQPAVTIHVLQGEREMASANKSLGRFDLADIPPAPRGMPQIEVTFDIDANGILNVSAKDKATGKEQNIVIKSSSGLSEEDIEKMVQDAEANAEADKKFHDLVTARNTADNLIHSSRKAIQELGDKVTAAEKEKIEEACKELEAATKGDDKQAIESKTKALEEAFAPIAQKAYAEQAQAAVAQGGAKAEEPKKEEDVVDADFEDVEDDKK

SEQ ID NO: 30233 - protein, 111 aa, Francisella tularensis subsp. tularensis SCHU S4
MLISVLKSKISYATVTGKDLFYVGSITIDSEIMKQANIIENEKVQVVNLNNGERLETYVIKGEPNSKTIALNGPAARRCEIGDQLFIISYTQVDPTRENIKPKLVDLKTGD

SEQ ID NO: 30234 - protein, 376 aa, Francisella tularensis subsp. tularensis SCHU S4
MIQAKSYIDTTPSVYGKFALMANEYKALNFTQGAPDFDTPEWLIERTNFYIQHGKNQYSPIPGAVALRNAIVQKTKRCYDTDITIDNVAITAGDQEGLFCIISAYVGQGDEVIMFDPIFDTYAGVTKFNQGKCVRLKLLPNGKIDINAIANAITNRTKLIILNSPHNPMGTVISKDEFKEIAKIVKDKDILVISDEVYEHIYAGESFISAIQIPELHHKLVVFQSLGKTYNVTGWRQGVTIAPPQVIQNMLAIKQFATFSAVHPMQLALAEGILEHPEYYENLHKLYKKQNQLLREHLKGTRFKILDWQGSPFQILDYSISNQDGDKFASNLIKEHGVGLVPISSLFETPQDGLLRLCFAKKDHDIIKGAKILANI

SEQ ID NO: 30235 - protein, 628 aa, Francisella tularensis subsp. tularensis SCHU S4
MCGVVGFYSFNKEEGFDSIINQSLLSIKHRGSDDSGYWCDNQVTLGHTRLSIHDITNAGHQPMLSNSGNTAIVFNGEIYNYLSIKNQLLSEYSNLKFKSNSDTEVLVNAIELWGIDKTLEKCIGMFAFGVYSRKTSCLILARDRFGEKPLYFGIQNGILGFASELKALKPLKECGWRFDIDRDALATYMRYAYVPTPYSIYKNISKLNVGSYIKFDAKGNSKEYKYWDSKKVLDSEKYKDSYDQAILDLEIKLKSTLSIQMQSDVPLGAFLSGGIDSTTVVALMQSMSKDKINTFSIGFNQKEYNEAEHARAVAKHIGTNHTDMYVTERDALDVIPKLAGIYDEPFADSSQIPTYLVSKIAKSKVTVALSGDAGDELFGGYNRYFLAPNIAKKIKFAKLLKYAPDAWIKKAEILNFGKFALLADKLLKLKRVLEKAKTNKELYVLLCSQINDTSFVLGAKEYDILRDKNIYDIPQLSFQEWMMFVDSNTYMIDDILVKVDRAAMANSLETRVPFLDHNIYEFAYSLPIDYKIQRGNGKRILKDLLYKYVPESLVNRSKMGFGIPLAKWLREDLREWADNLLDYSKIDKQGYLSPEVVQKYWQEHLSGKRNWQAILWNILIFQEWLDNE

SEQ ID NO: 30236 - protein, 569 aa, Francisella tularensis subsp. tularensis SCHU S4
MNSETKKDFSQLGLNQDIVDTVIKLGYENPTPIQQYAIPYILSGRDVLGQAQTGTGKTAAFALPLINNMDLASRDRAPQVLVLAPTRELAIQVAEQFEAFAKNVPNLDVACIYGGQEYGSQIRALKQGVKVVVGTTGRVMDHIEKGTLQLDNLRALVLDEADEMLRMGFIDDVKFVLSHVSEQCQRLLFSATIPTDIADIIEEYLRNPCKIQVKAKTKTANTVTQKFIVIKGFRKIDALDRLLETEETDGVIIFVKTKTSTIEVADNLKALGYKVAAINGDMQQSQREYIVDQFRSAKSDILVATDVVARGIDLERISHVINYDMPNDTDTYVHRIGRTGRAGREGTSISLVPLKEMRFLRTLERFTGSPMQEVFMPSAKELAQSRVEHFKARIISALDKNKSLDKYKEIITSIRDELQLDSEELLAGLTLLAQGKKTFFPKEIQAKEEKPARDNRNSRDGRRNERFERRNDQGDRTKRFDKADRKPRRAVNIDLTTYKLDVGRDNDVQARNIVGAIANEGNIDSKHICNISIQKDYTLVDLPANLSPKVINHLKKVWVAGKKLNLTAQ

SEQ ID NO: 30237 - protein, 395 aa, Francisella tularensis subsp. tularensis SCHU S4
MSENVYIVAAKRSAVTKGKKGGFAKKRPDELLADVLRRTVAEANINPNDIEDIVVGCAMPEAEQGLNVARISSLLAGLPNSVPAFTINRYCSSGLQSIAIAANEIAQGNIDVAIGAGVESMSMIPFGGNKMSFSKEIFAKDENVAIAYGMGITAEMVAKDWNVSRQDQDAFALESHQKAIHAIESGYFKDEILPIDVDHNKPDEATGEIINHKQTITEDEGARKDTSLEALAKLKPAFANGGSVTAGNSSQVSDGAAAVILVSEKYLKEHNLKPLGKFLGFAVAGVDPRIMGIGPIKAIPKVLRQTGLNIDDIDWIELNEAFAAQSLAVINDLKLDKNKVNPCGGAIALGHPLGATGTILTVKALHGLQRTSKKYAMITMCIGTGMGAAGIIEAC

SEQ ID NO: 30238 - protein, 295 aa, Francisella tularensis subsp. tularensis SCHU S4
MAKMSKQVGIIGLGNMGSVVIDHLLTSGYEIFIHNRTKAKAEKWLRNTQVVWCDSPKELAENCEIIICCLYNDIAAKNVYLSKNGLTSINLVNHTILDASTLSVSCFEQLNKVVTQNNGKLIDMPISGNPAALQEKRALIMLGATEEECKSFVHFLEALSNKILYLDIAGSALKEKLCINEMLFTQWFSYCEAMLLAENNGIKTEDFFKAMSQSVISSPLLVQRSQYFFGYNVNPSDLNMILKDIDIIEDFVNKSKTKVTLLQKFREVVEYAIKHDFTNQDFYGLYRAYKEIYKK

SEQ ID NO: 30239 - protein, 334 aa, Francisella tularensis subsp. tularensis SCHU S4
MRFVDEVVIKLQAGKGGNGCVSFRREKYVPRGGPDGGDGGNGGSIYLKADENVNTLIDYRYKREYYAENGRPGEGRNCYGKAGEDLYLVVPVGTSVFDIDTNKKIGEVLQHGQTFKLVSGGKRGIGNTHFKSSTNQAPRKFTLGEEGEYKEVRLELNLLADVALLGLPNAGKSTLIRSVSEATPKVADYPFTTMYPHLGVVKVGVDSFVMADIPGVIEGAAEGAGLGLRFLKHLTRARCVLHVVDICPFNESDPVENYFAVEKELEKYSQELFDKPRFLVINKIDLLADKVEQKCQEFVEQIGYQGNYYTISAAMKKGTDELAKKLNEFLQKQE

SEQ ID NO: 30240 - protein, 565 aa, Francisella tularensis subsp. tularensis SCHU S4
MKKYITGEKLFDTSKHATNVAEYIVARLVDLGITHSFCIPGDFSFALDCALINNPKLNNIVNANELNASYAADGYARVKGAAILSTTYAVGELSALNGVMGSKAENLVVFHLVGSPGDGAVGKKRQVYHTLGDGVFGNFFDLSASAACVSAVITPENARREMNRVIAEAFKYRKPAYISVSLDSGNRPVTDITPDDIDCSYLKSESHQLELATNLVLEHLSKAKKVVAIPAIKLDRFGVTEKAINLIEKLNIPFSIMPHDKSVISETHPNYVGFYAGLLSDTNTAEIVEGSDLIINLGDALWSDFNTAGFTNNLDLNKVLNLGPLFVEDNKTYLADVYLSELLDALLEKVESINYRPNYSRMKIQDTTITKEKLTLRALYTQVLKFLENTDSLVVETGSSSLNMPKLPLPEGVKYFNQTLWGSIGWATPAALGVALANPDSRTILITGEGSHQLTLNELGVMGRYKINPIILYINNDGYMIERALELDPNPSYDDIAQLNYTKLPEAFGCNDWLAIRVKTSEELAEALKKAREHQSGVYIEVITGKYDYGNALDFFNNHLKEMYS

SEQ ID NO: 30241 - protein, 384 aa, Francisella tularensis subsp. tularensis SCHU S4
MSEILVLNCGSSSVKFALINPHTSQSLVTGLAENIATKNCKVVFKAEHKIVKYLENGSYKDVFEMLKDFLVENKHLEKIVAIGHRVVHGGQYFSKSVLINADSLEKIKACIALAPLHNPAHIEGIRFCQQIFPELPQVAVFDTAFHQTMPSYIAEYAIPYELTHKHNIRKYGAHGTSHKYVSEQAAKILTQQKANVIVAHLGNGCSITAVVDGKSIDTSMGLTPLDGLVMGTRSGCIDPSIFAYISDNLGWSVTEITNMLNKQSGLLGICGHNDMREVSQLAAKGDSLAKLAIEIFSHRVAKFVASYMIYFNKLDALVFTGGIGENAANIRKNIISKLANLGFMIDHQKNSNSETFINSKNSHNIMVIATNEELMIAQETQNLI

SEQ ID NO: 30242 - protein, 698 aa, Francisella tularensis subsp. tularensis SCHU S4
MKKSIFILPTSKHTGLRLLASSMVYALQQKGLKVGSFHPIYDMQMSIENIQEYLLNNRVKDYVEIVLDKFYQKSQEFDFIIISGLFRQGNNAHKLYPINAIIDELNIEIVKALSSEVIITSYHGNKPLIDINDELDYAMRSLPKQINIIGAIITKLNAPYDDDGRVSFSLTDEDISSEQQQQVTVNMLRELPVFAQKGLNLIGVVEWQQEKTSPRILDIKNILKLNLISRVSLEARVDRVMMCSRGVDNFINDLTPNSLVITSADRSDILVTVCLAAKNGMKIAGILLTAEEYLNDKVKELCVETAEKVGLAILTTRNKSVKTILRIADIDLMGIPLDDKERIQRVKEIICNSLDRDKIISAITADVLGHQVMSPPAFRYHLLKMATKAKKRIILPESYEPRTLQAAKNSHEQGLAECVLIGDRDKIHKVAEMNGFSLPKDIQVVNIDDEAEIKYLNTLMNLRKHKGLSESMARDALKNPIVVATVMLYLGEVDGLVSGAEHTTADVLRPALQLIKTKPNSSLVSSVFFMCMPDQVIVFGDCAVNQDPSAEQLVDIAIQSAESAKKFGIEPRVAMISYSTGTSGSGVQVEKVRTATELLKQKAPELLVDGPLQYDAAMIESVAKSKAPDSPVAGRATVLIFPDLNTGNTVYKAVQRSANVLSIGPVLQGINKPVNDLSRGATVDDITYTIAITAIQAI

SEQ ID NO: 30243 - protein, 859 aa, Francisella tularensis subsp. tularensis SCHU S4
MDINKFTIKLQEALAEAQSYAFQQKATEFTSAHILKALLEQNDSVAISILSVCGVNIQNFIKAVNDMVDSVAVLSGEGNPQVTPSRDLIATLHKMQGLANKNGDEFISSEVFLLASLEDKSLTGLYNKFGITKEKLTKAVNDYRGGEKVSSQNQEDMKGALDKYTVDLTDLARKGKIDPIIGRDSEIRRTIQVLQRRTKNNPVLIGEPGVGKTAIVEGLAQRIVNDEVPEGVKGKKVLSLDMGALLAGAKFRGDFEERLKSVLKELSKQEGNVILFIDELHTMVGAGKAEGSMDAGNMLKPALARGELKCVGATTLDEYREYVEKDPALERRFQKVLVDEPTVEDTIAILRGLKERYELHHGVNITDSAIVSAATLSHRYITDRQLPDKAIDLVDEAASQIRMEIDSKPEKMESLYRRIIQLKMQREQLKKEKDDATKKRLEILEQEIKGLDSEYKGLEELWKAEKLKMQGTSKLKEELEKAKFELEKYQRVGDLSKMAELQYGKIPELEAQIKQIEETEAEPSENKLVRTSVTENEIADVVSKATGIPVSKMMEGEKDKLLNMESFLHKRVIGQDQAIKAVSNAVRRSRSGLSDPNRPIGSFMFLGPTGVGKTELTKALAEFLFDDEDAMLRVDMSEFMEKHSVARLIGAPPGYVGYEQGGYLTEHVRRKPYSVILLDEVEKAHADIFNILLQVLDDGRLTDGQGRTVDFKNTVIVMTSNLGSHRIQEMQGQDYETVKSAVMEMVLSHFRPEFVNRVDDAIVFEPLNKEMITEIAKIQIKRLEKRLADLSIGLEVTTGAMDKLADAGFDPVFGARPLKRAIQNNLENPLALKLLDGEFKAEDKIVVDIDANNNIIFSK

SEQ ID NO: 30244 - protein, 477 aa, Silicibacter pomeroyi DSS-3
MTLTRRKLLGYGALAGLAVPAAMQAHWLSRDFTRPDYSPDIPPAPPGRQVWRNWSGYQVATPQQIYAAASEEELATRIAAWPGRIRPVGSGHSFSALVPSQDMILDTGRLSGLISVDAAAGMATFGAGTRLRQAAMLAADHGLGFANLPDIDVQTLAGSFSTATHGTGRGLQAMHGCITGFRLITADGTARDVTRDSNPDLFDAGRVSLGTLGVITRYTLKLEPSYALNRRLFILPTDEAITRMHDLAAAHRNFEFYVLPNLGYAAVITHDLYEGEIAGRVPSEDEDWIATLKDLRDILGWWPWLRRRAFGAYVALEVPADGVLEDTTDEYWKLLSTARATRMNEMEYHLPEDRAQEAVRAVVAALESRKESFFPMEVRFTGQDDAWLSPFNDGTRVSVAVHKLASEPLDMLFGTVEPIMRAYGGRPHWGKLHSLNAPDLVALYPDFDRFAALRARLDPAGKFLNPHTAALFGAGDV

SEQ ID NO: 30245 - protein, 533 aa, Silicibacter pomeroyi DSS-3
MTTVGEALVAGLAARGVTCVFGIPGVHTIEMYRGLAASGIRHVTPRHEQGAGFMADGYARVSGRPGVAFVITGPGVTNTLTAMGQARADSVPMLVVSGVNTRASLGRGMGHLHELPDQLGLVSQVALEAHRVSQADQLAPALGSVFDRLATGRGGPCHIEVPLDVAGSGFDGALPAATPALPDEPEAALLDTAAARLDAARRTVILIGGGAKGMETALQALAERLDAPVVQTVNARGLMHGHPLTVAASPSLDAVRALISGADRVLAIGTELGPTDYDMYATGTMPSMAGLIRIDICDAQLARHPADLTIRGDAGATVVGLLARLPEGARTHDGASRATAARHAAREEIGPYMRSMVEMLEAARDAVPGALMVGDSTQPIYAGNLVYDHDRPGGWFNAATGFGALGYAIPAAIGAAIAAPETPVICIAGDGGAQFSLSELMVARDEALPITFVIWNSRGYREIDMSMRAVGVEVVGCDPTPPDFAAIAAACGMPYATCAAGDPAGFAAALAEARRHAGPTLIEIDAPYAPEQD

SEQ ID NO: 30246 - protein, 272 aa, Silicibacter pomeroyi DSS-3
MSYADTVLGFARIARAKAEHLNADPLGFVILTLKAGAYVGAGILLIFSVGQGVDASIRPIVMGASFGIALTLVVFAGAELFTGHTMYMMHGVLTGRASIRDLARCWCASWAGNLAGAILLAAIFVIGGGGLILAAGDEALLYKVAAKKMHGTAPELFAKAILCNWLVCLALWTSARARDDVTKCVLIFWCLYAFIAAGFEHSVANMTVFSVALLSNHPDGISIAGAIWNLTWVTLGNTFAGAVIMGFGYWGAASRPSFSDTGIEKSAHGKPE

SEQ ID NO: 30247 - protein, 332 aa, Silicibacter pomeroyi DSS-3
MSDPHLNSMMENLYWWGIPTLFRCPNLPPAGQDIALVGVPHSTGNGTTERDQHLGPRALRNVSSMQRRMHGGFGLDPWSAAKIADLGDVPFPRANDNEDCIEQITRFFREIDAAGARPISVGGDHSITGGIIQALGCGAITRGQPVCLLHLDAHTDVFTKVDHFLGARKSAAHWGAYLADQGKVDPGHSMQIGLRGHARTLDWLQPSYDYGYNVVTMKEFRQRGLADVVAQIGEVLAGRPVYITFDLDCLDPTIAPGVSNIEAGERGFDIDEAIGLLNAVRGLNIIGGDIVCMMPTKDSPNQITALTAGAVMFEMISMVAENIANQARGAGT

SEQ ID NO: 30248 - protein, 328 aa, Silicibacter pomeroyi DSS-3
MSQKDTEFFQPVSGMDLPRFAGVPTFMRLPHVTPDHAAYDQVQIGLVGVPWDAGTTNRPGPRHGPRQLRDLSTMIRAGNPATGVNPFALVNCADLGDVAPNPIDIMDCMDRISRFYAGLKSSGILPVTAGGDHLTTLPVLRGLASDAPVGLIQFDSHTDLFDSYFGGNKYTHGTPFRRAIEEGLVDPRRMVQIGIRGTAYNTEDVEWGEAQGVRIIRIEEFFDRGVADVMAEARDIVGDKPTYCTFDIDFVDPAYAPGTGTPEVGGPNSFQALQVVRELSGLTLIGADLVEVSPPFDAQGNTAWLGASILFEMLCVCAKAISARARDA

SEQ ID NO: 30249 - protein, 448 aa, Silicibacter pomeroyi DSS-3
MTRTPQTHEAAPGGAGSISLTNAVAMGTGVMIGAGIFALTGQIAGLAGPLFPLSFVLGAVVTMFSAYSYIVMSNTWPSSGGIAMILTKAYGPGAVAAAASVLMALSMVINESLVARTFATYALRPFGIQDGPLVPAIGVALIVMAYLVNVSGNRAVGLWSLVMSAVKIGGIALFGIAALWASGIENWSPAARLSQNGITGFAASVALSILAFKGFTTITNSGGEITDPRRNVGRTILLSIAVCVVVYLLVALAVGSALTPVQIQQARDYALAEAAQPVLGQTGFYLTVALAMVATASGLIASVFAVSRMLTMLTEMKMIPHSHFGMPGGIRSHMLIYTVVIAGALTVLFDLGRIASLGAFFYLVMDMVVHWGVWKNLRHRIGARGWVILTALTLDAAVLAAFTLFKWRADPTIVIVALVTMLAALLAERLYLGGFVSDGGEGKHTGHR

SEQ ID NO: 30250 - protein, 583 aa, Lactobacillus brevis
MQAQSKNNTKFNFKTFMGLINRIHPRYWQLLLGFFLGVVATAMQLMVPGIAKGIINSIGHSMDVGLIVAVILLFVSSTIIGAFSGSILGFFGEDVVYKLRTTLWDKILTLPVGYFDQTKSGEITSRLVNDSTQVKELLANSVPKTATSILQLVGALVLMLIMDWRMTIIMFIAVPLVLICLLPIVRQSHKVARARQDALADLNGKAGEMLGEVRLVKSSTAENLERTAGDKRMYRLYRIGLKEAIYDSIAGPVMGMVMMAMVLEILGYGAIRVREGAIDIGTLFSFLMYLVQMISPFAVLGQFMSDVAKASGSTTRIQALLQTHEEDRLTGTDLDIGDQTLQMNHVSFSYDQHHPILSGVSFTAEPNSVIAFAGPSGGGKSTIFSLIERFYEPNEGSITIGNTNITDIQLADWRQQIGLVGQDAAIMSGTIRYNLTYGLPGHFSDEQLWHVLEMAYATQFVQKMPRGLDTEVGERGVKVSGGQRQRLAIARAFLRNPKILMLDEATASLDSESEMMVQKALDQLMANRTTLVIAHRLSTITNADEIYFIENGRVTGQGTHQQLVKTTPLYREYVKNQSATSNG

SEQ ID NO: 30251 - protein, 583 aa, Lactobacillus lindneri
MQAQSKNNTKFNFKTFMGLINRIHPRYWQLLLGFFLGVVATAMQLMVPGIAKGIINSIGHSMDVGLIVAVILLFVFSTIIGAFSGSILGFFGEDVVYKLRTTLWDKILTLPVGYFDQTKSGEITSRLVNDSTQVKELLANSVPKTATSILQLVGALVLMLIMDWWMTIIMFIAVPLVLICLLPIVRQSHKIARARQDALADLNGKAGEMLGEVRLVKSSTAENLERTAGDKRMYRLYRIGLKEAIYDSIAGPVMGMVMMAMVLEILGYGAIRVREGAIDIGTLFSFLMYLVQMISPFAVLGQFMSDVAKASGSTTRIQALLQTHEEDRLTGTDLDIGDQTLQMNHVSFSYDQHHPILSGVSFTAEPNSVIAFAGPSGGGKSTIFSLIERFYEPNEGSITIGNTNITDIQLADWRQQIGLVGQDAAIMSGTIRYNLTYGLPGHFSDEQLWHVLEMAYATQFVQKMPRGLDTEVGERGVKVSGGQRQRLAIARAFLRNPKILMLDEATASLDSESEMMVQKALDQLMANRTTLVIAHRLSTITNADEIYFIENGRVTGQGTHQQLVKTTPLYREYVKNQSATSNG

SEQ ID NO: 30252 - protein, 391 aa, uncultured bacterium
MTTSNVYIVAAKRTPIGVLLGQFSGITAPQLGATALRAAVAASGIDPAAIDEVFMGCVLTAGVGQAPARQAMMAAGLPLATGATTVNKVCGSGLKAIMLGHDVIKAGSAEIVAAGGMESMSNAPYLTHARAGLRFGNAVLHDHLLRDGIDNADGRSLGLFSEDCAAKYGFTRARQDAQATESVLRSQRAQKEGPFATEIVPVSVTSPSGENTISLDEGPLRADVSRIPLLPAAFKPDGTITPATASGFCDGAAATLLVSQQALQTHALQPLARIVAHATHSHEPEWFTTAPVNAIRKVLKKAGWSVADVDLFEINEALAVVPMAAMHDLEIPAERLNVNGGACALGHPIGASGARIVVTLIHALKARGLKRGVASLCIGGGEATALAIECL

SEQ ID NO: 30253 - protein, 908 aa, Porphyra yezoensis
  misc_feature (612)..(612): Xaa can be any naturally occurring amino acid
  unsure (1)..(908): unsure at all Xaa locations
MTPGPITTDAAAGVGVDTMDGTMKWELFEENRTLTTRSGQMIVNDGEFGKWNDTDEGRVKCFLTPDEGFGDAIESLVIVLYRLPIIAKRDATTGAWSFKWDDDALYLTSTGLRKGLEQLKVAPLWVGILNSDDEVPRQEREGVADRLLEEFNCVPVFIPHDTLKQLYQGFCKGTLWPLFHMVSSATDHTEHTTRFDDRLWRVYMNVNRMFRDKVVEVYDGDRTLIWVHDYHLMLLPQALRSRLSGVKIGFFLHIPWPSSEVYRVLPWRNELLKGMLSATLLGFHLFDYARHFLSACVRLLNLEHEANRGSLGLEYDGRHVMLRVSHIGVDPERFSEGLSAPSLTDRVAEFKERFADCTVLGAVDDLDLIKGIALKLMGFQRYLDSAPKMRGKVVLVQVAIPKAARVKESVRNEIRELVAAINNKHGDGSGRRPVWYLEESISFESRLALYSIMDALVVTPIRDGLNLIPYEYIVSTSEGKGQLILSEFTGCSRALSSAERVNPWDLEKLSNVLDMVVQKAIAAAPEVELKRRADKAYVSAHSSQQWAQSFLHDLKEASEPAQVVVKVGPLAGLPGVLAYDEFTLLNRSAVLRAYKAAKRRLFLFDYDGTLTXITDQSSQMAHAWARPSEAVAANLDTLSKDPLNDVYIMSGRKTEVLEAGLNNSPTIGIAAEHGFFYRKKNSKEWNRLLEDADLSWMELALRIMLMYTDRTDGSYVEQKKAGLVWHYLDADREFGSWQAKEMRDHLESLLSPFSVQVVTGYGWLQVRMAAMNKGVMVETILRDMPEPPDFVLCCGDDRTDEDMFAYLDTHLDPSVKQFTCTVGVKPSHARYYLHSSNEVGALLETLVTGSYPRGVRPRPRGGSVSLADLVPDDEGSSSTPAVPQRTNGPRTGASGQKRRGLASSLPSQ

SEQ ID NO: 30254 - protein, 508 aa, Rhizobium sp. TAL1145
MTPLLRLVDVSKSFGATRALRGVSIDIFPGEIHCIIGENGAGKSTLGRICGGFVRPDTGSFWYDGKEVPFFSPEEGRAAGLAMVFQELSLAPDLSIQDNLFLGAEPTRNPLRVLRRSRERSDCMSVLDAVGLGRIDIRLPVNQLPPGQQQLVEISKALARKPKILVLDEPSAMLSLAERKHLHGIMGELRANGTAIVFVTHHVSEVAELADRVTVLRNGALVECITGRQTVDQIVERLGGGGIPAPHRSQSQVVQNPDNSAADLLSIVVPRLDGSTKAIRVAPGEVVGLYGVIGCGSGRIASIVSGQASDAASVAMEVEGQKIAVNTPVRARRLGIGHLPNGRAANGILPTRSISENLYLRPRSRKQRASLAPTGGDPDKELSEIGVRYGNAKDPITSLSGGNQQKVLIGRLLGSDLRLLVLEEPTAGIDIAAKADVHNLLRECTGKGWGILLVSSDLEEAITLSDRIHTMFDGQCVRTYSAPTTGDMSSISADVVGATHAKDREEVL

SEQ ID NO: 30255 - protein, 420 aa, Porphyra yezoensis
MANVSPVHGGLSEPVNRVVDSLPSTELLPKIVVNATDYTTLHRIADGTLSPLTGPMTKADYDSVLLKKGIERDGKLWAWTIPLSLPVTAEEAKALKAGEPAALVSESGDVFGTLTVDAAFSWDKPAFLKAVYGTERTDHPGARLWLDDPRTDLVGGSISVLAHDEARPFKDRILYPQSMRALLKEQGYGASVAFQTRNPLHRAHEYALVYGAEKLLKEVGDSSKVGVFLNPLVGQLKGDDVPAATRMETYIKLIDGGFIGEGDMDEELWKSKGQNLREQTRLAGLDMRMFYGGPSEAVMHAIYRQNLGITHFIIGRKHADAPFDDKSAIWGDFDAQEIFEKLEGDLQIKTVNVGFAAYFEELGHVGLCSENKGKTTVSISGSKMREMLNSGSMPDSRVMRPATAQVLMDYYAAKNKSATA

SEQ ID NO: 30256 - protein, 408 aa, Synechococcus elongatus PCC 6301
MRSPVNCPAEGCFDNAAGSRQQTVMKILIPCEPGLQERRVAMLPSQLARLKQLTGGTISVQSGAGQPLGLSDRDYQEAGAEVSDQEEQLWRQADLVLSIGPWRSEQATPLNWLRSGACLIGLLDPWSQTDSLDRLAAQGVSALSLELIPRISRAQAMDVLSSQASIIGYRSVLLGATALGRYLPMLTTAAGTIPPAKVLVLGAGVAGLQAIATARRLGAVVSAFDVRKTAGEEVQSLGAKFIDVDLSESAEASGGYAKQLNEDSMARLRAGLLPHLQQADLIVTTAQVPGKPAPCLISAEMVAQLQPGTVIVDAAAERGGNCELTCAGREVDIDGVKVLGPTAIAAGLPHDASFLFGRNLLALLPLLCHEGELRLPLDDEIIAGCCVVTAGERRFPPQPKPLPVPEAV

SEQ ID NO: 30257 - protein, 392 aa, Synechococcus elongatus PCC 6301
MDFGIGFLSSNVMLPILDFFYGLVPSYGLAIIALTLVIRIALYPLSAGAIRNARRMRIANPVMQKRQQEIRERYANDPSKLQEETAKLFKEFGNPLAGCFPLLLQMPLLFALFATLRGSPFADINYTVNLQVLPSEQIAQVQPRAFSTKPQNVFVADGVHYRVAAVLPAGTQLGVGDRSAVTFQGTKGESFESLVGDRAADLKPTWSVTKGSEHIRVGEDGVVEAVSPGDATLQVTIPGIAANNGFLFIKALGEVGIQSEDGINWDVLGLVLAFGVSLYVSQQLSSQGAAPNPQQDQVNKITPVLFSGMFLFFPLPAGVLMYMVIANIFQTLQTFILMREPLPENLQKLVTEGAGAAGGSGLSAATAKNQTIDTTAERLPFEPGGNRKKKNG

SEQ ID NO: 30258 - protein, 574 aa, Synechococcus elongatus PCC 6301
MLLGQSQLRWLPGLRSLLHYRRAWLRGDVLAGVTVAAYLIPQCMAYGQLAGLPAIVGLWAILIPLFLYTFFGSSPQLSVGPESSTAIMTAVAIAPVAAQTDLSYSLLAAVMALLVGIVFLVAYSLRLGFLADLLSKPILIGYMAGIGLVMISGQLGKTSGIPITATKPLEEFQQFFAGLGQCHWPTVGVSILVLLFLFGVQKKFRTAPGPLLAVLLATLFVALFQLDQQGVQVIGTIPAGLPRWQWPTLPWQQWPTLTASAIGVALVGYSDNILTARAFAVRHRYEIDANQELLALGIANVGNSFFQCFPISGSTSRTVIGDALGSRTQLFSLVSLGTVLLVLWFFRPVLAMFPQAALGAIVIYAATKLIDLREFYRLRRYRPSEFWLALITAAGVLGTNMLIGVGVAVSLSVIDLFARVARPHAAILGEIPGMAGLHDIEDWPQAQTFPGLVIFRYDAQLCFANAEDFKRRVLLAIATAPQPVQWLLLNAEAIINLDVTAAEKLLELLRELQQRGVTLTIARAKQELIAELDRVGLVEQIGGEHFYPTLPTAIAAFQQFRQSQIADEPPLTAS

SEQ ID NO: 30259 - protein, 260 aa, Synechococcus elongatus PCC 6301
MNKASRPTLLRRWLLLGTSVLASFFYGANTSGTIAADLETIKRRGYLIVGVQANVAPLSWQDAQGQWQGFEVDLARSLAAELLGNSAAVRFEGLQSRDRLPALLADRVDLLIAQMTVTDARQRVAQFSRPYYRDRIGLLTRRGITQPQRVAVLQGSSAIPLLRWQAPELALVGVKSYAAAQTALDRGQVDGIAADRLVLQQWQRQSDRYQLLPQQWGDFPLAIALPQGLQYRSLQIAIDRLIQNWDADDKLRDIRKRWGL

SEQ ID NO: 30260 - protein, 512 aa, Synechococcus elongatus PCC 6301
MAQATATTEKLNKFEKLKLEKDGLAVRDQIQHFASIGWEAMDPGDREHRLKWLGIFWRPVTPGRFMARLRIPSGILQSQQLNALANFLQRYGDQASIDITTRQNLQLRGLLLEDTPEFLERLHAVGLTSVQSGMDNVRNITGSPVAGLDAAELFDTRSLIQALQDDLTAAGQGNSEFTNLPRKFNIAIEGGRDNSIHAEINDLAFTPAYQDGTLGFNVWVGGFFSSTRVAPAIPLNAWVPADHSVIRLSRAILEVFRDNGSRGNRQKTRLMWLIDEWGIERFRQVVSEAYGAPLAAAAPELMDWEKRDFLGVHPQKQAGLNFVGLHVPVGRLTTEDLYELARLADTYGQGEVRLTVEQNVILTHIPDAQLPTLLAEPLLTRFSPQPAPLSRGTVSCTGSQYCNFALIETKQRAIAIAQSLEAELDLPRPVRIHWTGCPNSCGQPQVADIGLMGAKVRKDGQMVEGVDIFLGGKVGYDAHLGEKAMTGVACEDLPDVLRQLLIERFGAQARSH

SEQ ID NO: 30261 - protein, 443 aa, Synechococcus elongatus PCC 6301
MSQFSRRKFLLTAGGTAAAALWLNACGSNNSSTDTTGSTSTPAPSGTSGGDAPEVKGVTLGFIALTDAAPVIIALEKGLFAKYGLPDTKVVKQTSWAVTRDNLELGSDRGGIDGAHILSPMPYLLTAGTITKSQKPLPMYILARLNTQGQGISLSNEFLAEKVQIKDPKLKAIADQKKASGKLLKAAVTFPGGTHDLWMRYWLAANGIDPNNDADLVVIPPPQMVANMQTGTMDTFCVGEPWNARLVNKKLGYTAAVTGELWKFHPEKALTIRADWADKNPKATMALLKAVQEAQIWCEDPANLDELCQITAQDKYFKTSVEDIKPRLQGDIDYGDGRSVKNSDLRMRFWSENASFPYKSHDLWFLTEDIRWGYLPASTDTKALIEKVNRSDLWREAAKAIGREQDIPASDSRGVETFFDGVTFDPENPQAYLDGLKFKAIKA

SEQ ID NO: 30262 - protein, 108 aa, Synechococcus elongatus PCC 6301
MMTPELQERLTSIINGDKIVVFMKGNKLMPQCGFSNNVVQILNILGVPFTTVDVLADYDIRQGIKEFSNWPTIPQVYVNGEFIGGSDILIELYQNGELQQMLEVALAS

SEQ ID NO: 30263 - protein, 597 aa, Synechococcus elongatus PCC 6301
MALIVQKYGGTSVGSVERITAVAQRIAQTVAAGNQVVVVVSAMGHSTDELLKLANGISANPSRRELDMLLATGEQVSIALLSMALHEQGCDAISMTGAQVGIITEAHHSRARILEIDPQRLQSQLDAGRVVVVAGFQGIASSDRTALTEITTLGRGGSDTSAVALAAALNADRCEIYTDVPGILTTDPRLVPEAHLLEEITCDEMLELASLGASVLHPRAVKIARNYGVRLVVRSSWTQEPGTGVVAPPRRSDRSLQGLEIGRPVDGLALDTDQAKVALLHVPDRPGIAASLFGEMAQRGVNVDLIIQSIHEGNSNDISFTVSQADLEKAEAGTTQLLADLGGEQQSEAAVAKVSISGVGIVGRPGIAAQMFSALAQGGINIQMISTSEVKVSCVIAAADQQRAIAALQESFELEEAIAATATDACTTDLPAVRGVALDRDQARLAILNVPDLPGMAATIFQILADRQISVDMIIQSQRGRIHNGQPCRDIACTLPPADAELAAAALQAFADQHGCSLEIQTEIAKVSIVGSGMVQQPGVAAQMFAALANHGINIHMIATSEIKVSCIVDASQAVEALQTVHAAFGLASDRRIEVPA

SEQ ID NO: 30264 - protein, 403 aa, Synechococcus elongatus PCC 6301
MLNASVAGGAATTTYGNRLFIYEVIGLRQAEGEPSDSSIRRSGSTFFKVPYSRMNQEMQRILRLGGKIVSIRPAEEAAANNGAAPLQAAAEEPAAAPTPAPAAKKHSAEDVPVNIYRPNKPFVGKVLSNEPLVQEGGIGVVQHLTFDISEGDLRYIEGQSIGIIPDGTDDKGKPHKLRLYSIASTRHGDHVDDKTVSLCVRQLQYQNEAGETINGVCSTFLCGLKPGDDVKITGPVGKEMLLPADTDANVIMMGTGTGIAPFRAYLWRMFKDNERAINSEYQFNGKAWLIFGIPTTANILYKEELEALQAQYPDNFRLTYAISREQKNEAGGRMYIQDRVAEHADEIWNLLKDEKTHVYICGLRGMEDGIDQAMTVAAAKEDVVWSDYQRTLKKAGRWHVETY

SEQ ID NO: 30265 - protein, 343 aa, Synechococcus elongatus PCC 6301
MQFIDHATICVKAGDGGDGIVAFRREKYVPAGGPSGGNGGRGGSVILVATEQLQTLLDFRYLRLFKAQDGERGGPKGMTGASADDLIIQVPCGTAVYDAETDECLGDLTSAGQTLQVAQGGKGGLGNQHFLSNSNRAPEHALPGLPGEERQLRLELKLLAEVGLIGLPNAGKSMLISVLSAAKPKIADYPFTTLVPNLGVVRRETGDGTVFADIPGLIEGAHRGAGLGHDFLRHIERTRLLIHLVDLTAEDPIADWRTIQAELKAYGRGLSDRPQILALNKIDAVLDEDLSFWQAEFQALTPVPLLCISSADRRGLDALLRLVWQWLDELDAAAELSETRVLN

SEQ ID NO: 30266 - protein, 630 aa, Synechococcus elongatus PCC 6301
MKWNWRTLALWTLPILVIGFFVWQGGIGANLQTNSTINAASTRMTYGRFLEYLDAGRVTAVDFYEGGRTAIVEAVDPDLDNRLQRLRVDLPGTSPDLITRLRDSDINFDVHPPRNDGAIWGLLSNLIFPILLIVGLFFLFRRSGNVPGGPGQAMQFGKSKARFQMDAKTGVLFDDVAGIEEAKEELQEVVTFLKNSERFTAVGARIPKGVLLVGPPGTGKTLLAKAIAGEAGVPFFSISGSEFVEMFVGVGASRVRDLFKKAKENAPCIVFIDEIDAVGRQRGAGIGGGNDEREQTLNQLLTEMDGFEGNTGIIIIAATNRPDVLDAALTRPGRFDRQIIVDAPDIKGRLEILKVHARNKKLAEDVSLDVIARRTPGFAGADLANLLNEAAILTARRRKDAITLTEIDDAVDRVVAGMEGTPLVDGKSKRLIAYHEVGHAIVGTLVKDHDPVQKVTLIPRGQAQGLTWFAPDEEQGLTSRAQILARIKGALGGRAAEDVIFGHDEVTTGAGNDLQQVTGMARQMVTRFGMSDLGPLSLEGQSQEVFLGRDLMTRSEYSERIAIRIDAQVHDIVDHCYQETLQLIRDNRIVIDRLVDLLIEKETIDGDEFRQIVAEYCQVPEKERFVPQLI

SEQ ID NO: 30267 - protein, 1536 aa, Synechococcus elongatus PCC 6301
MNQHSVHSSSHPTYQGPRWLVEERDACGVGFVADQQGRASHDLVEKSLRALGCMEHRGGCSADSDSGDGAGLMTAIPTDLLKTWLGAAAPADLSSVGLGMVFLPQHGAEATIARQLIEQIVAEENLQFLGWRLVPTRPEVLGQQARANLPRIEQCFIASEQLRDDEFERQLYLVRKRVETAVKKALGTASEDFYICSLSSRTVVYKGMVRSEVLGQLYTDLTNPAYTSNFGVYHRRFSTNTMPKWPLAQPMRFLGHNGEINTLLGNINWMMARQADLQHPAWGDRIGDLLPVVDLNRSDSANLDNALELLVNSGRTPQEALMVMVPEAYQNQPALADHPEIVDFYEFYSGLQEPWDGPALLVFSDGKKVGACLDRNGLRPARYSITADGYIVFASEAGVVDLPVETIIEKGRLGPGQMIEVDLETKEVIKNWDIKKRIASQQPYGQWLQERQVLENKDFGNEQQLGDFDLLRLQTGFGYTAEDVDMVIEAMASDGKEPTFCMGDDIPLAVLSSKARLLYDYFKQRFAQVTNPAIDPLRESLVMSLSMTLGARDNLLQVGPESARLLKLDSPVLNEAELEQVKQSTLKAAELSTLYAIEQGPDGLQAAIAALCQQAEQAVQAGHQILILSDRTGAGLAPQISYIPPLLAVGAVHHHLIRQGLRMKASLVVDTAQCWSTHHFACLIGYGASAVCPWLALETVRHWWHAPKTQSLMERGKIAQVSLAGAQQNFRKAVEAGLLKILSKMGISLLPSYHGAQIFEAIGLSMEVVDLAFRGTTSRLGGLTLADIAHEVMSFHTRAFPELNQKKLENFGFVQYRPGGEYHMNSPEMSKALHKAVVAGKNYDHFEVYRKYLEERPVTALRDLLQFVSDRPAISLDEVESVEAIVQRFCTGGMSLGALSREAHETLAIAMNRLGGKSNSGEGGEDPVRYKVLGDVDAEGNSPTLPHLHGLRNGDTASSAIKQIASGRFGVTPEYLMSADQLEIKVSQGAKPGEGGQLPGKKVSPYIAFLRNSKAGVLLISPPPHHDIYSIEDLAQLIFDLHQINPKAQVSVKLVAEIGIGTVAAGVAKANADIIQVSGHDGGTGASPLSSIKHAGGPWELGLTEVHRVLMENQLRQRVLLRVDGGLKTGWDVVMAALMGAEEFGFGSIAMIAEGCIMARVCHTNNCPVGVATQQEQLRKRFTGIPEHVVNFFILIAEEVRSILAKLGYRSLTELTGRTDLLAPRPDLKLTKTAALNLDCLIKLPDTRSDRSWLVHDEVHDNGPVLDDQLLANPALTAAIANQDSVAIEQAIVNTDRSVGARLAGAIAQRYGNYGFEGQISLNFNGSAGQSFGAFNISGVSLNLVGEANDYVGKGMNGGEIIVRPEAGVRFDPSQSSIVGNTCLYGATGGSLFANGRAGERFGVRNSKAQAVVEGTGDHCCEYMTGGTIVVLGPCGRNVGAGMTGGLAYFLDEDGQFPAKVNPEIVKLQRVSTSAGEQQLKQLITAHAEKTGSPKACHILEQWEQYLPQFWQVVPPSEADTPEVNPEVADKQLTAV

SEQ ID NO: 30268 - protein, 489 aa, Synechococcus elongatus PCC 6301
MAKPLFDQLLASAQQARAPFHTPGHKLGRAIATHLQQAWGSAIFQSDLPELPELDNLYAASGVLAESQAQAAEVFGADRSWFLVNGSTGGLLAAILTICSPGDRLLLPRNAHRSLLSGCILSGAMPVWITPPEAADFDLVGVPTPEQVATALAQDPQIKAVVLVSPTYEGVCADVAAIAAIAHNHNLPLIIDAAHGAHLGFHPDLPRSPLHEGADLVVQSTHKLLGALTQAAMLHCKGDRIDPERLSQSLALVQSSSPSYLLLASLEAATEQMRTSAQDLLQVTIDLARQAHQRLAELPGLQLPALKIGNREGFPQWDRTRLVINFQSCGWSGFCADEYLHEQWQVTAELPSLSNLVFHLSLGNRIEDIDRLVTACDRLLSQEHQEELPPRLPVWLEPETILSPRQAWFSRHQTVSAEQAIGAIAAECVWPYPPGIPVLVAGERISKSAVDYLRQVQTTGGILSGCADPELTTLRIVQDSDTIHASCLS

SEQ ID NO: 30269 - protein, 350 aa, Synechococcus elongatus PCC 6301
MTDQPCPRGIPRKFAEDESMDASLLLRQITTGYWGSQALYVAAKLGIADQLVNGPRSCEDLAIVVGAKPEVLYRLLRALASLGIFTEVSDRQFALTPAAELLRSGTAGSLRNLVMMFGEEHYVAWGELLHSIQTGENAFEHHYGAPVFAYYAQHPASADIFNGAMSDMSRPDTAAVLSSYDFQGIRCLVDVGGGHGQLLSQILAAYPDLTGILYDQPAVVAGADSVLADVSDRCEVVGGDFFASVPAGGDAYLLKHIIHDWDDADSLKILANCRQVMQPGDRLLLLEQVVRAGNEPNLAKWLDLNMLVMTQGGRERTQAEFATLLADAGFQLSQIHGTASEVCIIEGRAI

SEQ ID NO: 30270 - protein, 505 aa, Synechococcus elongatus PCC 6301
MLSKELFQMPRGVAPAFAGRKPKGWAWASTAVPDFQGGFKRLINRFQGSKLWLACVPLAATIAVFWGVAANAQGSADPVPSAQFLVNNLWLMVATVLVIFMNAGFAMVETGLCRQKNAVNVLAKNLIVFTLAATAYWFIGYSLMYGSPVVDGFLYFGKGGPLGFFFDPTVSAETIKNDGLISSLDFLFQAAFAGTAATIVSGSVAERIKFVDFIIFSLILTAVIYPIAGSWQWNVGSGWLNKAGFIDFAGSTVVHSVGGWAALIGAITLGPRMGKFQDGRPGALPGHNLAIATLGALILWIGWYGFNGGSVLAFNTAVPYVAVTTTLGGAAGGISATITSWSTSGKPDLSMVINGILAGLVGVTAGCDGFGMGGSFIVGLIAGVLVVFSVYTFENLKIDDPVGACSVHLVCGIWGTLAVGLFNLEKGLFYGGGFGQLGSQILGIISYGVWTVVASVIIWNILKALLGLRVSPEEELQGLDIGEHGMEAYSGFAKDASNALSSISE

SEQ ID NO: 30271 - protein, 359 aa, Synechococcus elongatus PCC 6301
MKAILLSGGPMPAIASRFLLVLLCFLPLAACRSLGGNETESNSRLNQVQARGKLLCGVEGRLPGFSFLDSQGNYSGLDVDICKAIAAALFNDPKAIEYRSLDSVERFPALASGEVDLLSRNTTWTLSRDAKGGNNLEFAPTTFYDGQGLMVRRNSGIQSLQDFQGKSICVETGTTSELNLADTMRELGVQYQEIKFPNSDANYAAYAQGRCEGVTSDRSQLAARRTTLSDADQHQLLDAVISKEPLSPATLNNDSPWFDVVKWVVNATIQAEEFGITQANIDQFKTSKNPEIRRFLGLEGELGQQLGLSNDFAYRAIKAVGNYGEIYERNVGQQSPLKLNRGLNQLYKNGGLLYSPPFR

SEQ ID NO: 30272 - protein, 311 aa, Synechococcus elongatus PCC 6301
MSDLFTTIPVAPEGFRSGFVALIGRPNVGKSTLMNHLVGQKIAITSPVAQTTRNRLRGVLTTDQVQIVFVDTPGIHKPQHQLGSVLVQNASSAIRIVDLVLFVVDGSVPAGRGDAFIADLIQRAGVPTVLGLNKVDRQLPEDAEAIAASYAQLAGDRDWPLQTFSATTGAGTGALLEQLTHALEPGPYYYPPDLITDQPERFIMAELIREQILLQTREEVPHSVAVVIERVEEDEKITRILAMICVERPSQKAILIGKGGSMMKAIGSEARQQMQKLIDGKIYLELFVKVQPKWRQSRSQLEELGYRPESE

SEQ ID NO: 30273 - protein, 612 aa, Synechococcus elongatus PCC 6301
MQLQTVTIQQRATGAYALIDSLCQHGVKHIFGYPGGAILPIYDELHRAEAAGRVQHILVRHEQGAVHAADAYSRATGEVGVCFATSGPGATNLVTGIATAQMDSIPMVVVTGQVPRTAIGTDAFQETDIYGITLPIVKHSYVVRDPRDMARIVAEAFHIAQSGRPGPVLIDVPKDVGTEEFDYVPVAPGDIRLPGYRPTTRGNPRQIAQAIALVRVARRPLLYVGGGAITAGAHAELRAFAERFQLPVTTTLMGKGAFDERHPLALGMLGMHGTAYANFAVSECDLLIAVGARFDDRVTGKLDEFASKAQVIHVDIDPAEVGKNRVPEVPIVGDVRQVLNELLARAEEQISADDATRTQPWLDRIAYWKREYPLQIPYYADVLSPQQVIHSLGEAAPDAYFTTDVGQHQMWAAQFIKNGPRRWISSAGLGTMGFGMPAAMGAQMALPDDTVICVAGDASILMNIQELGTLAQYNIPIKVVVVNNGWQGMVRQWQEAFYDERYSNSNMERGMPDFVKLAEAFGIKGMRVSHPDELQAAIAEMLAFDGPVFLDAIVKRDENCYPMVPSGHSNAQMLGLPKDPTLDLDLAIATCSSCGAKTLPSHKFCPDCGAKL

SEQ ID NO: 30274 - protein, 222 aa, Synechococcus elongatus PCC 6301
MLANENSLLTMFRELGSGKLPLQIEQFERGKTIFFPGDPAERVYLLVKGAVKLSRVYESGEEITVALLRENSVFGVLSLLTGQRSDRFYHAVAFTPVQLFSVPIEFMQKALIERPELANVMLQGLSSRILQTEMMIETLAHRDMGSRLVSFLLILCRDFGIPSPDGITIDLKLSHQAIAEAIGSTRVTVTRLLGDLRESKLIAIHKKRITVFNPVALSQQFS

SEQ ID NO: 30275 - protein, 400 aa, Synechococcus elongatus PCC 6301
MGRAKRVVLAYSGGVDTSVCIPYLKQEWGVEEVITLAADLGQGDELGPIRQKALDSGAVESLVIDATAEFVRDYAFPAIQANSLYEGRYPLSTALARPLIAKLLVEAAAKYGADAVAHGCTGKGNDQVRFDVSIAALNPDLKVLAPAREWGMSREETIAYGERFGIPAPVKKSSPYSIDRNLLGRSIEAGPLEDPLHEPLEEVYALTKAIANTPDEPAYIELGFDQGLPVTLNGQALAPVALIQQLNAIAGEHGIGRIDMIENRLVGIKSREIYETPALLVLIQAHQDLESLVLTADVSQYKRGIENSWSNLVYNGLWYSPLKAALDAFIQQTQQRVTGTVRLRLFKGNATVVGRSSEQSLYSPDMATYGAEDRFDHKAAEGFIYVWGMPTRIWSQTHRA

SEQ ID NO: 30276 - protein, 388 aa, Synechococcus elongatus PCC 6301
MSKDPIYLDYHATTPVDSRVVTAMQPFWGEQFGNPASRSHRYGLEAAAAVQVARETLATAIAAQPEELIFCSGATEANNLAIKGVAETQHRKGQHLITVATEHQAVLSPCRYLESLGFQLTVLPVNSQGLISVEQVAAALRPDTILVSVMAANNEIGVLQPIAAIGALCRDRGVVFHCDAAQALGRIPFNVSDLNVDLLSLSGHKVYGPKGIGLLYRRSGVAIAPQLHGGSQEQGLRAGTLAPALIVGFAQATELAIAEQPTETLRLQTLRDRLWQGLQAIGGLHLNGDPQQRLPSNLNFSIEGIDPSRLIQRIRGAIAVSSGSACSSGNAEPSHVLTAIGRSPDLAHASLRIGLGRFTIAEEIDRTLEILIAAIQAERSRLTRHKKG

SEQ ID NO: 30277 - protein, 392 aa, Synechococcus elongatus PCC 6301
MKLSERVGRVSPSLTLAIAAQAKAMKAEGLDVCSFSAGEPDFETPLHIRNAAAQALAEGKTRYGPAAGEPDLREAIAQKLRADNGLDYQAANILVTNGGKQSLYNLMQVLLDPGDEVIIPAPYWLSYPEMVKLAGGVPVIVETFASDGFKLQPQQLAGAITPRTRLLVLNSPSNPTGMVYSRQELEAIAPIIEAHDFWVVSDEIYEKILYDGADHHSIGSLSPACFERTLISNGFAKAYSMTGWRVGYLAGPSELIAAAASLQSHSTSNVCTFAQYGAIAALQGPQDCVAEMLAAFTERRQLILNGLNQIAGLSCPIPEGAFYVFVDISKTGLDSMTYCRQLLDQHQVAAIPGIAFGDDRSIRLSYATDCQTIEKGLERLQLFQNSLLGVSV

SEQ ID NO: 30278 - protein, 307 aa, Synechococcus elongatus PCC 6301
MGNVVATYGFLLVSMLLGATLGLSVYLPLMAGQLSLASPAFYALGGYLAAILSTKGLTASPEYSVGALLLEMGLAAIAAAVLAFLVGYPVLRLRGIYLAIATIALVEIVRVVALNLSITGGAVGIFGIPQPFSSAVGYLWIALPLLLIAVAACWRLQQVRTGLVLAAIREDELAASAIAVNTTRYKVLAFVLGAVLASLVGAVSAHFLNTWNPRQGTFDASITFLAFVLIGGSRSAFGPVLGGMVLTALPELLRAIGSVPGLWPGLSRLLQDGRLLIFGLLLVLGSIYFPQGLIKPRASQPRRRRTS

SEQ ID NO: 30279 - protein, 634 aa, Synechococcus elongatus PCC 6301
MAKVVGIDLGTTNSCVAVMEGGKPTVIANAEGFRTTPSVVAFAKNQDRLVGQIAKRQAVMNPENTFYSVKRFIGRRPDEVTNELTEVAYKVDTSGNAVKLDSSNAGKQFAPEEISAQVLRKLAEDASKYLGETVTQAVIPVPAYFNDSQRQATKDAGKIAGLEVLRIINEPTAAALAYGLDKKSNERILVFDLGGGTFDVSVLEVGDGVFEVLATSGDTHLGGDDFDKKIVDFLAGEFQKNEGIDLRKDKQALQRLTEAAEKAKIELSSATQTEINLPFITATQDGPKHLDLTLTRAKFEELASDLIDRCRIPVEQAIKDAKLALSEIDEIVLVGGSTRIPAVQAIVKQMTGKEPNQSVNPDEVVAIGAAIQGGVLAGEVKDILLLDVTPLSLGVETLGGVMTKLIPRNTTIPTKKSETFSTAADGQTNVEIHVLQGEREMASDNKSLGTFRLDGIPPAPRGVPQIEVIFVIDANGILNVTAKDKGSGKEQSISITGASTLSDNEVDRMVKDAEANAAADKERRERIDLKNQADTLVYQSEKQLSELGDKISADEKSKVEGFIQELKDALAAEDYDKIRSIIEQLQQALYAAGSSVYQQASAEASANAQAGPSSSSSSSSGDDDVIDAEFSESK

SEQ ID NO: 30280 - protein, 255 aa, Synechococcus elongatus PCC 6301
MRSLKAVEAPSLKEKILVVDDEAAVRRILTMRLSMAGYQVVVASDGHEALAMFEQEAPDLIVLDVMLPKLDGYGVCRELRKLSDVPIIMLSALGDIADRITGLDLGADDYLPKPFSPKELEARIATILRRLDDSPNALSAPSSPGVLRISDVEIDTNRRQVFQRGERVPLTYTEFSLLELLFRQPGRVVPRAEILEELWGYPPRRNADLRVVDVYVARLRSKLEADPRNPELIITVRGTGYTSQRLKDLPEAAGA

SEQ ID NO: 30281 - protein, 175 aa, Synechococcus elongatus PCC 6301
MEDVPTLLVQDDAGRTLLCDLEHLVPIDGQEYALLMPVDTPVSLFAWDGEDEDEPPRLVEDESEVEAVWPTASAVLQEQNLTLINSAVTLTVEGELPDLEDEDEESDFEEDEEVEEEFIHLVSFYHEEQEYSFFVPLEPIYVVARLVDGEAKLLTPEEFEAIEERLTAELDERMA

SEQ ID NO: 30282 - protein, 323 aa, Synechococcus elongatus PCC 6301
MAPLLFRQILDLEAEAIQRAAERADAEAFANATQLIANCSGKVVLSGVGKSGIIARKITATLLSIGTLSAFLHPCDALHGDLGIVTEQDVVVMLSNSGETDELLAMLPHLQRRQVPIIAIVGNMRSTLARVAAAVLDASVDREACPLNLAPTASTTVALAIGDALAAQVMDYRSVTSEQFAFNHPAGRLGKRLTLKVVDVMHQGEELPLLPPEARFVEVVTAISRGGLGAVPIVEADGRLLGLITDGDLRRLLEQTSPAKLDQITAAEFMTPQPIAVEGDLLAYDALHLMENRPSQISVLPVVDAAQRCLGLVRIHDLIRSGI

SEQ ID NO: 30283 - protein, 359 aa, Synechococcus elongatus PCC 6301
MLRGWGALSEAGSAIARVGQRPLVVGGDRARALVQDSLTAIASEQSLTLGWGSSLPDCSEAVLARLQQAATEHQADCILGVGGGKALDTAKLLGHQLSLPVITVPTSAATCAAWTALANVYTDAGAWLYDVGLDRCPELLILDFELIAQAPPRTLAAGIGDAIAKWYEASVSSGHRQETLVVAAVQQARVLRDLLFQKSAAAIAEPGGEQWYEVVEATVLLAGVIGGLGGAQCRTVAAHAVHNGLTHLPACHDWLHGEKVAFGILVQLRLEELQGTNPLAATARQQLLSFYADLGLPRQWSDMGLASVSLADLQQAAILACAPESDIHHLPFAVDPDQLLAAMVSTTTPIARSNSVVAE

SEQ ID NO: 30284 - protein, 331 aa, Synechococcus elongatus PCC 6301
MIRSATLPFASALPSLPDNHRLRLFSGSSNSALSQEVSRYLGIDLGPMIRKRFADGELYVQIQESIRGCDVYLMQPTCWPVNDHLMELLIMIDACRRASARQITAVLPYYGYARADRKTAGRESITAKLVANLITQAGANRVLAMDLHSAQIQGYFDIPFDHVYGSPVLIDYLRSKNLADLVVVSPDVGGVARARAFAKKLDDAPLAIIDKRRQAHNVAEVLNVIGDVQGKTAVLVDDMIDTAGTICEGARLLRKQGASQVYACATHAVFSPPAIERLSASGLFEEVIVTNTIPIPEENRFPQLTILSVANLLGETIWRIHEESSVSSTFR

SEQ ID NO: 30285 - protein, 591 aa, Synechococcus elongatus PCC 6301
MPHPLVRLYRYSAPHQRQVLSAIACSILNKIFDLAPPVLIGMAVDVVVQRQDSWLAKWGVVPVEQQLGLLVLFSFVIWSLESLFEYLYAWQWRTLAQTLQHELRLDAYGHLQELELSFFEERSTGQLLSVLNDDINQLERFLDHGANEILQVTTTVLAVGGAMAYLSPTVAGLAILPIPVILWGSLRFQRRLAPRYARVREQAGLISARLANNLGGIATIKSFTAEAFEKGRVAEDSDAYRQANRRAIALSSAFVPLIRFAILFAFIAILYVGGMETINGRLDVGTYSFLVFITQRLLWPLTSLGRVLDDYQRAMASTQRVMDLLAIPVQIPSGRQSLPIGQVQGAVQFEGITFAYRDREPSVIDLNLNIPAGQTIAIVGATGSGKSTLVKLLLRFYEPQTGRILLDGIDLRDLKLKDLRQAIGFVSLDVFLFHGSVAENIAYGSFDATQTEIEQAAKLAEAHEFIMDLPQGYDTVVGERGQKLSGGQRQRLAIARAILKDPPILILDEATSAVDNETEAAIQRSLEQITRDRTTLAIAHRLSTIRHADCIYVMDQGRLVEAGHHDELLALDGLYANLWKVQTGERLSDRV

SEQ ID NO: 30286 - protein, 340 aa, Synechococcus elongatus PCC 6301
MLDSSDRRAWLEIALETLPDRSAIAAVVHRVVHGGQQQAPAVVTPELKATIAAAANLAPLHNPLNLAGIEQMEQLFGLAMPQIAVFDTAFHQQMPVAAAIYGGPYHWWEQGYRRYGFHGISHQYLAERCAQLSDRSLSNLQLVTAHLGNGCSLAAIRNGHSVDTSMGFSPLEGLVMGSRSGTVDPGLLLHLLQQPDCSPSQLSTVLNQQSGLLGLSGRSNDVRALAIAADAGDQRSQLALAAFTHSLRRHLGAMLASLTRLDALVFAGGIGENYRSLWPAVCEHFAGMPIRLDPEAMAVAGDRRISTPDSAITVWVIHSREDWQMVQLALPLLRSPQSFN

SEQ ID NO: 30287 - protein, 386 aa, Synechococcus elongatus PCC 6301
MSTYLDYSATTSMRPEVLERFTAVAQEQWGNAASLHQWGNRAALVLERSRQQVAALIQAEPEAIAFSSGGTESDNWAILSPYLADPRPGHLIISAVEHSAIARPAAWLEQRGWQVTRLPVDRSGRIQPADLASAVRPDTRLISVIWGQSEVGTIQPIAELAAIAREHGILFHTDAVQVAGRLPIDVQRLPIDLLSLSSHKLYGPQGVGALYIRPGVELAPLLQGGNQESGLRSGTPPIAAIAAFGEAAQLAAAELPHETARLQSLRDRLIAVLATEPRLRLTGDPIQRLPHHASFIARGGTTGTSQQLVRAMNRLGFGISGGSACNSGRSQPSPVLLAMGYSPQEALAGIRFSLGRSTQLAEVEAAAIALRSALHSLPQASLLSPA

SEQ ID NO: 30288 - protein, 359 aa, Synechococcus elongatus PCC 6301
MIGYIILLVCTIALFALFYVGLNLHWGYTGLLNFGHVAFLLIGAYSVSLLAQQGWPLWLAAIAGVTLAALLGLVMGVASLRLSQDYLGIVTVGLAEVLRIFVQNETGLTQGSFGVQAYPIILQGWEPPIWQTHLLVVGLLAIAAWGYWQLWQWWRSSASRGKHWLAIVALGSSLIVLPPAALGLADYERYPRSGQMLLLLGALWLTVAAVDRLVRSPWGRVLKAIREDETVAIALGKNVLSYKLQSLALGGAIAGLAGVFYAWQLTAIYPDNFRPQLTFDVWTMLVLGGTAHRFGPVLGAAVFWLYDSLTRFLLPAILPLDGSQIGALRIALVGLLLMALMIWRPQGILGRREELSLGR

SEQ ID NO: 30289 - protein, 296 aa, Synechococcus elongatus PCC 6301
MVGEQETRMRCGLIGTGLLGTAIAERLLTVGQLLTVWNRTAERSQPLVALGATIAPTPAALLADCEVCLLLLSDAEAIAATLLTEESRSQLVGKTIIQMGTISPAESRAIADQIAAAGGQYLEAPVLGSLPEARNGTLIVMVGAEPAVFEQWRSLLCHLSPEPEWIGPIGTAATLKLALNQLIGSLTSAFGGSLALLQRSGLAVEPFMAILRQSALYAPTFDKKLSRLLSHQYDNPNFPTTHLAKDLRLFRETAADLGITTDAVEGVESIVQKAIAQGWGDQDYSALYEAINPDSN

SEQ ID NO: 30290 - protein, 487 aa, Synechococcus elongatus PCC 6301
MSWLTQANACPGVFYGTRAQDGFLLRIRIPAGTLHLNQLKVIANLLTTLQCDQVQVTNRANLQIRGVQRAIDSSELNQLQAVGLAATHPQTDHLRNLMASPTAGIDPEELLDTRPYIQQIDQFLQQHPEYGELSAKFSIGLDGGGSVGIGTRSPVAWEHRLNDVQLTAIQTNQQEIPFLLQLAVKKQLIDTGYIITPDQLLPTIATLTAIYYEYSNQEVKAGRQGKPRLHSLIESWGLEQFLQVIQERSRQSLETTQQSLPVSQPYRQFGFYPQSNPDLFYLGIRSFLGQITGLQLTALIQILEALNCQEIRLTPWQSLIVPNLNKSEVIEAQQRFQELGFATTAKEPVIIACAGHPVCQAAIVPTQPLAERLQQAIDQVCQALDPINIHISACSKFCAQSSPAEITILAADSPEEQKPNERYNIFFGDSDRFDRISGPSLSFHQVISFITEVLKRYQKHRQSTSESLVQFLLRSQFDLNTIVPVLL

SEQ ID NO: 30291 - protein, 212 aa, Synechococcus elongatus PCC 6301
MQPKRALLNDINPHLINFYQQVKAGLEITIPLENDSDLYYQYRQAFNQTELPSALSAQYFYYLNRTGFNGLCRFNSKGEFNVPFGRYKTIHYRYDFSDYSQLFQDYQFYLGDFDQLVVGKQDLIYADPPYDVEFRQYAKEGFTWDDQVRLAQWLASATGPVITSNQATPRVLELYQALGFQVMTCLAPRRIACNGDRSPALEMIAMKGMSQA

SEQ ID NO: 30292 - protein, 363 aa, Synechococcus elongatus PCC 6301
MDIGVPRELKDQEFRVGLSPASVRALALQGHQIWIEQGAGVGSGFQDEDYLLAGAKVVATATEAWQHPLVVKVKEPLPAEYDYLRPDLLLFTYLHLAADRPLTERLLASGTTAIAYETVTARNGSLPLLMPMSRIAGRLSVQFGARFLERQQGGRGVLLGGVPGVSPGTVMILGGGIVGTEAAKMAIGLGAKVQIVDINVERLAELEALFGSRVELLYSSPAEIEARVPQADLLIGAVLVPGRRAPILVNRDLIAQMRPGSVVVDVAVDQGGCVETLRPTSHSQPIYLEAGVVHYGVPNMPGAVPWTATQALNNSTLPYVQAIAAQGLASCDRDPGLAEGLNVAQGVLTHPAIAAALPDLPCR

SEQ ID NO: 30293 - protein, 261 aa, Synechococcus elongatus PCC 6301
MIIENSDVILSIQDLTAEVEDAAILKGVNLEVRAGEIHAIMGRNGSGKSTLSKVLAGHPAYRVTGGSITYKGQDLLALEPEERSQAGVFLAFQYPLEIPGVSNLDFLRVAVNARRKAAGQEELDAFDFQELVEARLDVVKMNPDFLGRGVNEGFSGGEKKRNEILQMALLEPSLAILDETDSGLDIDALRIVSDGVNQLTNADNATILITHYQRLLDYIKPDFVHVMAEGRIIRTGGPELALELEETGYEWVDQALAGAAV

SEQ ID NO: 30294 - protein, 398 aa, Synechococcus elongatus PCC 6301
MEVSTGYLPQAVFAPADQGHPAPRVFISPQRYIQGRGVLRSVGRYLSLLQAKRAGLLMSQRSSRNEGDLLLAGLRSAGVDAVVSTFQGECTTDEITAHTTAFSKERIDCVIAAGGGKCIDTGKAIAFRLGIPVVVVPTLASNDAPCSALSVLYSPEGISQGVEFYPNSPAIVVVDTDIIAAAPERYLVAGMGDAMATWYEASVCLRNPAAVTTVGARPTLAACAIGEVCAHTLFQEGCAAAAAVASKTVNDALESVVEANTLLSGLGFESGGLAGAHAVAQSYTAIPHVRANYLHGEMVAMGTLAQLMMESRPKEATRVAEFFAAVGLPIHLGQLSLSSSDTQALEIVSEASLGFPFVGNMPMKITPEFVKSAILDAHHLGLSIPEQIGDSAYRHLQG

SEQ ID NO: 30295 - protein, 546 aa, Synechococcus elongatus PCC 6301
MIGRICGSSIPVARWLTMPKVLVSDPIDQVGLDILSQVAQVDVKTGLSPSELAQIIGEYDALMLRSGTRVTAEVIEAGQKLRIIGRAGVGVDNVDVPAATRRGIVVVNSPEGNTIAAAEHTLAMMLSLSRHIPDANASTKSGGWDRKSFVGTEVYKKTLGVVGLGKIGSHVATVAKAMGMKLLAYDPFISAERAEQIGARLVELDILFQEADYITLHIPKTPETANLINAETLAKMKPTTRIINCARGGVINEQALADAIAAGKIGGAALDVYDQEPLQADSPLRALGKNLILTPHLGASTTEAQVNVAVDVAEQIRDVLLGLPARSAVNIPGLYPDILEKLRPYLQLAETLGNLLSQVAGGRLEQLTVRLQGELAAQQSQPIVVAALKGLLTQALRERVNYVNAMIEAKERGIRIIETRDESVRDDYAGGSLQLVATGSNGEHRVMGALLGDGEIRITNVDEFPVNVPPSRYMLFTRHRDMPGIIGKIGSLLGSFNVNIASMQVGRRIVRGDAVMVLSLDDPLPEGILAEITKVAGISDAYTVVL

SEQ ID NO: 30296 - protein, 348 aa, Campylobacter jejuni
MLQVTHENFLDLKYFASGVFYPLEGFMNYEEYKKVIYEMQLLNGEIWTLPITLEVDDFKDIYVGQKQDLYHQDKFIGNIQIEDKFCVQDQDLYEIFQTKDEKHPGIIKEKKRSSLRVGGKIELKEEFYKDSLYKNILKDVFNADIKTIVGFQTRNPIHRAHEHLQRIALEICDALFINPLTGWKKQGDFTEAAVMSAYKTMFDEFYPKDRVYIQGLQTAMRYAGPKEAIFHALLRRNMGCTHFIIGRDHAGVGDYYGIYEAQKLAKDLSMRYDLGIDFLLLKEPYYCSKCQKIVSEKNCAHYKEHRIAISGTQIRKDLSEGKIPSELMMRSEISASILALGRENIFID

SEQ ID NO: 30297 - protein, 172 aa, Campylobacter jejuni
ACPLQLAPMSSTTATLVMGDALAAALMKARNFKPDDFALFHPGGSLGRKLLTKVKDLMVSSNLPIVHPDTEFNDLVDVMTSGKLGLCVVLENKKLVGIITDGDLRRALKASDKPRFDFKAKEIMSTNPKVVDADAMASEAEEIMLKYKIKEIIVGKEEKVVGIIQLYVIGNV

SEQ ID NO: 30298 - protein, 565 aa, Oryza sativa Japonica Group
MAPAVHDFASGFGATTQDNGDDDTVPWIHYPIIDDEDAAAPAALAAADYGSDFFSELQAAAAAAAAAAPPTDLASLPASNHNGATNNRNAPVATTTTREPSKESHGGLSVPTTRAEPQPQPQLAAAKLPRSSGSGGGEGVMNFSLFSRPAVLARATLESAQRTQGTDNKASNVTASNRVESTVVQTASGPRSAPAFADQRAAAWPPQPKEMPFASTAAAPMAPAVNLHHEMGRDRAGRTMPVHKTEARKAPEATVATSSVCSGNGAGSDELWRQQKRKCQAQAECSASQDDDLDDEPGVLRKSGTRSTKRSRTAEVHNLSERRRRDRINEKMRALQELIPNCNKIDKASMLDEAIEYLKTLQLQVQMMSMGTGLCIPPMLLPTAMQHLQIPPMAHFPHLGMGLGYGMGVFDMSNTGALQMPPMPGAHFPCPMIPGASPQGLGIPGTSTMPMFGVPGQTIPSSASSVPPFASLAGLPVRPSGVPQVSGAMANMVQDQQQGIANQQQQCLNKEAIQGANPGDSQMQIIMQGDNENFRIPSSAQTKSSQFSDGTGKGTNARERDGAET

SEQ ID NO: 30299 - protein, 316 aa, Oryza sativa Japonica Group
MDSLGVLLVAPMNAYLEQELDRRCRLFRLWESPADRRDDYLRAHASSIRAVVPYALQGVDAAMIDALPSLEIVSSFSVGIDRVDLDACLRRGVRVTNTPDVLTDDVADLAVGLAIAALRKIPQADRYVRAGKWKSKGDFTLTTRFSGKRVGILGLGRIGLAVAKRAEAFDCPISYHSRSEKPFPKYKFYPNVVDLAANCDVLVVACSLNPETRHIVNRKVIDALGPEGVLINIARGAHVDEPELISALLEKRLGGAGLDVFEDEPFAPEQLFELDNVVLVPHVGSDTEETCWAMADLVLQNLEAHALNQPLLTPVI

SEQ ID NO: 30300 - protein, 310 aa, Chlamydomonas reinhardtii
PDIILSNATIKQLIGTKCDGVIGQLTEDWGAELFEALKQAGGKAYSNYAVGYNNVKVDEATKRGIPVGNTPGVLTETTAELAAALTLAAARRVPEADVFMRAGKYKGWLPNLFVGQLLQNKTVGIIGAGRIGAAYARMMVEGHKMNLVYFDPYPNKQLEEYIRLYGELLRHRGEPPVACKRVETVEEVLKEADVVSLHCNLDASTRHLINSQRLALMKPTAVLVNAARGPCIDEAALVAHLKANPEFRCGLDVFEDEPAMKPGLADCANAVIVPHIASASLWTRSGMAPLAPANVAGILSGYPVWNKQDI

SEQ ID NO: 30301 - protein, 173 aa, Campylobacter jejuni
EACPLQLAPMSSTTATLVMGDALAAALMKVRNFKPDDFALFHPGGSLGRKLLTKVKDLMVSSNLPIVHPDTEFNDLVDVMTSGRLGLCVVLENEKLVGIITDGDLRRALKTSDKPRFDFRAKEIMSTNPKVVDADAMASEAEEIMLKHKIKEIIVGKEERVMGIIQLYAIGRV

SEQ ID NO: 30302 - protein, 648 aa, Burkholderia multivorans
MGKIIGIDLGTTNSCVAVMEGNQVKVIENSEGARTTPSIIAYMDDNEVLVGAPAKRQSVTNPKNTLFAVKRLIGRRFEEKEVQKDIGLMPYSIIKADNGDAWVEAHGQKLAPPQVSAEVLRKMKKTAEDYLGEPVTEAVITVPAYFNDSQRQATKDAGRIAGLEVKRIINEPTAAALAFGLDKAEKGDRKIAVYDLGGGTFDVSIIEIADVDGEKQFEVLSTNGDTFLGGEDFDQRIIDYIIGEFKKEQGVDLSKDVLALQRLKEAAEKAKIELSSSQQTEINLPYITADASGPKHLNLKITRAKLEALVEDLVERTIEPCRIAIKDAGVKVSDIDDVILVGGQTRMPKVQEKVKEFFGKEPRRDVNPDEAVAVGAAIQGQVLSGDRKDVLLLDVTPLSLGIETLGGVMTKMISKNTTIPTKHSQVYSTADDNQSAVTIKVYQGEREMAAGNKLLGEFNLEGIPPAPRGVPQIEVTFDIDANGILHVGAKDKATGKENKITIKANSGLSEAEIDQMIKDAEANAAEDHKLRELADSRNQGDALVHSTKKALSEYGDKLDAGEKEKIEAALKSLEDVLKDTSADKAAIDAKVEELGKASQKLVEKMYADMQAQAGAAGAAGAAEGAAQGGAQQAADDVVDAEFKEVKKD

SEQ ID NO: 30303 - protein, 313 aa, Streptococcus pyogenes M49 591
  misc_feature (301)..(301): Xaa can be any naturally occurring amino acid
  unsure (1)..(313): unsure at all Xaa locations
MSMFLDTAKISVQAGRGGDGMVAFRREKYVPNGGPWGGDGGKGGSVIFRVDEGLRTLMDFRYNRKFKAKSGEKGMTKGMHGRGAEDLIVFVPQGTTVRDAETGKVITDLVEHGQEVVIAKGGRGGRGNIRFATPRNPAPEIAENGEPGEERQLELELKILADVGLVGFPSVGKSTLLSVVSSAKPKIGAYHFTTIVPNLGMVRTKSGDSFAMADLPGLIEGASQGVGLGTQFLRHIERTRVILHVIDMSASEGRDPYEDYVSINNELETYNLRLMERPQIIVANKMDMPEASENLKALQKXWLPKYDELMTYQ

SEQ ID NO: 30304 - protein, 240 aa, Streptococcus pyogenes M49 591
TKTFLAKSILCFIGGAMISLGYLLYLRIAASGLETFGAFSSIVGACAFPIGLIIILMAGGELITGNMMAVSAALLAKKIKFSELAKNWLIITLFNVIGAVFVAFVFGHFLGLTSAGIFKEEVIEVAHAKIAASPLQALVSGIGCNWFVGLALWLCYGANDAAGKFLGTWFPVMTFVALGFQHSVANAFVIPAAIFEGGATWLDFATNFIFVYSGNIIGGAIFVSFLYFKVYYHPQKSKTQ

SEQ ID NO: 30305 - protein, 331 aa, Streptococcus pyogenes M49 591
MSIRSLFGGLREKILGKNMKIVFPEGNDERVVRAAARLKFEGLLEPIILGQSEEVRNLLTKLGFADQDYTIINPNEYADFDKMKEAFVDIRKGKATLEDADKMLRDVNYFGVMLVKMGLADGMVSGAIHSTADTVRPALQIIKTKPGISRTSGVFLMNRENTSERYVFADCAINIDPTAQELAEIAVNTAETAKIFDIDPKIAMLSFSTKGSGKAPQVDKVREATEIAKGLNPDLALDGELQFDAAFVPETAAIKAPDSAVAGQANTFVFPDLQSGNIGYKIAQRLGMFDAIGPILQGLNKPVNDLSRGSSAEDIYKLAIITAAQAIESQG

SEQ ID NO: 30306 - protein, 69 aa, Streptococcus pyogenes M49 591
MYMAQGTVKWFNAEKGFGFISTENGQDVFAHFSAIQANGSKTLEEGQKVALSVEEGQRGPQAVNITKLA

SEQ ID NO: 30307 - protein, 299 aa, Streptococcus pyogenes M49 591
DSFLDLNDSSLTPFEGTHFALIGFKSDKGVYINNGRVGAVESPAAIRTQLAKFPWHLGNQVMVYDVGNIDGPNRSLEQLQNSLSKAIKRMCDLNLKPIVLGGGHETAYGHYLGLRQSLSPSDDLAVINMDAHFDLRPYDQTGPNSGTGFRQMFDDAVADKRLFKYFVLGIQEHNNNLFLFDFVAKSKGIQFLTGQDIYQMGHQKVCRAIDRFLEGQERVYLTIDMDCFSVGAAPGVSAIQSLGVDPNLAVLVLQHIAASGKLVGFDVVEVSPPHDIDNHTANLAATFIFYLVQIMAQHS

SEQ ID NO: 30308 - protein, 395 aa, Streptococcus pyogenes M49 591
MKNIVIVEALRTPIGAFGGSFKSVSAVELGTTVLKKILDKTQVKPEMVDEVILGNVLHAGLGQNVARQVAVHSGIPEDKTAFTLDMVCGSGLKAIQLAAQSIMLSDADIVIAGGVENMSQAAYVSTQHRFGQRLGNSQLIDTLVHDGLTDAFNNYHMGITAENVAQKYGISREEQDQFALESQEKAARALENHRFADEIVPVSVPQRRKDPLIVTTDEYPKVDTSLEKLQQLRPAFLPKEGTVTAGNASGINDGAALLMLMTEEKALELGLTPLVTIESYASAGVAPELMGTGPIPATQKALKKAGLTISDLDLVESNEAFAAQSLAVLKDLKLNPEIVNVNGGAIALGHPIGASGARILVTLIHEMKKRQVTRGLATLCIGGGQGTAVIVKNNT

SEQ ID NO: 30309 - protein, 397 aa, Streptococcus pyogenes M49 591
MPKLSKRVLEMKESVTLAAGARAKALKAQGRDVLNLTLGEPDFFTPKHIQDKAIESIQNGTASFYTNASGLTELKAAIATYLKNQYGYHLSPDQIVAGTGAKFILYAFFMAVLNPGDQVLIPTPYWVSYSDQVKMAEGQPIFVQGLEENQFKVTVDQLERARTSKTKVVLINSPSNPTGMIYGAEELRAIGEWAVHNDILILADDIYGSLVYNGNQFVPISTLSEAIRRQTITVNGVAKSYAMTGWRVGFAAGEPEIISAMSKIIGQTTSNLTTVSQYAAIEAFCGSQSSLEEMRLAFEERLNITYPLLCQVPGFEVVKPQGAFYFFPNVKKAMEMTGFSDVTSFANAILEEVGLAVVSGAGFGAPENVRLSYATDIETLKEAVRRLHVFMESNEIN

SEQ ID NO: 30310 - protein, 302 aa, Streptococcus pyogenes M49 591
MAKAAGIPLGKMSSRQFSDGEIMINIEETVRGDDIYIIQSTSFPVNDNLWELLIMIDACKRASANTVNIVLPYFGYSRQDRVAKPREPITAKLVANMLTKAGIDRVVTLDLHAVQVQGFFDIPVDNLFTVPLFAERYSKLGLSGSDVVVVSPKNSGIKRARSLAEYLDSPIAIIDYAQDDSEREQGYIIGDVSGKKAILIDDILNTGKTFAEAAKILERSGATDTYAVASHGLFAGGAAEVLETAPIKEIIVTDSVKTKNRVPENVTYLSASDLIAEAIIRIHERRPLSPLFSYQPKGKNNA

SEQ ID NO: 30311 - protein, 214 aa, Streptococcus pyogenes M49 591
ELRNGRDVYVVGVTNVGKSTLINAIIQEITGNKDVITTSRFPGTTLDKIEIPLDDGTFIFDTPGIIHRHQMAHYLSPKELKIVSPKKEIKPKTYQLNPEQTLFLGGLSRFDFINGERQGFTAFFDNQLELHRTKLAGADAFYDKHVGTLLTPPDKKELTAFPKLVRHEFTIDQKMDIVFSGLGWIRVNGQKDSKAIVAAWAPEGVAVIVRKAII

SEQ ID NO: 30312 - protein, 299 aa, Streptococcus pyogenes M49 591
MAKIVECIPNFSEGQNQAVIDGLVATAKSIPEVTLLDYSSDASHNRSVFTLVGDDQSIQEAAFQLVKYASENIDMTKHHGEHPRMGATDVCPFVPIKDITTQECVEISKQVAERINRELDIPIFLYEDSATRPERQNLAKIRKGQFEGMPEKLLEEDWAPDYGDRKIHPTAGVTAVGARMPLVAFNVNLDTDNIDIAHKIAKIIRGSGGGYKYCKAIGVMLEDRHIAQVSMNMVNFEKCSLYRTFETIKFEARRYGVNVIGSEVIGLAPAKALIDVAEYYLQVEDFDYPKQVLENHLLG

SEQ ID NO: 30313 - protein, 398 aa, Streptococcus pyogenes M49 591
MSKTIAINAGSSSLKWQLYQMPEEEVLAQGIIERIGLKDSISTVKYDGKKEEQILDIHDHTEAVKILLNDLIHFGIIAAYGEITGVGHRVVAGGELFKESVVVNDKVLEQIEELSVLAPLHNPGAAAGIRAFRDILPDITSVCVFDTSFHTSMAKHTYLYPIPQKYYTDYKVRKYGAHGTSHKYVAQEAAKMLGRPLEELKLITAHIGNGVSITANYHGKSVDTSMGFTPLAGPMMGTRSGDIDPAIIPYLIEQDPELKDAADVVNMLNKKSGLSGVSGISSDMRDIEAGLQEDNPDAVLAYNIFIDRIKKCIGQYFAVLNGADALVFTAGMGENAPLMRQDVIGGLSWFGMDIDPEKNVFGYRGDISTPESKVKVLVISTDEELCIARDVERLKNTK

SEQ ID NO: 30314 - protein, 394 aa, Streptococcus pyogenes M49 591
MTKEVVITSAYRTPIGNFGGVFKSLSAVDLGVTVVTKILADTGLKSDAIDEVIFGNVLHAGLGQNVARQVALNAGLSYDTPAFTIDMVCGSGLKAVELGAQKIQTGNTDIVLVGGTENMSQAPYVLQGQRWGSRMGDSKVVDTMLKDGLSDAFAGYHMGITAENIVQQYGLTREEQDAFAADSQRKAQLAIEKGRFKEEIAPVTIPQHKGEPLLVDQDEYPKFGTTVDKLAKLRPAFIKDEGTVTAGNASGINDGAAAILLMSKEKAEELGLPILAKITSYASAGVDPSIMGCGPIPATKKALAKAQLTIDDIDLIEANEAFAAQALAVSRDLGFDNEKVNVNGGAIALGHPIGASGARILVTLLAEMAKRDVRHGLATLCIGGGQGQSIIVTR

SEQ ID NO: 30315 - protein, 320 aa, Streptococcus pyogenes M49 591
MSYSDLKLFALSSNKELAEKVASAMGLQLGKSTVRQFSDGEIQVNIEESIRGHHVFILQSTSSPVNDNLMEILIMVDALKRASAEKISVVMPYYGYARQDRKARSREPITSKLVANMLEVAGVDRLLTVDLHAAQIQGFFDIPVDHLMGAPLIADYFDRHGLVGEDVVVVSPDHGGVTRARKLAQFLQTPIAIIDKRRSVDKMNTSEVMNIIGNVSGKKCILIDDMIDTAGTICHAADALAEAGATAVYASCTHPVLSGPALDNIQRSAIEKLIVLDTIYLPKERLIDKIEQISIADLVAEAIIRIHEKRPLSPLFEMGN

SEQ ID NO: 30316 - protein, 200 aa, Nicotiana tabacum
MAFAGTTQKCMACDKTVYLVDKLTADNRIYHKACFRCHHCKGTVKLGNYNSFEGVLYCRPHFDQLFKQTGSLDKSFEGTPKIVKPQKPIDSEKPQVAKVTSMFGGTREKCFGCKKTVYPTEKVSANGTPYHKSCFQCSHGGCVISPSNYTAHEGRLYCKHHHIQLIKEKGNLSKLEGDHEMNSTTTTEVTAESYTADQVD

SEQ ID NO: 30317 - protein, 428 aa, Lemna paucicostata
MSFRSILSDVRDSIGSFSRRRGAEVRISGVSDNHRGRNRVTAGDFPGEIGGEIPAIYQSRWAGLPPELLRDVIKRLEESESSWPARKHVVACAAVCTAWREMCKEIVSGPEFCGKLTFPVSLKQPGPREGTIQCFIKRDKSKSRYHLFLGLSPTLPAENGKFLLSQSASRALPARNTSSPWNADDISRSSSTYIGKLRSNFLGTKFIMFDTQPPTRHCRPAPSSGRVSRRFYSKVSPKVPSGNYAIAQVTYELNVLGKRGPRRMHCTMNSIPSSALDAGGRVPAAPERILSRSLEDSFRSVSLSKDLGSSRFSEFGGEMEREEEEEGDRKKSGPLVLKNKAPRWHEQLQCWCLNFRGRVTVASVKNFQLIADGQATAAQAGASEHDKIILQFGKVGKDTFTMDNRYPLSAFQAFAICLSSFDTKLACE

SEQ ID NO: 30318 - protein, 478 aa, Bacillus clausii KSM-K16
MKARTPIIAALQRHSAKQPLSFHVPGHKNGAVWPESLAPFQHVLAYDVTELEGLDDLHDPTGPIAESQALCAAFYGAGETSYLVGGSTSGNLAMIYGLCKEGDVVFVQRNCHKSVLHALELARAKAVFLAPEYDKKTGRPLGLTANVFEEALRRYPGAKALVATYPDYWGTVRNQAAIFAQAKEAGLLVLVDEAHGAHFKLGEGEGRCPKQALDMGADVVVQSAHKMLPALTMGAWLHFAKETTAAIREPVKRALTMVQSSSPSYLLLASLDGARAYIESEGEAAFAKACRASQRLQEAIGSHPMLEVVENAGECYQNDPLKVTIKANDSRSGTWLLQELAKAGIWAEMADPNAILLVLGVGQDFDASLFHSRLSTRCWQPEKQRKKGLFQAGAGPLISELIDMKRPNFSSETVPLSEAVGRVAAEPLVPYPPGVPLLYRGEQVAPAHVKQIEQLLEASVRFQGLDPKHGLRVQMPED

SEQ ID NO: 30319 - protein, 316 aa, Bacillus clausii KSM-K16
MANYSDPSLKVFTLNSNKGLAEEIARHIGVSLGKNSVMRFSDGEVQINIEESIRGCDVYLIQSTSAPANEHLMELLIMIDAVKRASARTINVVIPYYGYARQDRKARAREPITAKLVANLLETAGATRVLTIDLHATQIQGFFDIPVDQLMGVPLLSDYFESKKLDDIVVVSPDHGGVVRARKMADRLKAPIAIIDKRRPKPNVSEVMNIVGNIEGKTAIIIDDIIDTAGTITLAANALVEQGATEVYACCTHPVLSGPAIERISNSKIKELVVTNTIALTEKQRGENITQLSVAGLMAEAIIRVHEDASVSTLFD

SEQ ID NO: 30320 - protein, 321 aa, Bacillus clausii KSM-K16
MSKPTVFLARSLPDAALNHISQFCHLRIWDESKPLTREALAHELADVDGAMLTGIGADTELVKHASKLKVISTATVGYDGFDVAGLAEQNIYVTNTPYVLDETVADLLFGLILSGARRIAPLHEQVKAGNWTKQTTAQSLYGQDVYNQTLGIVGMGRIGEKIVHRAKEGFGMKILYHNRSSRPEVEKKYGAKKVELHELLEQADVVVIMVPLTEATKHLIGKEELSKMKETAILVNGARGAVIDEAALIEALKQKTIFGAALDVFEVEPLPPGHPLLELDNVTLTPHIGSATAATREAMALRAAENLVAGALGQKPRDALS

SEQ ID NO: 30321 - protein, 662 aa, Bacillus clausii KSM-K16
MNRTVRTIVILTILMLIIIAGVQSFSNDPTETQQVRYDEFLEKLEQGEVENITVQPERSVLVVTGQFAGQKDGENFTTTILNSDITADLLSNIEGVELTVEPEEEQSNWLSTIIMIAPFLLIFLIIIFLMSSAQGGGGGGGNRVMNFGKSKAKMVSDEKKKAKFKDVAGADEEKQELVEVVEFLKDPRKFAAIGARIPKGVLLVGPPGTGKTLLARAVAGEAGVPFFSISGSDFVEMFVGVGASRVRDLFENAKKNSPCIIFIDEIDAVGRQRGAGLGGGHDEREQTLNQLLVEMDGFSANEGIIIIAATNRADILDPALLRPGRFDRQIQVNAPDVKGREEVLKVHARNKPLREEVKLDLIAIRTPGFSGADLENLLNEAALVAARNDKKEIGMEHIEEAIDRVIAGPAKKSRVISEKEKNIVAWHEAGHTVVGVKLESADMVHKVTIVPRGMAGGYAMMLPKEDRYFMTKPELLDKIVGLLGGRVAEEIQFGEVSTGAHNDFQRATSIARKMVTEYGMSDKLGPMQFGQSSGGQVFLGRDIQNDQNYSDAIAHEIDLEVQRIIKDSYERCKQILLANKDSLDLIAKNLLELETLDAEQIQSLINEGKLPENHHASKKNGDMKVNIQSKDSAEEVEGAYEETTNVGENRPPSSEETKENRD

SEQ ID NO: 30322 - protein, 316 aa, Bacillus clausii KSM-K16
MKVICTSPSFAKHSNEPIIRLQQEGIELVRVPPDISQSAFVLEARGAQAAIVAFNEIHDAVLAQLPDLKIIAKHGVGVDNIDVDAAKKHGVTVTNVPNANKHAVADFAFSLLLSLARQIPTGNEKTKKGKWPSLFGADVYQQTLGIIGLGAIGKEVARRASGFSMTVLAYDPYIDRTYARKNGIEAVSLDALLQQSDFVTIHIPLLPETRHLIGERELQLMKKSAYLVNASRGGIVDETALYEALQTQQLAGAALDVFEEEPLHMSPLFSLDSFIAMPHVAGYTPGAINTLSHTCVDQIIAVLKGKGDLIHVVSGP

SEQ ID NO: 30323 - protein, 634 aa, Bacillus clausii KSM-K16
MRMPQNSDTTSKKSPFVLYASATGMTLFVLWGIVNPSHLGATAETALAWIIDNFGWFYMTIASIFILFGFIVAVTPFGKLRLGKDNDVPEHSFISWVGMLFAAGLGVGFVFFGVAEPILYYMDPPPGYSFHLPEESANAAAIGLRYGVFHWGLHAWGAFSVVGLTLAFVQYRKNRPALISSAFYPILGSKTDGWMGKTIDLLAVISTCAGVATTFGLSALQISGGISFLTPLSNSIPLQLAIIAVITCLFLFSAVAGINKGIKRLTNLNLVLAGILLLFVLFAGPTITLLESMVTTLGGYLSNVVSMSLTMTPFSNDEWLGSNTIFFWAWHMSWSPFVGLFIARISKGRTIREFIAGVLLVPTLMAVVWFCVFGGTALHIEISGLFPLAEIAQSEVELTLFYMLQNLPFTTISSILAVIVVGIFFVTSADSAAFVLGSMTSNGMLNPSFKLKMLWGVLIAGTASVLLISGDGGLDALQTAALTAALPFAIILVFMLFSIGMMIARDWRTEQRKARLAHDKALKQRLKEEAYEELRQDLSQEWRDELRRELLAAGRNTAEMLHFQTTEDTAIVGKTLAEVGFPPHVNVSAIERGDDVISPSGSTEIKAGDYLYILVEIQQKEALQAILRQTKSGK

SEQ ID NO: 30324 - protein, 612 aa, Bacillus clausii KSM-K16
MRGYFSSISLKGYKNIWMKQWKFTLEMKVGKKMEHELAGSLGARRFWSMVKPFLPKVAWLVLAVVLVIGETSLSLIVPLLTMNFVDEMNAVGLNGQTVILLASVFFAQLVMSGFALYTMMYIGQKVVFALRKEAWQRMLHLPVPFFDRHSSGELMSRMTNDTLVIKDFLTMQLIPFFSGIVSIIGSIVLLLAIDWKMTLMMLTVVPASLLVMIPLGRSMYKVSKSLQDETASFQGDLGRVLSDIRLVKASLAEGVEQKVGLSRMAKLFRFGMREGKIMAVIQPLMMSAMLIMLVVIFGYGGMRVSAGTLSAGALVAIIFYLFQIAMPFTQMASFFTQFQKALGASERLETILRAEPEKNAENVDGAVAPAGTLSFQGVSFGYTADKPILKEVNFDAPIGKVTAFVGPSGAGKTTLFSLIERFYVPDDGTIQYKGHSIHRLPLHEWRQKIAYVSQDSPIMAGTIRSNLVYGLTDVPEENMRAAVRHANLESFIASLPDRYDTEVGERGVRLSGGQRQRLAIARAMIRDPEILLLDEATAHLDSSSEKLVQEALEVLMEGRTTLVIAHRLATVRHADQLIVLEEGNVTGAGTHAELLDTHPLYKELVSQQLQFN

SEQ ID NO: 30325 - protein, 411 aa, Bacillus clausii KSM-K16
MSTVMLKEESKRLVKATVPILAAHGETITKHFYKRMFHHHPELLNVFNRTNQKIGRQPQALANSIYAAAQHIDNLEAILPVVKRIAHKHRSLNIKPEQYPIVGENLLAAMKEVLGEAASDDVIEAWREAYEIIAGVFIEVEKQMYDQAGKAPGGWSGFRSFVVEKKKQESKAITSFYLKPKDGNEIASYQPGQYMTVKVNIPGDTYTHMRQYSLSDAPGKGYYRISVKREEGNTECPPGVVSNYLHQHIREGDVLEMTAPAGDFTLKQGEERPIVLISGGVGITPLMSMFNTLMQQGTKQKVTFIHAAIDGTYHAMHDHVAQTASQKENVHYAVCYERPTSEDQMNPYMKKEGYIDEQFLRSMIEDHHADFYFCGPIPFMKTVYHILNNWGVPEEQIHYEFFGPAGTLASS

SEQ ID NO: 30326 - protein, 300 aa, Bacillus clausii KSM-K16
MKPYSTFGIVGFPWDGGASLGRPGSRFAPEKIREAFAWFANRIENNQVYNVEKRKTFTLPKNALTDYGNIEIAAYSTDQTFAQAEAKLKAVLADHAFPFVLGGDHSISYPLIKALHDQNPGKRIGIIQFDAHLDLVDESPVQGRFSQSSQMRRAIELEHVSAKDIVQVGVRSYNYPWYATYLKDIGIHQITAQEVHQSDPLAIAEQIKSVMENVDLVYLTYDMDVLDPAYAPGVGANEPGGLTPVQSFAILDALYPLVDAFDIAEVNPLYDHQDITTAMAARIMFDCFVARMECGENAQT

SEQ ID NO: 30327 - protein, 471 aa, Bacillus clausii KSM-K16
MKKKGMTTTDFFGLAFGSMIGIGWVISVPQWMASAGSLGAIIALAVTILLVIPIGFVYGELTSSLKLSGGEFAYTHYALGKWPAFICGWFLILGYLIILPWVAISVPLLFAYVFPLLNSYPLYTLMGQVVYLPHILLSLAMIFGLSWLNYRGATLSARFQTIATAMMLVTFLAFLGGGFFLGDPQNAAPLLQTENGHAFNGIILAVSSILFFMNGFDTVSKTVDEAEASINYKNLGKVTVGTILLGGGLYMVIVLASAFLMPASEMGEMGALPLIHALEARSGSMLLPLIVVFGVLLGVITTFNGFLLAGSRLIQSFAARGFIPKGFAAKHTRYKTPHKTVWAMAAFSIVGTLFGSGALLPLVIMGGIAFLIAWFCMAFAAVTIRLKQPHLQKPYKMPGGIYMAYAATFFSAVLLAAMLIPGTPISMGMTEYILFFIWLAAGAVLYVCYTRRSVPNKVEVTHLEDKGVHQA

SEQ ID NO: 30328 - protein, 509 aa, Bacillus clausii KSM-K16
MNLTFSGTDGIIILCAYAVITLLIGWWAGRGEKVSNTLGDYYLAGKNLGLIALFFTLYATQYSGNNVVGYAPTAYREGFSWLQSIPFMTIIIGMYLLIAPRLYVLSKRFQFITPADWITHRFRSKSVTLLAVALMLWALCNYLLEQLVAIGHAVAGLTGGAIPYEYAVIGFILVMLAYEWMGGMKAVAYTDVLQGLSLLVGIIILLIGALTLTGGNFAEMTQDLANTVPEKIGVPDTITSINWLSMIVLIGFGAIIYPHAIQRIYSSKSERTLKRSLARMAWMPPVTTGFVFIVGIICLSLYPNLDVAQSEQLIGILANDVAALNSIYYWAMVIFFGAIVSAIISTADSALLSFSSIISKDIYGEYINRKATEAQKVKVGKVAGVVAVALLLWIAWNPPGTLYQIFVLKFELLVQVFPAFGLGLYWKKLAPKPVFIGMLAGALLAGLMTLTGNNTFYGIHGGVLGLALNVSICVIGSLIAPASHEEQEKAIARTELKVADFRDKKATVG

SEQ ID NO: 30329 - protein, 368 aa, Bacillus clausii KSM-K16
MDEKIFISPSKYVQGRGVLDKTGEYVKDLGKKALLIADEFVWGIAANRVADSLKEVGLDVVEVTFEGESSEAEIKRIVKKAESGGADIIVGIGGGKTLDTAKGVRDRLKGAACAIVPTTASTDAPTSALSVIYSEDGVFERYSFYSKNPDMILVDSTVIASAPPKFLAAGIADALATWVEARASFEGRGTTMAGGKATIAGLAIAEKCEQVLFDYGLLAYEANKRGVVSHALEQVIEANTLLSGLGFESGGLALAHAVHNGFTVLDGDIHHLSHGEKVSFGILTQLAWEDRNQFEINRYIQLLSKLGLPVTFKDLHIEEISRDELLKVAQTALQEGESSHNLASVPSADDLVDAMVAADQYSIAYLGK

SEQ ID NO: 30330 - protein, 372 aa, Bacillus clausii KSM-K16
MEAVKETELVHRYDPAYDTTGITNEIALDGFALSDLELLGIGGFTPLTGFLNEDDYHSVVKSMRLANGAPWSIPISLPVSADQASALRVGERAKLVYKNDIYGVIEIESIYTPDKKVEAQEVYRTTDEAHPGVAKMYARPPIYVGGPIVLTKRVNYERFASYYIDPIDTRRIFAEKGWKTVVGFQTRNPVHRAHEYIQKAALETVDGLFLNPLVGETKAGDIPADVRMESYEVLLKNYYPKNRVHLSVFPAAMRYAGPREAIFHALVRKNYGCTHFIVGRDHAGVGNYYGTYDAQEIFKEFEEGELGIKPLFFEHSFYCKACGNMASQKTCPHDSEHHVILSGTKVRQMLKEGVLPPQEFSRKEVVEVLMRG

SEQ ID NO: 30331 - protein, 463 aa, Bacillus clausii KSM-K16
MFSKPYNEVYIFLGVVPLEKEQQLKRTLTLVPLLVIGLAYMDPLVVFDTYGVVAQLTQGHVATSYLFTIAALLLTAYSYGRMVQAFPKAGSAYTYAQQSIHPNVGFAAGWSLLLDYLFLPMVNFAIGMAYLNAAFPEVPAFIWVVILAAAITTVNILGIQLTANITGLFVAFQVLVAAVFVVFMIRGLMNGLGTGELLSPVPFFSDTFAFQTAFTGASILCFSFLGFDAISTLSEETKNPKKTVPLAIVLVVLIGGALFVAVSYLLQLVYPNYDAFISAEAASLEIAQYVGGAFMHAFFLAGTMVAVVSSSMSSHASASRLLFAMGRDNTLPKRFFGYVHPRFKTPTFNIVLIGLLSLTAIFGELEIIYSFISFGALIGFISVNASVVFHYYIREKRRSLKGTVANLLLPALGAAFCIWLLYSIDRHALTIGVIWTILGLIYFLVRRKNSPHFTADAANRHKE

SEQ ID NO: 30332 - protein, 374 aa, Bacillus clausii KSM-K16
MIIGIPKEIKSYENRVAITPAGVDALVGSGHRIVVEAAAGIGSGFTDEEYEKAGAIIEKNAKDVWAAADMIIKVKEPLSEEYRYFRKGLILFTYLHLAAEPELTKALVDSGVTAIAYETVEINRTLPLLTPMSEVAGRMATQVGAQFLEKTRGGKGILLSGVPGVKRGKVTIIGGGVVGTNAAKMAVGLGADVTLLDVSAERLRQLDDQFGNDIQTIMSNPLNIASAVAEADLVIGAVLIPGARAPKLVTAEMIQKMGAGSVVVDVAVDQGGIVETADKVTTHDAPTYTKYDVIHYAVANMPGAVPRTSTIALTNVTIPFAVQIANKGAKEALRTNLALAKGLNVANGFITYEAVARDLNYPYKQAEEVLAELP

SEQ ID NO: 30333 - protein, 273 aa, Bacillus clausii KSM-K16
MKKWMNGLLAGAAVLALSACGGGDETVDGSTENSNEESTLAKIEEADKFVVGVKFDTRLFGLKDPGTGEVEGFDIDIAKEIAKELLGDENKIELKEVTSKTRIPLLDNGQIDAIIATMTITEERKKEVNFSDVYFEAGQSLLVEKGSDIQGIDDIGAGTKVLAVKGATSGQNLLEQAPDAEVIELENYQEAFLALQSGQGDALTTDNSILYGMAEENSDYEVVGGTFTDEPYGIAVRKGDDEFTEKINEILADLKASGRYDEIYEKWIGESPE

SEQ ID NO: 30334 - protein, 66 aa, Bacillus clausii KSM-K16
MEQGTVKWFNAEKGFGFIEREDGDDVFVHFSAIQSEGFKSLDEGQKVSFDIEQGARGAQAANVQKN

SEQ ID NO: 30335 - protein, 364 aa, Bacillus clausii KSM-K16
MESLVVRGAPHEYVLEEGILSSLETKLKARGFHHVLVVHGDASWKAAERFWPEFTAVEATYWQYNGICSQNQMDQLAAVVQSGEYDAIVGVGGGKLLDLVKGGAYQTKRPYVLVPTLASNCAPWTPLAAVYTDEGTYTHYDVYPENASLLLLEPRLLLTAPKELFVAGIGDTLAKWYEADVQLGSMDEKSPALEVAYYTAKLCRDILLEKSDEALRAFDIGEVSTAFCKVAETIIMLGGMVGGFGDQYGRIAGAHSIHNGLTVLAETHGILHGDKVAYGILVQLALEEKWHEIEALRLFYEKVGLPYSLTQLGISLQADLRSVAEKATVAEESIHVMPFPVSADAVVSAIKKLEEKNEGLQAGV

SEQ ID NO: 30336 - protein, 275 aa, Bacillus clausii KSM-K16
MKGGPFMYNNTLAKLDSQAKQKHGLLDSSPLRYFLAAMLAGAYVGVGSIVLFSVGDPFYQVSSPFLSVVTGATFGLALALVLWAGSELFTGSHLIFTASSLSGTTTWKQTASIWSWSFVGNLVGALLLSYLVFLTGIFADSGTNHYMMSLAADKMNAPLQELLFRGILCNWIVCLAIWTSLRAEGDIAKLFLIFVLIFAFIASGFEHSVANMSILGMALFHGGNDLVTIGGFFYNLIPVTIGNVIGGALFVAGAYVAISQKKNESSPEQVDKKSG

SEQ ID NO: 30337 - protein, 317 aa, Bacillus clausii KSM-K16
MMEKLYGNTPCFLNAKNIAKSKSTEGIDAVVYGIPWEGAVTWGDYTGCELGPKVMRLCSARYSGYLPELDHIDVFEHIRLGDAGDVDVVPADVDETMRRIERFAAEFWKKGTFLIGLGGDHGVTYPIVKALANEGKKVGIIHLDAHYDNLPHHEGDPFARCSPFKRLYELEGVRNESIVHAGIHGPRNKPESGRNAKEAGAVTITINDIREQRDLKGYAAQMYKLASQDVDEVYLSICSDVLDYAFNPGGPVDGNGLSSYELLTFVHEICKQGVVGMDFVEVYPQQDPSQFSAHLASTVVLYALAGHIWNEKNMVSS

SEQ ID NO: 30338 - protein, 442 aa, Bacillus clausii KSM-K16
MSKKKEKNTSLNWWQLSLLGVGCTIGTGYFLGSSIGIGLTGPSIVIAFLLAALGTYVVFIALAKLTADDPQEGSFCYYAEQAFGNRVGFACGWNYWMSNILIIGSQLTALSILSRFWFDNVPLWVFASIYSLLGIGVVLLGTKGFDSVENVLAAVKTAAILLFIVLGFLAVFQWLDGTGPDPSVPSSYNELFPRGIKGFWGSLIYAFYAFGGIEVIGLMAMQLKQKQDAPKSGTALLLLLAIIYTVSLGLAVSMVSFDQFTDKESPFVTALSDYHLAFFPHVFNAAIIVAGFSTMTAALFGVTTLLTTLAHDGNAPKWFEKKIKYKDLPLPSLGLAVVGLICAVIAALLLPGKLFEYITTAAGILILFNWICIVLSNMRLLKQTFFSISGNIIGILLMLLAISGILAEKTGRPGFYLSIGFAAIIVLIAWLVKKPHKEQSSS

SEQ ID NO: 30339 - protein, 625 aa, Bacillus clausii KSM-K16
MRLRSALTEPFRYKTINWRASRQSQATSSQPQHPHAARAGGRPETAKDGKGAAKRIFAYLTRQKGALFLVMALVFASAVLTLAGPFLIGVVIDDYIIPTDFGGLEIILLFLLGSYAALSISTFLQNFMMVKIAQATVFAIRKDLFAQLQKLPIGFFDKHKHGDLMSRMTNDIENISATLNSSIVQIISSVVTFIGILAVMLYLSPLLTGITLFIVPLMVVGMRWITKRTKVFFKEQQKSLGQLNGYSEETIAGQSVVKTFSREDTIIEAFEEYNGALRHAGFWAQVYSGFIPKLMNVLNNLSFAVIAGIGGFLAVHGMAGVTVGVIVVFVEYSRQFTRPLNDLANQFNAVLSALAGAERVFAVIDEEPETDQAGASAVKQIDGNVAFQNVCFSYGATETLKNVSFTAKAGETIAFVGPTGAGKTTILNLLLGFYPVNEGAIFIDGNNLANLKKDDVRSQMGVVLQDPFLFQGTIRENIRYGRLEASDQEVEEAAKLANAHGFISHLPNGYETMLFQDGSGISQGQKQLLSIARALLANPSILILDEATSSIDTVTEMKIQEALKRLMHGRTSFVIAHRLNTIEAADQILVLQGGQVTEAGSHHELMATKGFYYEMQQTKQMDAIL

SEQ ID NO: 30340 - protein, 582 aa, Bacillus clausii KSM-K16
MKTIKRYLVFVKPYRKEIIGTILIGLLKFGIPLLFPLAMMYIIDDVLLNEELSIAEQSSQLYWIIGGMAFLFIVLRPPIEYYRQYFAQWIGNKVLYDIRDHLFTHIQKLSLRFYSNRKVGEVISRVIHDVEQTKNFVITGLMNIWLDLATILIAIAIMLQLNVWLTLVAISMFPFYGFSIKYFYQRLRKLTRTRSQALADVQGHLHERVQGMNVIRSFANEEYEQKQFAVRNQRFLAKALDHTAWNAKTFAVVNTVTDIAPLLVLFVSALFVLNGSLELGAMSAFVLYMERLYGPLRRLVNSSTTLTQSIASMDRVFEFIDEKYDITDKEGADVLTDVKGAVTFEHVTFSYDNEADPALQDIHLNIPAGQTVALVGMSGGGKSTLVSLIPRFYDVTKGRILIDGKDIRDLVVRSLRDNIGMVLQDNILFSDSVKSNIKIGKPDATDEEVIQAAKAANAHEFICKLENGYDTEVGERGVKLSGGQKQRIAIARVFLKNPPVLVFDEATSALDLESEHFIQEALEKLARDRTTFIVAHRLSTITNADTIVVIDDGKVVEQGTHKELMEKQGSYYKLYSVQELEA

SEQ ID NO: 30341 - protein, 378 aa, Bacillus clausii KSM-K16
MNHKHVAIIGSGVAGVATALFLKKAGIESTIYESRSAEIETGAGFLLSPNGVKVLGEIGCKDEVIANSTIIKSICQINSENEVEAIINNYNEKHFNAPLINVMRSNILNPLLKEAQRQGIEIKYSKKLISVKQLSNSIEAFFEDETSIKTDILIGADGTFSTTREAVASSAKLDYSGMWGLQGVSYVEDFEWDESSSYLYYDENLFFIFGKAHPTNKLNILWQAFSMRPEKLPTKYFEKANKETIREFISKQMNDWKVTKNLRRMIENTEMFFPRSIYEVNDLPMWSKGRVVLVGDAVHTANPFLGQGASFSLEDSMVLAKMLRDHDYRDAFYYYEKDRRKRTEEVTAMFQNMDIELNIEKKINEYKITWEEEKNDLT

SEQ ID NO: 30342 - protein, 473 aa, Bacillus clausii KSM-K16
MDVSIWVIVANMIVLLGAIIFSFYISKRTRNNEGWAVGGRALPVYVVILTQFATASGGGMLVAQVGIGYAFGWSVITYGLFTGAGVLALLFLAKWLRKNDFISLPDIFKKIYGTHPFLITTITFMTMVVPFGWLCTQLVAFGRLFSELTGVEPWLLMLIFTVICLLFIIPGGMVSVAWTDLIFGILMLVMAVVASVYAITSAGGWSAIVQAVPQENIGIEGFWSVGLLTVLFWSLSLTPGTMTNQMYFQRIYAADSMKTVVISLLSTAALLILTKLYAALVGMSAYTMNPNLDNPESAAGMFLSNMPSILMVAYSTFICATLLSTVTSAVQSVVVNITRDIYQSYLNPKVSDGQLLRTSRIFSVFVIFFAFALATLYPRALDWIVASYAYSAAGLFAPLFIGFALKDRQFLTFKGAIAGMLFGIAGAGLAHLLGTTIPYVAFGLVASTIGLLLVSAATRNKNTTTVVRKETSI

SEQ ID NO: 30343 - protein, 582 aa, Bacillus clausii KSM-K16
METFRRLATFYLPDKRFFVFSLIALFFVTAITVVYPVVLQIAIDVGISGGEYGIIPYLAIGLILIMAVKGIATYINQYFGDLFGVRAVYRLRKALYKKLQFLPFTYYDNAKTGDLMSRLTADVEAFRFFLSFGCAQLVNFVLLVGFSLIVMFYYSVPLTIVTMVTLPFLSVVVYKFDKRVHPGFRRVRKSLASLNTKVQENVSGMHTVKALAQEDTEKNRFHKQNDDYRAKNVEVANVWGTYFPLMEFIGNTSAVLLLGFGGYLAVQGQLTAGELTAFFSLVWFIIGPIMNLGFIINTFSQSKASGERLLEILDEGERKNGVEQTSSYTKLEGDVVFKNVELRYNNKAKNALTDISFHAPKGSTIGLVGATGSGKSSIIQLIMRFYEKTAGDIFIDGKPVEEYDVKELRSNIGLVLQQTFLFSSSIRDNLAYGNPDVPMEEIVAAAKRADAHDFISSLPDGYDTILGERGLGLSGGQKQRIAIARAMILNPSILILDDATSAVDMQTEMKIQQALKEIMEGRTTFVIAHRISSVKHCDKILVLEDGSIVQDGDHESLLQEEGLYRRIYDIQNQDQQYVLQQA

SEQ ID NO: 30344 - protein, 428 aa, Bacillus clausii KSM-K16
MFVDKVKVYAKGGDGGNGMVAYRREKYVPDGGPAGGDGGRGASVILEVDEGLRTLMDFRYNKHFKGKRGEHGMSKNMHGKKAEDLVVKVPPGTMVTDEETGALLADLTTHGQRAVVAKGGRGGRGNVRFVTPANPAPDHAENGEPGEERNLLLELKVLADVGLVGFPSVGKSTLLSIVSAAKPKIAEYHFTTITPNLGVVDTQDGRSFVMADLPGLIEGAHEGVGLGHQFLRHIERTRVIVHIVDMSAMEGRDPVEDYHKINEELSQYNYRLTERPQLVVANKMDMPEANENLKRFKEALGEETKIFPVSAITKDGVRELMLAIADELEHAPEFPLHDSEEQVEGRVLYKHELPIEPFTITRGDDGVFELSGAELERAFKMTDFAREESVRRFARRMRKMGVDEALRKRGAKDGDLVRIMKFEFEFVE

SEQ ID NO: 30345 - protein, 371 aa, Bacillus clausii KSM-K16
MYYLDYSATTPLSPLCLDVYQKTAQLAFANSNSLHTFGLEARAILEQARTKFASLLRLTEEELYFTGSGSESNFLAIVSLAFAYRNKGQHLVSTKTEHPSVLEALHYLEKHGYEITYVPVTEEGNVTVEALRASLRPDTVLASIAVASSEIGTVQDIAHLSNVLRSRGILFHSDCVQALGKIEIDFSLLDAASFSAHKLYAPKGTGAVYLSKRLHWRGFYEQARHESGFRPGTVDTPAVAAFASAVEHALSIRKTRMAELAELRDTIIRQLTATGHFQLVGSKKERLPFHIGMLVKGWSGQQFMLECDRAGFAIATGSACQAGQTSPPLSLLALGLTNEQADRYVRVTLGEPTTEDEVGMFIEHCTKIVCR

SEQ ID NO: 30346 - protein, 386 aa, Bacillus clausii KSM-K16
MKQIYLDHAATSVLHPQALEAMMPYFSTVFGNPSSIHQFGRQAKQALIEARESIASLLNANSNEVLFTSGGTEANNLALIGFARANREKGTHIITSEIEHHAVLHTLEELAKEGFSITKLPVNENGQISFAQLKNALTEETILVSIMFANNEVGTVQPIKEIGELLKGHQAAFHSDAVQAAGLYELNTDELAVDLMTIASHKLNGPKGIGCLFVREGIELEPLLHGGEQERKRRAGTENVAGAVGFAHAFNQAYAEREQRRQSYKLYRTMFFETMERRGVAVLENGESGERLDHILNVCFPGASTEALLMKLDLQGIAASGGSACTAGTLQPSHVIQAMYGKDSHRVKEAIRFSFGMTNSKEELAYAFEQIADCVLSEQGKKAFIE

SEQ ID NO: 30347 - protein, 204 aa, Bacillus clausii KSM-K16
MLTIDEIKAKLKAADTCNKQVGREAAVLLPLITINRELHILFQVRSLALRAQPGEICFPGGKIEPSDHDAKAAAIRECTEELGIDESDISVIAALPPVHTPQRTFIFPFLAEISSIEDISINDAEVDSWFTIPVAYLLSHPPLQGYMNITVQPGKGFPIEKIANRDAYEGRIYQMPEYFYEYNGYIIWGLTGRILKHFLDMLEP

SEQ ID NO: 30348 - protein, 553 aa, Bacillus clausii KSM-K16
MNSNDTRTKIDPVFYWVLGILLIFIVVGISAPARLEAITAAAQAFIADRFGWYYLIVVTFFLLVCLFFIFSPYGKIRLGKDEDRPEYSYLTWFAFLFSAGLGVGLLFFGAAEPIAHYAVSSPTVEEGTGAAALESMKYVFLHWGFHGWAIYAIVAICLAYFNFRKEQPGLISAALSPLINPNGFFGKTIDVIAIIATLSGIATTLGFGAAQMNGGISFLTNLENSFMLQLAIIVVITVLFLISASTGLDKGIRILSIVNMTLVVLMLLFFAVFGATMYSLNLFTNTLGQYIQSLPELSFTIAPNSAEHRAWINAWTLFYWAWWMAWSPYVGTFIARVSRGRTLREFVIGVLLVPSLLGFVWFSFLGGTSIAAESSGAAAISTLADEEMLFGVLSTMPFSTITSFITIFLIAVFFITSADSATFVLGSQSTKGSLNPANKIKITWGLLMSATAAVLLYSGGLQALQNTMIVVAFPFSIIIVLMVISLLKALRQERLKEQVKERRLRRELVELRNFKNKHEREEKKRLKQEQKKQHKRAVPKSNHQKTKPPKKND

SEQ ID NO: 30349 - protein, 372 aa, Bacillus clausii KSM-K16
MTESKEEWHCSGCGVSIQTEDPKKLGYAPESALKRDVVVCKRCYRLKHYNEIEPVSIGDEDFQAMFASLHHKKALIVKVVDVVDFYGSWISGAQRFVGKNPVLLVANKVDLLPKSTNRNKLTNWLKKSASDLGLKPLEVKLMSTVTGEGIDDVALTIDDMRRGRDVYVVGCTNVGKSSFINRILAMHGQTGEAMITTSHFPGTTLAMIDIPLGDGKSLVDTPGLVNRHQYAHLLSVKGLKEITPKKEIKPIVYQLKEGQTLFLGGLARFDFVKGPPSSFIVYVANRLHIHRTKMEKADDLYSKHGGELLVPPYKEDGEQVRPLVKHSFKVGKEPMDIVFSGLGWIRIQTEGAIVEAHAPKEVGVAIRRSIHT

SEQ ID NO: 30350 - protein, 611 aa, Bacillus clausii KSM-K16
MSKIIGIDLGTTNSCVAVMEGGEATVIPNPEGNRTTPSVVAFKDGERLVGEVAKRQAITNPNTVISIKRHMGTDYKVDIEGKSYSPQEISAIILQKLKADAEAYLGEKVTKAVITVPAYFNDSQRQATKDAGKIAGLEVDRIVNEPTAAALAYGLEKEDDQTILVYDLGGGTFDVSILELGDGFFEVKATSGDNKLGGDDFDEVIMDHLVAEFKKENGIDLSQDKMAMQRLKDAAEKAKKDLSGVTQTQISLPFITADATGPKHLELTLTRAKFDELSADLVERTLGPTRRALSDAGLSASDIDKVVLVGGSTRIPAVQEAIKKLTGKDPHKGVNPDEVVALGAAVQAGVLTGDVKDVVLLDVTPLSLGIETMGGVFTKLIERNTTIPTSKSQVFSTAADNQPSVDIHVLQGEREMAADNKTLGRFQLTDIPPAPRGVPQIEVTFDIDANGIVNVKAKDLGTNKEQSITITSSSGLSEEEIDKMVQEAEANAEADKKRREQVELRNEADQLVFSTEKTLKDLGDNVDQAEKDKAEAAKDKLKKALEADNTDDIKAAKDELQEIVTALTTKLYEQAAQAAQAQQDGGNESADKQDDNVVDADYEEVNDDDKK

SEQ ID NO: 30351 - protein, 303 aa, Bacillus clausii KSM-K16
MKQKTTTFKSGFVSIIGRPNVGKSTLLNRVIGQKIAIMSDKPQTTRNKVQGVLTRDDAQLVFMDTPGIHKPKHRLGDFMMKVAKNTLREVDLILYVVEADAKFGPGEQYIIERLQETKTPVFLLINKIDKVSPEELLKVIDLYKDRYPFAEIIPISALEGNNVPTLVEQIVEHMEEGPQYYPADQVTDHPERFIIAELIREKVLHLTKEEIPHSVAVVIEQIKKRDNGKVYVGATVIVERSSQKGIIIGKHGAMLKEVGQLARSDIEALLGSSVYLELWVKVQKDWRNRPSQLKDYGFNENEY

SEQ ID NO: 30352 - protein, 452 aa, Bacillus clausii KSM-K16
MKVAKFGGSSVANAEQIKKVAAIIKADNKRKIVVVSAPGKRYADDAKMTDLLIALAEAKVADQPVEAAFNAVMNRYESIANDLELNRDVIAEIEADLKNRLEQTVTGKGRFLDIMKASGEDNNAKLIAAYLSKIGLKATYINPKDAGLLVSDEPGNAQVLPEAYEALAKLAEIDGIVVFPGFFGFSKLGNLVTFPRGGSDITGAILAAAVQAELYENFTDVDSVYAANPFIVEDPVEIKRMTYREMRELSYAGFSVFHDEALIPAFRNDIPVCVKNTNNPKCSGTLILAERERSLNPIIGIASDEGFATIYVRKYLMNREVGFGRHLLQILEDAGISYEHIPSGIDDTSVIIRQTQLSDQLENAIIERIKEELNVDDVHIEHDFAMVMLVGEGMHNTVGVTARASSALAKAGVNIEMINQGSSEVSLVFGIHSKDTKQAVRVLYEEFFGQKQ

SEQ ID NO: 30353 - protein, 616 aa, Bacillus clausii KSM-K16
MCGITGWVDWQRNLRTETKQMKNMANTLNRRGPDALETWTSDHAAFGHARLVVVDPEGGKQPMTRTAKGNTCTIVYNGELYNTEELRKELLAHGHTFAGHSDTEVLLKAYMEWGAACLEKLNGIFAFAVWDEQEQTLFMARDRLGVKPLFYTEKDGMLLFGSELKALLAHSQIEAVVDRSGLADVMGLSPSRTPGHGIFKGIVELRPAHYLQFSKNGSAVKRYWQLQSNIHTETAHETAAHIRELLEDIVERQLFADVPVGMFLSGGVDSSALTAIAARIYEKQGNAPIFSYSIDYEENEKYFKASTFQPNADADWVEKVAAHCGTNHKNCIIGNDVLANLLKESVLVRDTPGMADVDSSLLWFCKQIKNDVTVGLSGECADEIFGGYPWFHKAEVMAIDGFPWMRSLDERIQLLQPDWQKRLNLQEYVYDRYKETIQETPRFDGDSPEEARRREISYLNMIWFMTNLLDRKDRMSMGASLEVRVPFSDHRLVEYVWNIPWEMKTYGGREKGILRKALQGLLPDDVLFRKKSPYPKTHHPLYTAAVTKAIQEVVRQKDAPLFTFINRDRLKEIADKGGFDTGKPYFGQLMAGPQLLAHFVQIDYWMKAYNIQIDES

SEQ ID NO: 30354 - protein, 533 aa, Bacillus clausii KSM-K16
MNQVAEPKTAQFHILVADTMSEEGLLPLLEADHVEVTQASVDNAGPLEQYDALLIRSATTVTEELLSRMPRLKIVARAGVGVDNVDIQAATKHGVVVINAPDGNTISTAEHTFAMMCALLRNIPQANASVKSGKWDRKAYQGTELRGKTLGIVGFGRIGTQLAKRAKAFEMGVLVYDPFLTAERAEKLGIAQGELDHVLSVADIITVHTPLTKDTKGLLNMETIAKTKPGVFLINCARGGIIDEQALKHYLNNGHVAGAALDVFTEEPATDKELIGHPSVVATPHIAASTKEAQLNVAAQVSQEVLQFLNGEPALNSINLPAMPKDVYEKIKPYYDLARTMGSVLSQLMRIPVQEIEVFYSGTTAEQNTSVLTRSLISGFLQPRVDAAVNDVNASLIAKERGISFGEKHVTKTFGYSNLIQAVVHGEGRQFEMKATYIHEYGPRIVSINGFSVDVVAEGHILYIQHFDRPGVIGKMGQLLAKHDVNIATMQVGRKSAGGEAIMIVQVDKHVDQTVIDGLLTFDEIAIANVIDL

SEQ ID NO: 30355 - protein, 187 aa, Bacillus clausii KSM-K16
MKGRINLKQAVFLDRDGVINEVLSKRVKFVNDANDFHLLDGVAEAIRFFNKAGFLVFVVTNQGGIGLGYMKEKKLERIHEKMEADLKAQGATIDDIAYCPHKPNEGCPCRKPKAYLLKKLADKHHVDLPASVMVGDREPDIRAGQKAGCQTVLVHARTEDDFQADARFPDLRAAVPWIIAQKRAAAR

SEQ ID NO: 30356 - protein, 544 aa, Bacillus clausii KSM-K16
MPKVASMIVKFIKEKGCKTVFGVPGKPVVPLILAMEESGVSFVLARHEGGAGFMATGYALQTGGLGVAIGTSGPGGTNMITAAAQAQAFHAPVLFITGHPPLSQSGMALGQDSSMFGTDLVALFKPVTKFSAKVESKGMLKRYLQHAEEQALTGAKGPVHLSVPLDILIEEVDEFTLSRLPVQDHIRSGNIQLAIKALNRAKRPLMLVGKGAHFSGAYKEVEQVAEKWSLPVVTTPGGKGTFVTDHPLSLGSLGLGGTEGAAAYVKDKPIDLLLVVGSKLSDMSTVGLTAGGMPSQVLHFDYQGLFVGKSLPADTLFVQGDAKINLQQLLLEAKEFPQRQQVDLREYRDRNRAPVDGCDRLSTAQTMGALREVLPADTVVYGDDGSHTFYAIKHFRTLVPGTFYFDDVFGAMGHAIGLSIGAKMAQPQRPIACFTGDGCLYMHGTEIATAVDQKTNVLFVVFNNGMLDMVDKGMKHNLGRTAGTRYEQEINAALFAESLGAKGFRCNTVAEVKEAVQKGNRFEGPVVVEVMVSKEETPPTLGRG

SEQ ID NO: 30357 - protein, 127 aa, Bacillus clausii KSM-K16
MYRTMMKAKLHRARVTESNLNYVGSITIDEDLMDAVDLLENEKVQIVNNNNGERFETYVIKGPRGEGGICLNGAAARKVQPGDVVIILSYAMMENAEALAHQPKVAILDENNRIVEMLGTEPASTVR

SEQ ID NO: 30358 - protein, 405 aa, Bacillus clausii KSM-K16
MKIIIQKFGGTSVKTDESRLQAVRHVQKAVNDGYKVVVVVSAMGRKGDPYATDTLLSLVSKSRITKREQDLLVSCGETISAVVFSDLLNAHGVQATAMNGAKAGFRTNEEFGNAKIKEMKCEHLLKKLETEDVVVVAGFQGQSKSGDVTTLGRGASDTSATALGAALHAEWVDIFTDVEGVMTADPRIVSDARALEAMSYNEICNMAYQGAKVIHPRAVEIAMQAKIPIRIRSTYSDNEGTLVTALGASHSMDVNERMITGIAHVANVTQIKVAAKEGQLDLQENVFKSMAQAKISVDFINISPSGVTYTVSDEAADKAKQVLEHLGYTPELRRGCAKVSAVGAGMSGVPGVAAKIVSALSGENVQILQSADSHTTIWVLVKNEDMKKAVNALHKMFQLSEATTV

SEQ ID NO: 30359 - protein, 299 aa, Bacillus clausii KSM-K16
MKVGFIGLGTMGLPMTRHLVEAGYETYVVSRSRGPIEKALAFGAVEASSPKALMETVDIVMTCLPLPSTIHDVYDGPNGLIAGASAGKIVIDHSTVDRATNEWASSRLKEKGASFLDAPISGGPMGAEAGNLTIMCGGEEDAYERALPVLKAFGDYIVRVGETGSGTTVKLLNNMLIGVHQSALAECYVMAEKAGVDPAVAYEVIKRSAGFSKSMDWAINAILDRQFEARFSINLLHKDIGLALKLADDIGMPLDVVKLGAEKVAKAKEKYGDQDVSAIIRPLEEATETIVKRHKKESH

SEQ ID NO: 30360 - protein, 492 aa, Bacillus clausii KSM-K16
MGHDQEQTPLFTGLTEYAKKEPIPFHIPGHKRGAGMDADFRTFIGEEALSIDLINIAPLDDLHHPHGIIDQSQQLAAKAFGADYTFFSVQGTSGAIMTMIMSVCGPGDKIIVPRNVHKSIMSAIIFCGALPVFIHPELDFEHGIAHGVATESVAKAIRAHPDAKAVLVINPTYYGFTCDLKAIVELAHQAGIPVLVDEAHGVHIHFNERLPVSAMQAGADMAATSVHKLGGSLTQSSILNIRAGLVSVEHTTAVMSMLTTTSTSYLLLASLDAARKHLATKGAQLLDETIDLSIWMRHAINEIDGLYCLGSEKLHGSAVFSHDPTKLLISLKGLNISGFAAEVWLRDHYNIEVELSDLYNILCIITIGDTEEKLALLLRALTQLALEFSSTANRCASLPVHVANIPTLALSPREAFYAQTETVPFDESVGRIIAEFIMVYPPGIPILSPGELISEENLAYVKENLKAGLPVQGPEDATLSNLKVIKEQRAIR

SEQ ID NO: 30361 - protein, 548 aa, Bacillus clausii KSM-K16
MKQTTSVFGTAVAIASAFILWGVFFPKNMATVMDSIQGFISSELGWFYLLSATFYVGVGIYLIFSPYGSIKLGKPEEEPEYSYMTWFAFLFTAGMGIGLVFWGAAEPLSHYFAPPDAAPGTQDAAAQAMRYAIFHWGIHPWAIYAVVALALAYFQYRKDEPALFSSTFRPLIGHRITGPLGKVIDVFVVFATVFGTATSLGFGAAQITAGLRYLFPALNSFSDNVFQLVVIAIVTILFCISAATGVDKGIRILSNFNVRLAIILMAFVLLLGPTSYIMGVFTQGIGSYAQNFFGMSFSMDVYNPESSWVQEWTLFYWAWWISWSPFVGAFIARVSRGRTIREFVIGVIALPSLFGAFWFSVFGGSSIFFENETGALYGQMQTGGTEMALFALLEQFPLTFFVSILTVILIASFFVTSADSATVVLGMQTTGGLLNPPNAVKLVWGVIISGTAAVLLLTSEQGLAALQTASIIGAFPFAVIIILMIVSLFKELRNEKAALTVNRERLRQERLALRNERERIKREQMLLRKEQQKLRQLTKDKKKDRKKD

SEQ ID NO: 30362 - protein, 634 aa, Bacillus clausii KSM-K16
MCGFVGDLLIRNGSHLPDHLWIQTLEAIHHRGPDSTGTYKDETVRFGFKRLSIIDLEHGDQPLAYSKGRYHIVFNGEIYNYIELRSQLIQRGYTFRTDSDTEVLLALYAADGKNAVKQLRGMYAFAIWDKHKKELFCARDRFGIKPFYYLKTDERFFFASEQKSIMPLLEQISIEQEALQHYATFQFVPEPNTLTKGIHKLLPGHTLTVNADFCVQIEAYAERTFQPRSGPTVTELANQTRKLLTDSVEKHMRSDVPVGAFLSSGIDSTSIAALAQQVHPNLLTFTVGFETEGYSEIAVAKETAKALGVKNIHKVISADEFIQELPNIVWHMDEPVADPAAVPLYFVAQEASKHVKVVLSGEGADELFGGYNIYREPLDLAWFKKLPPTFHAGLKRVVAHMPSKLKGRNYIIRGTTPLNERYIGNAFIFSEKEKTQLFRDYDRTKPYTNVTAPLYEQAKGMDESTIMQFVDMHTWLPGDILVKADRMTMAHSIELRVPFLDKDVFAFARMLGQDMKLSHKTTKFVLRQAMKDLIPANIVPRKKLGFPVPIRVWLKNELYDWAKQLIESSNTEDVFHKPFLLQMLQAHRDGHGDYSRRLWTVLTYMMWHDIHVAKRLISTHQQKDAERCKTLAHF

SEQ ID NO: 30363 - protein, 102 aa, Bacillus clausii KSM-K16
MYAIIETGGKQIKVEEGQEIYVEKLDAEAGEEVSFDKVLFVGGESAKVGAPFVEGASVTGTVEKHGRNKKIIVYKMKAKKNYRRKQGHRQPYTKVVIGKING

SEQ ID NO: 30364 - protein, 576 aa, Bacillus clausii KSM-K16
MIHSNEAATPQAAENKQAVCTGSEILLKALASEGVEVIFGYPGGAILPTYDEIYKLGMNHILARHEQGAIHAAEGYARITQKPGVCIVTSGPGATNVVTGIADAMMDSLPMVVITGQVATKVIGTDAFQEADMLGITMPITKHNFQIRSIEELAQTVKEAFHIAVSGRPGPVLIDLPKDISEKLGIFDYEEPVHLPGYQPTVKPNKQQIRKLLDKFKEAKRPVLLVGAGVLHAQASEELTAFARKFQIPVAQTLLGLGAFPGEEELHLGMAGMHGTYAANMALHKSDFLINIGSRFDDRLTGALEHFAPEACIAHIDIDPAEIGKNVHVEIPVVGDAKEALAMLVKGSGAIDEHDEWRKQVSDWKRDYPLWFHRDGEVIKPQELIQKLYEHTKGEAIVTTDVGQHQMWTAQHFKFNKPNRWITSGGLGTMGFGFPAAIGAQIAEPELPVLAITGDAGFQMTLQEMSILQELDLPVKIVIVNNASLGMVRQWQQRFHGERYSHSLFPIQPNFAKLAEAYNIKAVKVDKLSMLDEAIAETLAHPGPVLLEVCVAKEENVYPMVCPGTGHHCMEGVEPS

SEQ ID NO: 30365 - protein, 403 aa, Bacillus clausii KSM-K16
MAKEKVVLAYSGGLDTSVAVKWLTDKGYDVIAVGLDVGEGKDLEFVKQKALQVGAIQSYTIDAKKEYAESFVLPALQAHALYEQKYPLVSALSRPLISKKLVEIAEQTGATAVAHGCTGKGNDQVRFEVSIQALNPNLKVLAPVREWAWSRDEEIEYAKAHNIPIPIDLDNPYSVDQNLWGRSNECGVLEDPWATPPEGAYALTAPLEKTPDTPDIIELSFEKGVPVAINGEAYPLDQLILTLNEIAGKHGVGRIDHVENRLVGIKSREVYECPGAMTLIKAHKELEDLTLPKELAHFKPVIEKKLTELIYEGLWFSSLQPALLAFLKESQTHVTGVVRVKLFKGHAIIEGRKSAYSLYNEKLATYTPDDEFDHSAAVGFISLWGLPTKVHSMVTKEKKEVTL

SEQ ID NO: 30366 - protein, 395 aa, Bacillus clausii KSM-K16
MAKIIAINAGSSSLKFQLLAMPEETVIAKGLVERIGLKKSIFTIEANGQQHELTEDIPDHAAAVKLLLKDLTGRGIIASLEEIEGIGHRVVHGGEKFNDSVVITDEVLQGIEEVSELAPLHNPANITGIKAFKEVLPNVPAVAVFDTAFHQTMPESAFLYSLPYEYYEKYGIRKYGFHGTSHKYVTHRAAELMETPIEELRILSCHLGNGASIAAVKGGKSIDTSMGFTPLAGVTMGTRSGNIDPALIPYIMEKTGQSVEEVVATLNKKSGLLGITGFSSDLRDIEAAAKEGDERAQVALDVFASRIHKYVGSYAARMGGLDAIVFTAGIGENSATIRERVLKGLSFMGVDVDLEKNNVRGKEAFIEKAGAPVKIIVIPTNEEVMIARDTVRLTS

SEQ ID NO: 30367 - protein, 379 aa, Bacillus clausii KSM-K16
MIYLDNSATTRPHPDVLVLYTKMAADYFGNASSLHTLGMEAEQVLDHARKRFAAYLNCMPNQLIFTSGGTEANAVAIQGTAKKHANGHLITTTVEHASIYENARALEAQGFEVTYVQADEDGRVTSKAIESAIRPNTVLVTLGHVQGELGTIQPIAEIGALLQRYPQIKFHVDAVQSLAKVPFSLKEANIDMLSLSAHKIHGLKGTGLLFVNNPATLESLLYGGGQEQRLRPGTENTAGVAAFAKALGLMESQEQEQQQRLLALNDMLRAKLEQIEGLVVNTPTSGYAPHILNVSIPGIKAEVLVQALGQRQIYVSTQSACSTKTGKPSRVLLGAMKPRTVAESAIRMSFSFATTHEEVEACADALKQIIPELQEVVGK

SEQ ID NO: 30368 - protein, 390 aa, Bacillus clausii KSM-K16
MTSYSRLSDRVSEIKPSGIRRFFDLASQMENVISLGVGEPDFVTPWNIREESIFSLERGYTAYSANAGLIELREAISHYMETRFAVSYNPDTEILVTVGASEAIDLGMRAILNEGDEVIIVEPTFVSYAPLVTMAGGVPVPVGTSAETNFEVRPADIEAAVTDKTKAIMICYPNNPTGSSISKKCLEDIAAIVRKHNLFVFSDEIYAELAYDKEHVCFATLPGMKEQTIVINGFSKAFAMTGWRVGFALAPPDLLGAMLKIHQYSLMCAPTMAQYGALEALQHGMDDVERMKLSYQQRRNFFVKTAKEIGLPCHHPDGALYAFPSIAHTGFTSEEFAEALLKEERVAVVPGSVFGEGGEGHIRCSYATSLTHLEEALERIGRFLRRLELR

SEQ ID NO: 30369 - protein, 263 aa, Bacillus clausii KSM-K16
MSVPNLKIENLHVSIDDKEILKDFNLEINGGEIHAIMGPNGTGKSTLASAIMGHPKYEITSGSVTLDGEDVLEMEVDERARAGMFLAMQYPSEISGITNADFLRSAINANREEGNELSLMKFIRKMDEKMDVLDMDQSFAQRYLNEGFSGGEKKRNEILQLLMLEPKIAILDEIDSGLDIDALKVVAQGVNQMRGEEFGCLIITHYQRLLDYITPDKVHVMMQGRIVKSGGSELAERLEAEGYDWIKEELGIEDERVDANQEA

SEQ ID NO: 30370 - protein, 386 aa, Bacillus clausii KSM-K16
MAGARTPVGKANRGSFKHVRSDDLGAIAVKETLRRAKQVEPEEIDDCLIGCAMPEAEQGMNMARNVSVLAGIPQSVPAVTINRYCASGLQTIAYGAERIMLGHAKAIIAGGAESMSMIPMGGHVVKPNPTLIDEAPEYYMSMGYTAEEVARQYGISREDQDAFAVESHKRAAAALANQRFNDEIVPVPVVEQHFGADGTVQTTERLVEMDEGVRADTTIAALSKLKPAFQLKGTVTAGNSSQMSDGAAAVLLMDKEEAEARGLEPLVTFKSFAVAGVAPEVMGVGPIEAIPKAVRLAGLQLEEIGLFELNEAFASQALAVIRELGLDYDKVNVNGGAIALGHPLGCTGTKLTLSLIHEMRRRDERFGVVTMCIGGGMGAAAVFERH

SEQ ID NO: 30371 - protein, 65 aa, Bacillus clausii KSM-K16
MQGKVKWFNAEKGFGFIEREDGDDVFVHFSAINSDGFKTLDEGQDVEFEIVEGARGPQAANVVKL

SEQ ID NO: 30372 - protein, 317 aa, Bacillus clausii KSM-K16
MGYSIDKKKFKLFTVHSNPLLTNEIASLLGCAVGKSSVKRFSDGEVQINIEESVRGSKVFVVQSTSQPGNEHVMELLIMIDALKRASAKEINVVIPYFGYARQDRKARAREPIAAKLVANLLETAGADRILTVDLHAPQIQGFFNIPVDPLQGLPLLARYFLNKALKQPVIVAPNHSGLGRARRLAEYLDAPIAFIDKRHPEPGFPQAVNVVGDTEGREAIIVDDLIDTAATVTLAANALQENKVSAIYACCTHPVLTGPAIERLQMAPIKEIVVTNTIELDDDKKVGNLTVLSIAPLLAEAIYRVHREQSVSTLFQ

SEQ ID NO: 30373 - protein, 594 aa, Bacillus clausii KSM-K16
MGSTTERPIQLKEFISLMRLYRPSLWLLGLALFLVLMETALSLAVPLLTMNLVDITVESNFSGTTAALIAGVFIVQIILSGISMYMMIYIGQIMVAKLRKDLWHKVLRLPVSFYDRNSSGETMSRITHDTNVIKNFFTDQLIPFLSGTIKIIGSIMILFALNWSITLLLLLIVPVSLAALKPLGRKTYKVSKALQDETASFQGDLGRVLSDIRLVKSSIAEDPETSQGNNRIDQLLKHGLDTGKIMAIISPLMTTITLLVLVVVFGYGGIQVANGTLSAGTLVAIVFYMFQIIPPISQMGHFFTQLQKAKGATERITYIMEENLESQLAASVSYPHNQETVARVNGIRFSNVSFSYPNGSQILKNVSFSANASEVTAIVGPSGAGKTTLFSLIERFYPPSEGSIEYDNQPINDFDVQEWRQKIAYVAQDSPLMAGTIRYNLTYGHAEKSSDADIHAALEKANLTSFITSLPDGLETEVGERGILVSGGQRQRLAIARAILRNPQILLLDEATAHLDSHSEFLVQEALNQLMLSRTTLVIAHRLSTVQHADKLVVVQSGEITGEGTHDELIEHHQFYRELVDRQLYKKESPELIN

SEQ ID NO: 30374 - protein, 519 aa, Bacillus clausii KSM-K16
MKSGPINKKRTMENKIVFPSILIIAIVSFLFAIYTEESTTLLNRIFDTIVDLFAWGYMWYALLMVVTGIWLAYSKYGQVVLGDPSEKPRYTLFEYASILVAMGVGATLMRTGMVQWSEVAVDPPFGLQAGSSEALLTGNAYSMFLWSFQTFAVFVMAAPAMAYILHVRKKPKMRISEACRVIFGDKFTDGLGGIVLDTLFLVSILAGAAVTLGLGTPIVTENLAELFNIEVTFLLTMIVTLIWVFVFTLSAYVGLDKGIKRLSTMNMYLAGVFALFIMIIGPGIFILDFFTDSVRVLVSRYLDFSLYTNSLHTEGGGSHIESHTVFWFAYNATWAMLHGVFAAVVSKGRTIKEMILTYLLAPTMLSWVATGILGGLGVERHTSGDVSVLNIVQEQEPVTAVPQILASIPIPEISIAVFIIIATIFLVTTLDSTTYTIATYMSTQDMSRRTPSRHLRIFVAVVITVLALTLMNIGGLAPLEVLSGLMGIPIIAIQILTIIAAKKMMDEDKAWINNVRKEK

SEQ ID NO: 30375 - protein, 283 aa, Bacillus clausii KSM-K16
MKTVGLIGCGAMGKGMATSLLSAGYTVYIYDDMSKWREPLEKQGACFVENSAAVAKKAKYVLLSLPSPNIVADTVAGKEGVLCHLQTGGFLLDLSTTDVQTTLAMEKAAAAKGIYYLDCPVSGGPAGADAGTLTIMVGGDKQAYFSVKPLLDILGDTILYVGDSGAGQTVKLCNNMLVAGITTLLSETMAVASDHGVSRRLLAQIIQQSSGHNRVLDVFGENLISGSYDNVLFYLKHMAKDLELYMALSQDSRKPQHAAGTVNQLYRSALHQGKGDKDATAVY

SEQ ID NO: 30376 - protein, 216 aa, Bacillus clausii KSM-K16
MKFFVDTANINEIKEANELGILDGVTTNPSLVAKEGVDFHERIAEIAKLVPGSVSAEVISLDAEGMIEEGKTLAAISENITVKVPMTVDGLKAVKAFAELGIKTNVTLIFSVPQALLAARAGATYVSPFLGRLDDIGHDGLQLISDIADIFSTHGLPTQIIAASVRHPVHVSEAAKRGAHIATIPLNVIKQLTGHPLTDKGIEKFLADWNKENVEK

SEQ ID NO: 30377 - protein, 394 aa, Bacillus clausii KSM-K16
MKTAIVSGARTPIGKMGGVLSPLKAAELGGIVLEEALKRAQVNAERVDEVIMGQVLQAGAGQLPSRQAAHAAGIPWRAKTETINKVCASGMRAVTLGDLSIRAGEASTVLAGGMESMSNAPYYMKKARFGARMGDTTLLDGMIYDGLTCSFNDVHMGVYGNRTANELSISREEQDRWAARSQERAVAAIESGIINEEIVSVSVKGRKGETVLVRQDEAPRKGTTVDSLAQLKPVFGKEGTITAGNAPGVNDGACALLLMEAAQAEKQGKPILATIEAHHRLAVEPWDFPKTPGLVISELLEKTKLTVADIRRFEINEAFAAVALASNQIAGLDEEKVNVNGGAVAYGHPIGASGARILLTLAYELKRSGGGYGIAAICSGGGQGDAVLLHVKGE

SEQ ID NO: 30378 - protein, 292 aa, Bacillus clausii KSM-K16
MRFDEAYSGKVFIMSRASYEEADAVIYGMPMDWTVSFRPGSRFGPARIREASLGLEEYSPYADKHLEEINYFDAGDIPLPFGNAARSLDIVEEYVDSLLADGKFPLGLGGEHLLSWPIFKAMYRKYPDLAIIHIDAHADLREQYEGEALSHSTPIRKACELIGAENVYSFGIRSGMREEFAYAKEAGMHLYKFDVAEPLKNVLPHLSGRPVYITIDIDVLDPAHAPGTGTAEAGGITSKELLEAQMLLSQADIQIVGADLVEVAPAYDPTEQTAIAASKFVREMLLGWVHKR

SEQ ID NO: 30379 - protein, 331 aa, Bacillus clausii KSM-K16
MGDLFADIKRQVESHKPSIVLPEGTDERVLQAAAKLAADNVVKPIVIGDNDAILALADKLKITLEGITIYNPETYPGIDEMVDAFVARRKGKETEESARKLLQDVNYFGTMLVYMEKADGLVSGAAHSTGDTVRPALQIIKTQPGIKRTSGVFVMVKEDKKFVFGDCAINISPNEEELAEIATATADTAKLFGIEPKVAMLSFSTLGSASSQETKKVSAATKIAQESRPDLIIDGEFQFDAAFVPAVAQKKAPDSPLKGEANVFIFPSLESGNLGYKIAQRLGGYDAIGPILQGLNKPVNDLSRGCNVDDVYKLSLITGMQAITQKTGQGV

SEQ ID NO: 30380 - protein, 421 aa, Bacillus clausii KSM-K16
METVLMDNLWLTISAILVLLMQGGFILLEAGSTRMKNAGHIAGKTIFTVGIASLVFWAVGYGFIYGDGNPFIGMADFFFGNYADGVGSVDFFFQLTFAAIALTIAFGGFAERGKLAAYAIFAVLFSAFVYPLVAHWIWSDQGWLANLGKQDFAGSTVVHLTGAMAALAATLMLKPRLGKYDKNGKVNDLFGHNQVYTALGVLILWVGWFGFNAGSTGGVADAFFGYVALNTQLAAGAGTIAALFLVWALNGKADVPTTLNGTLAGLVAITASCAFVAPWAAVLIGVIGGLIVVVSMNMFDKLKIDDPIFALSVHGVAGVWGTLSNGLFATPELAEMNGGLPGLFYGGGFEQLGVQLLSVVVCGVFAFVASYVLLFITKGLLGGNLRVTEEEEILGLDMSEHGSYGYPETVQSEKTSTQTGS

SEQ ID NO: 30381 - protein, 572 aa, Bacillus clausii KSM-K16
MIKRFFSYYVPHKKLFFIDFFSAIVVAVLDLFFPIVVQWFINTLLPQQEWDKVVWVSGGLLLTYLISAYLQYNVNFLGHKLGIHIETDMRQDLFESIQRQSFRYFDNTKTGHIISRITNDLFDIGELAHHGPEDLFIALMTFVGAFGIMFYVNPTLAIVALVFVPFLIALITYTNIKMNQAWSKMYAEIGDVNARVEDSVSGMRVVQSFTNEAHEVEEFRKNNRRYQKAKVGGYKVMGYTSSGIFLATRLMILSVLLVGAWLLYTNSLDVGEFVLFILYINILFKPIEKISAILELYPKGMAGFKRFTEVLDTEVDIEDKPDAKVAPVLNGDIEFHNVTFSYENNRPVLNDLNLFIPAGKTVAFVGPSGAGKTTISSLIPRFYDVDSGAITINGINICDMTKKSLRSQIGIVQQDVFLFSGTLKENIRYGKLDASDEDIYRAAKLANLDGLIESLPEGYETQIGQRGLKLSGGQKQRIAIARTFLKNPPILILDEATSALDTETEALIQESLQELAADRTTLVIAHRLATIRHADHIVVVTKDGIAEQGTYEELVAKNGVFATLNNIQLTHV

SEQ ID NO: 30382 - protein, 610 aa, Bacillus clausii KSM-K16
MNEHRDQFLANMSEEFKNPLHGILNMSHSVLKRERHMLQERSIEELETVLSIGHRLTLRLNDLIDMMSLQEGSLRLQKKAVSIQPIVTGVLDMLQYSTEVKRIKMVNQIAKDFPPVIADESRLVQIVYNLLHNAVKYTDEGIISVRAFKENENALIVISDTGIGMDEDILKRLFRPYEQANANETMIEGGFGLGLSISKQLVELHGGTLEVSSAVGEGSTFTLSLKLAELKNEQDKSGDPAFEQSSSVVPPLEKKPLYMKEVEAQLATTQTSLSELSHARPRILMVDDDPAHLQVLEGILSPEDYDVTMVTSGKEALAMLDAQEWDLVISDTMMPQLSGYELTRLIRKRFTLIELPVLLLTSRSQSKDIQTGFLAGANDYVTKPVKALELRARIEALTTIKQMVQEQLRLEAAWLQAQIQPHFLFNALNAVAALSETALDKMHDLLQEFSDFLRAKFQFQNMDELVPIEEELSLVRSYLYIEKVRFEERLEIDWQVEDSDIKVPFLSIQPLVENAIRHGIMKRPHGGKVLIQVSNNKTHAVVSVEDDGVGMDDVQQQRILERKAASRSGVGLINTDQRLKRHFGTGLQIESEKGKGTKISFHVKHRNRSK

SEQ ID NO: 30383 - protein, 284 aa, Bacillus clausii KSM-K16
MKKTGWLLVLASMLLFLSGCFSVNEPVTAESEGIWNSFFVYPLSRLIILIAGWVSSYGWAIIVVTVLFRIVLLPLMVKQTKSMKAMQQLQPEMQKLRQKYSAKDKNTQMQLNTEMQKLFSEHKVNPFAGCLPLLVQMPIFLAIYHAIMRTPNFQGESFAWFVLNNPDPYFILPVLACILTFIQQKMMMVQDNPQMKILLYAMPIMILVVGIFLPAAVILYWVVGNIFMIMQTYFITGPNAGKRGLEATVETAAASKAKGNQGSQRKNNKNKPNKKKKKPKKKRK

SEQ ID NO: 30384 - protein, 236 aa, Nicotiana tabacum
MNQPIYTELPPANFPGEFPVYRRNSSFSRLIPCLTETWGDLPLKVDDSEDMVIYTLLKDALNVGWSPFNFSAGEVKSEQREEEIVVSPAETTAAPAAELPRGRHYRGVRRRPWGKFAAEIRDPAKNGARVWLGTYETDEEAAIAYDKAAYRMRGSKAHLNFPHRIGLNEPEPVRVTAKRRASPEPASSSENSSPKRRRKAVATEKSEAVEVESKSNVLQTGCQVELLTRRHQLLVS

SEQ ID NO: 30385 - protein, 225 aa, Nicotiana tabacum
MAVKNKVSNGNLKGGNVKTDGVKEVHYRGVRKRPWGRYAAEIRDPGKKSRVWLGTFDTAEEAAKAYDTAAREFRGPKAKTNFPSPTENQSPSHSSTVESSSGENGVHAPPHAPLELDLTRRLGSVAADGGDNCRRSGEVGYPIFHQQPTVAVLPNGQPVLLFDSLWRAGVVNRPQPYHVTPMGFNGVNAGVGPTVSDSSSAVEENQYDGKRGIDLDLNLAPPMEF

SEQ ID NO: 30386 - protein, 233 aa, Nicotiana tabacum
MYQPISTELPPTSFSSLMPCLTDTWGDLPLKVDDSEDMVIYGLLSDALTAGWTPFNLTSTEIKAEPREEIEPATIPVPSVAPPAETTTAQAVVPKGRHYRGVRQRPWGKFAAEIRDPAKNGARVWLGTYETAEEAALAYDKAAYRMRGSKALLNFPHRIGLNEPEPVRLTAKRRSPEPASSSISSALENGSPKRRRKAVAAKKAELEVQSRSNAMQVGCQMEQFPVGEQLLVS

SEQ ID NO: 30387 - protein, 244 aa, Solanum lycopersicum
MYQLPTSTELTFFPAEFPVYCRSSSFSSLMPCLTESWGDLPLKVNDSEDMVIYGFLQDAFSIGWTPSNLTSEEVKLEPREEIEPAMSTSVSPPTVAPAALQPKGRHYRGVRQRPWGKFAAEIRDPAKNGARVWLGTYESAEEAALAYGKAAFRMRGTKALLNFPHRIGLNEPEPVRVTVKRRLSESASSSVSSASESGSPKRRRKGVAAKQAELEVESRGPNVMKVGCQMFQLASSYWLVKIWS

SEQ ID NO: 30388 - protein, 227 aa, Nicotiana sylvestris
MAVKNKVSNGDLKGGNVKTNGVKEVHYRGVRKRPWGRYAAEIRDPGKKSRVWLGTFDTAEEAAKAYDTAAREFRGPKAKTNFPLPSENQSTSHSSTMESSSGETGIHAPPHAPLELDLTRRLGSVAADGGDNCRRSGEVGYPIFHQQPTVAVLPNGQPVLLFDSLWRPGVVNRPQPYHVMPMAMGFNGVNAGVDPTVSDSSSVVEENQYDGKRGIDLDLNLAPPTEF

SEQ ID NO: 30389 - protein, 237 aa, Nicotiana sylvestris
MYQPISTEFPVYHRTSSFSSLMPCLTDTWGDLPLKVDDSEDMVIYGLLSDALTTGWTPFNLTSTEIKAEPREEIEPATSPVPSVAPPAETTTAQAVVPKGRHYRGVRQRPWGKFAAEIRDPAKNGARVWLGTYETAEEAALAYDKAAYRMRGSKALLNFPHRIGLNEPEPVRLTVKRRSPEPASSSISPASENSLPKRRRKAVAAKQAELEVQSRSNVMQVGCQMEQFPVGEQLLVS

SEQ ID NO: 30390 - protein, 225 aa, Nicotiana tabacum
MRRGRAAAAPAPVTGEPNGSGGSKEIRFRGVRKRPWGRFAAEIRDPWKKTRVWLGTFDSAEDAARAYDAAARALRGPKAKTNFPLPYAHHHQFNQGHNPNNDPFVDSRFYPQDNPIISQRPTSSSMSSTVESFSGPRPPPAPRQQTTASSRKYTRSPPVVPDDCHSDCDSSSSVVDHGDCEKENDNDNDNIASSSFRKPLLFDLNLPPPMDDAGADDLHCTALCL

SEQ ID NO: 30391 - protein, 584 aa, Citrus sinensis
MTRIKEFFTKLSESSTNQNISNIPKKKKKLFLALFATLLVVAAVIGIVAGVNSRKNSGDNGNEPHHAILKSSCSSTRYPDLCFSAIAAVPEASKKVTSQKDVIEMSLNITTTAVEHNYFGIQKLLKRTNLTKREKVALHDCLETIDETLDELHKAVEDLEEYPNKKSLSQHADDLKTLMSAAMTNQGTCLDGFSHDDANKHVRDALSDGQVHVEKMCSNALAMIKNMTDTDMMIMRTSNNRKLIEETSTVDGWPAWLSTGDRRLLQSSSVTPNVVVAADGSGNFKTVAASVAAAPQGGTKRYIIRIKAGVYRENVEVTKKHKNIMFIGDGRTRTIITGSRNVVDGSTTFKSATVAVVGEGFLARDITFQNTAGPSKHQAVALRVGADLSAFYNCDMLAYQDTLYVHSNRQFFVNCLIAGTVDFIFGNAAAVLQNCDIHARKPNSGQKNMVTAQGRADPNQNTGIVIQKSRIGATSDLKPVQGSFPTYLGRPWKEYSRTVIMQSSITDVIHPAGWHEWDGNFALNTLFYGEHQNAGAGAGTSGRVKWKGFRVITSATEAQAFTPGSFIAGSSWLGSTGFPFSLGL

SEQ ID NO: 30392 - protein, 432 aa, Nicotiana sylvestris
MAQILAPSGEWQMRMTKSSTDANPLTSKMWSSVVLKIIKELAVKSSAKFRFFALESDSGTVNQSEQLLNLDVTPYTDKIIAEYIWIGGSGIDMRSKSRTISKPVKHASELPKWNYDGSSTGQAPGEDSEVILYPQAIFKDPFRGGNNILVICDAYTPAGEPIPSNKRHKAAQIFSDSKVVSEVPWFEIEQEYTLLQQNVKWPLGWPVGGYPGTQGPYYLCAGADKSFGLDISDAHYKACLYAGINISGTNGEVMPGQWEFQVGPSVGIEAGDHIWCARYILERITGQAGVVLSLDPKPIEGDWNGAGCHTNYSTLSMREDGGFEVIKKANLNLSLRHKEHINAYGEGILEKLTGNHETASIDKFSWGVAFRGASIRVGADTEKQGKGYLEDRRPASNMDPYVVTGLLAETTILWEPTNEAEALAAQKLALKV

SEQ ID NO: 30393 - protein, 489 aa, Mycobacterium tuberculosis H37Rv
MSAASQRVGAFGEEAGYHKGLKPRQLQMIGIGGAIGTGLFLGAGGRLAKAGPGLFLVYGVCGVFVFLILRALGELVLHRPSSGSFVSYAREFFGEKAAYAVGWMYFLHWAMTSIVDTTAIATYLQRWTIFTVVPQWILALIALTVVLSMNLISVEWFGELEFWAALIKVLALMAFLVVGTVFLAGRYPVDGHSTGLSLWNNHGGLFPTSWLPLLIVTSGVVFAYSAVELVGTAAGETAEPEKIMPRAINSVVARIAIFYVGSVALLALLLPYTAYKAGESPFVTFFSKIGFHGAGDLMNIVVLTAALSSLNAGLYSTGRVMHSIAMSGSAPRFTARMSKSGVPYGGIVLTAVITLFGVALNAFKPGEAFEIVLNMSALGIIAGWATIVLCQLRLHKLANAGIMQRPRFRMPFSPYSGYLTLLFLLVVLVTMASDKPIGTWTVATLIIVIPALTAGWYLVRKRVMAVARERLGHTGPFPAVANPPVRSRD

SEQ ID NO: 30394 - protein, 293 aa, Populus tremula x Populus alba
MDPDSRDPPIEYREGYALSGKIMLSAILILFFVIIVMVLLHLYARWYLTRARQRQVRRVRNRRTHLVFYVDSPQNPNNVTSHVTRGLEETVKNSLPVFVYPRKTHQDSIECAVCLSEFEENERGRVLPKCNHSFHTECIDMWFHSHSTCPLCRSPVEPVAENPVPEGSNFGISEAGSGLCTSCQHEEDHLGSASTSSFNGGRKPVGLIGVTIDVPRRNGNFEDESNTESPSASHSFRSPMSRMLSFKRMLSRERRGTVSPTVANSVSCGGGSGTTEFDIEQGRDESMPQQTRC

SEQ ID NO: 30395 - protein, 380 aa, Populus tremula x Populus alba
MCGGAIISGFIAPTTTARSSRRLTSGFEWLEPKKPFNNKHLKPVVADPEDDFEADLQEFKDESDVDEDYDVFADAKPFAFSASASEPAKKRGLPRGSTAVKSAGFSGLAKNSAKRKRKNQFRGIRQRPWGKWAAEIRDPRKGVRVWLGTFNTAEEAARAYDSEARRIRGKKAKVNFPDEAPCASARHPIKENSQKRLTKANLSQDFSYLSNPETDYNNMGFVEEKPQVSQFGIMNSIPVNGDSGVTPLTPSDNASMYFNSDKGSNSFDCDFGWGEQGAEILSVLAATPEVDESVFVEANPKKLKSYTEYAVPVEERNGKSLSEELLAFDNQLMNLQMPDLVGNWEASLDSFLNGDTTQDGTNAVDLWSFEDFPSMVGGVY

SEQ ID NO: 30396 - protein, 204 aa, Pseudomonas sp. BG33R
MKATALGNPASKTGSECSFTTSKLRFLACFFLVFPSLVTLSRRLAAPCNTHLPCVQSRTLNFLGSTCLTQLHSGRPSHAAMPANTSSYKALGEQDYRRNTMSYAVIVTGGKQYKVAPGEYLKIEKLEIATGESVTFDRVLLVANGDDVNIGAPVVAGATVVAEVISQGRHDKVRIIKFRRRKHHMKRMGHRQWYTEIKITGIQA

SEQ ID NO: 30397 - protein, 208 aa, Pseudomonas sp. BG33R
  misc_feature (124)..(124): Xaa can be any naturally occurring amino acid
  misc_feature (127)..(127): Xaa can be any naturally occurring amino acid
  misc_feature (129)..(129): Xaa can be any naturally occurring amino acid
  misc_feature (131)..(131): Xaa can be any naturally occurring amino acid
  misc_feature (140)..(140): Xaa can be any naturally occurring amino acid
  misc_feature (145)..(145): Xaa can be any naturally occurring amino acid
  misc_feature (149)..(149): Xaa can be any naturally occurring amino acid
  misc_feature (155)..(155): Xaa can be any naturally occurring amino acid
  misc_feature (157)..(157): Xaa can be any naturally occurring amino acid
  misc_feature (171)..(171): Xaa can be any naturally occurring amino acid
  misc_feature (173)..(173): Xaa can be any naturally occurring amino acid
  misc_feature (175)..(175): Xaa can be any naturally occurring amino acid
  misc_feature (180)..(180): Xaa can be any naturally occurring amino acid
  misc_feature (182)..(182): Xaa can be any naturally occurring amino acid
  misc_feature (185)..(185): Xaa can be any naturally occurring amino acid
  misc_feature (190)..(190): Xaa can be any naturally occurring amino acid
  unsure (1)..(208): unsure at all Xaa locations
MKFVDEVSIRVKAGDGGNGCMSFRREKFIENGGPNGGDGGDGGSIYMMADENLNTLVDYRYTRHFDAERGSNGGSTDCTGEKGEDLVLRVPVGTTIIDSPTQEVIGDLTKAGHKLMVVHGGWHXLCXTXFXSSTNRAPRXTTPGXPGEXRDLKLXNXNYSPTFCLVWPAQXPXKXLHPLXIXRQXQSLPXPFTTLVPNLVLSPLPLKN

SEQ ID NO: 30398 - protein, 57 aa, Rhodococcus sp. 5/14
IARWYNADKGFGCITPDDGSKDCFVHFTALRSERWLSISGRRHHRKRLNLPAKGPAA

SEQ ID NO: 30399 - protein, 57 aa, Rhodococcus sp. 7/1
IARWYNAEKGFGCLTPDDGSKDCFVHFTALRSERWLSISGRRKHRKRLNTPAKGPAA

SEQ ID NO: 30400 - protein, 325 aa, Medicago truncatula
MASSSPCQIFLVFVMVTLVTSLIPSNALLTPHFYDNVCPQALPTIKSVVLHAILREKRIGASLLRLHFHDCFVNGCDGSVLLDDTPNFTGEKTALPNINSIRGFSVVDEIKAAVDKVCKGPVVSCADILATAARDSVAILGGPQFFYNVLLGRRDARTASKAAANANLPSPTFNFSQLISNFKSQGLNVKDLVALSGGHTIGFARCTTFRNRIYNETNIDPIFAASLRKTCPRNGGDNNLTPLDFTPTRVENTYYRDLLYKRGVLHSDQQLFKGQGSESDKLVQLYSKNTFAFASDFKTSLIKMGNIKPLTGRQGEIRLNCRRVR

SEQ ID NO: 30401 - protein, 684 aa, Aspergillus oryzae
MAQPTGELTHPSQQQQLQLQQQFFQSIFGGASDTTEEIDTETDSNHRRPHSFGAAATTPAKLANKNVAPFLVKHIPEQYGPLGSRRTDKLEDLSSPNSKFCYRHRPDLKCRRQADEPSMDKLQRELETLPPSDQQGIAHVWSLFSAAPAKHRKLILQGIMAQCCFPQLSFVSATVRDLIRIDFLTALPPEISFKILCYLDTTSLCKAAQVSSRWRALADDDVVWHRMCEQHIHRKCKKCGWGLPLLERKRLRESKREIELRATTWDVSGPAQNAGGAECSAPHADDVITQKRKADSSDDETAIVKRHCSSLDARPEPDEDYYTTRYRPWKEVYKDRFKVGTNWKYGRCSTKVFKGHTNGVMCLQFEDNILATGSYDATIKIWDTETGEELRTLRGHQSGIRCLQFDDTKLISGSMDRSLKVWNWRTGECISTYTGHRGGVIGLHFDATILASASVDKTVKIWNFEDKSTFLLRGHTDWVNAVRVDTTSRTVFSASDDCTVRLWDLDTKACLRTFHGHVGQVQQVVPLPREFEFEDHDAECDNDNMSTTSGDTESNSLQATLGLESNATETSVFGPSFDNGRPAPPRYIVTSALDSTIRLWETTTGRCLRTFFGHLEGVWALGADTLRIVSGAEDRMVKIWDPRTGKCERTFTGHSGPVTCIGLGDSRFATGSEDCEVRMYSFRN

SEQ ID NO: 30402 - protein, 641 aa, Rhodococcus erythropolis
MCGLLGLLTSGGTSEDAVSRVDQAMHCLRHRGPDEHGTWNDDHLVFGFNRLAIIDIAHSHQPLRWGPPENPERYALTFNGEIYNYLEIRAELVKDHDAKFFTEGDSEAIVAAFHYWGEDAVRRLRGMFAFAIWDTDTRELFIARDPFGIKPLFIATGAGGTAFGSEKKSLLELTDLIGIGTELDPRAIEHYTVLQYVPEPETLHKEIRRLESGSFARVRPGEEPTFTRYFTPKFPAKPFAPGTEKARYQEIAEALEDSVAKHMRADVTVGSFLSGGIDSTAIAALAMRHNPNLITFTTGFEREGYSEVDVAAESAAAIGAKHVVKVVSPAEFAAAIPEIVWYLDDPVADPALIPLWFIAKEARKHVKVVLSGEGADELFGGYTIYREPLSLKPFEYLPKGLRRAAGKLSERIPDGTRGKSLLNRGSLTLEERYYGNARSFNDAQLRAVLRDFRPEWTHQDVTAPIYAQSRDWDPVARMQHLDLFTWLRGDILVKADKMTMANSLELRVPFLDPEVFDVASRVPLDQKITKDTTKYALRQALEGIVPHHVLHRAKLGFPVPLRHWLRGTELFDWAHLQIEESGTDHIFDKQAVVKMLNDHREGVSDHSRRLWTVLTFMVWHGIFVEKRIVPQIQEPVYPVNI

SEQ ID NO: 30403 - protein, 291 aa, Campylobacter coli RM2228
MKSGFVSIIGRTNAGKSTLINSLLEEKIALVSHKQNATRRKIKAIVMNGEDQIIFIDTPGLHESKATLNQFLIQSAIKSMGDCDVILFVASIFDSVKDYENFLSLNPKVPHIIVLNKVDLADNGTLLKKLNEYAKFSKYFKAILPYSCKKKNYQKPLLNELCKLLPEHEYFYDSEFLTPSSQKDIFREFILESIYENLSEELPYSCEIMIKNTKETSNLFIIDAQIITDTNSHKAMLIGKDGTTLKRIGKDARFKISKLIQNKVLLKLFVIVKKNWQKDEIFLKKILNYEE

SEQ ID NO: 30404 - protein, 406 aa, Campylobacter coli RM2228
MKNEVKKVVLAYSGGLDTSIILKWLQDEYKCEVVTFTADIGQGEELEPARKKALSLGIKEENVFIKDLREEFVKDYVFPMFRANTIYEGEYLLGTSIARPLIAKTQAQIALQTRADAVSHGATGKGNDQVRFELGYLAFNPDLKIIAPWREWDLNSREKLLAYAQKHGIDISKKKGKSPYSMDANLLHISYEGLVLEDPAHAPEEDMWRWSKSPKEAPNESEIIELDFQKGDLVAINGEHLSPAGLLSKLNELGAKHGIGRLDIVENRYVGMKSRGCYETPGGTILLKAHRAIESITLDREAAHLKDELMPKYASLIYNGYWFSPERMMLQALIDESQKHANGRVKLELYKGNVMVIGRESANDSLFNAAYCTFEEDEVYNQKDAAGFIKLNALRFIIAGKNGRKF

SEQ ID NO: 30405 - protein, 500 aa, Campylobacter coli RM2228
MANLYLMRSRSDELNTLATTKLLKNYSKIYKNIAIYCPVIYVHRIPVLQGWLEEFDIKQTLKNAYSFTFREAMEEFSKDPHSFFNTILEEYEELNRKYDFVLVNSFCEFGILDGFDLSIKLAKNLNTPIAAIINNEDKLIAQKYFDEALDGRDYALINENFNFEEMHKLQAYDFMTPHRFKYELIKKSVKNKKTVVLPESNDERILKAVEILLKSSVVDLILLGDEQDIKQKADELALDLTAVKILNPLHSEYNEEFATLLYEARKSKGMSLEEAKELVKDRTYFGTLLIHSGKADAMVSGASTTTAETIRPALQIIKTQEGVDSVSGIFFMGLDDKVLAFADCAVNPNPNAEQLAASAYVSAMTAKSFGIEPRIALLSYSSGDSGKGESVDLVKEALRIAKEKYPELNIDGPMQFDCAYDPKTAAKKMPNSKIAGNVNVYIFPDLDAANICYKAVQRTANALAIGPILQGLKKPVNDLSRGCLVDDIVDTVILSAIQAQ

SEQ ID NO: 30406 - protein, 396 aa, Campylobacter coli RM2228
MKILVLNSGSSSIKFKFFDDKVVKASGLVEKIGEEKSKVILKNALNDETFERELPIKNHEHGLQIVNELFKESGILEDLNALDGCGHRIVHGGRNLSEHCLVDDYVLKEIDRVSIFAPLHNPAHLAGIKTMIKAAPSVANVAIFDTAFHRTMPDFAYMYALPYDFYDKHNIRRYGFHGTSHAFVSARAAQLLGKNKEDLNAISAHLGNGASVCAIEGGKSIDTSMGFTPLEGLVMGTRCGDLDPAILPFISHLKGLTIEEIDTLLNKKSGLYGICGSNDFRDIGAKIEQGDDRARLAFDMFCYRLLKYIGAYFTVLPRTDAIIFTGGIGENAALVRQKVCERLSHLGVELDTELNNKKASCERMISTANSKVKIFIIPTDEELEIARITEELINKS

SEQ ID NO: 30407 - protein, 623 aa, Campylobacter coli RM2228
MSKVIGIDLGTTNSCVAVYERGESKVIPNKEGKNTTPSVVAFTDKGEVLVGDSAKRQAVTNPEKTIYSIKRIMGLMINEDAAKEAKNRLPYHITERNGACAIEIAGKIYTPQEISAKVLMKLKEDAEAFLGESVTDAVITVPAYFNDAQRKATKEAGTIAGLNVLRIINEPTSAALAYGLDKKDSEKIVVYDLGGGTFDVTVLETGDNVVEVLATGGNAFLGGDDFDNKLIDFLASEFKDETGIDLKNDVMALQRLKEAAENAKKELSSANETEINLPFITADASGPKHLVKKLTRAKFEGMIDSLVAETITKINEVVKDAGLDKNEIKEIVMVGGSTRVPLVQEEVKKAFGKELNKSVNPDEVVAIGAAIQGAVIKGDVKDVLLLDVTPLSLGIETLGGVMTKIIEKGTTIPTKKEQVFSTAEDNQSAVTINVLQGEREFSRDNKSLGNFNLEGIPPAPRGMPQIEVTFDIDANGILTVSAKDKATGKAQEIKITGSSGLSEEEINNMVKDAELHKEEDKKRKEAVDARNAADSLAHQVEKSLNELGEKVADSDKENIQKALDDLRETLKNQNASKEEIEAKMKALSEVSHKLAENMYKKDEPNAANDKKKKDDDVIDAEVE

SEQ ID NO: 30408 - protein, 389 aa, Campylobacter coli RM2228
MLTQRSQVLEESITLAITALANELKAKGEDVISFSAGEPDFDTPQTIKNAAIAAIEKGCGKYTAVAGIADVLKAIQNKLKKDNNLSYETSEIITNVGAKHSLFECIECLVEEGDEVIIPSPYWVSYPEMVKFAGGKPVFIEGLEENGFKINAEQLKKAITPKTKILMLNSPSNPVGSIYNKEELLSIAKVLEGTKIIVLSDEMYEKLRYDGFEFVAFASVSENALNRTVTINGLSKCGAMPGWRFGYMASKNKALISAVKRLQGQSTSNICSITQHAAIPAFNGECDEDIEKMRQAFEKRRDLALNMLHQIPNISVYKPEGAFYLFVNTQKIEKDSMKFCQKLLEQEKVAVVPGIGFGMDGYFRLSYATSDELIKKGIERIANFIKNYK

SEQ ID NO: 30409 - protein, 527 aa, Campylobacter coli RM2228
MKKKIIVCDAILDKGVELLRKAEDIELIEAAKVPKNELMDMLADVEVAITRSSTDVDVNFLNHAKKLKALIRAGVGVDNVDIPECSKRGVIVMNVPTANTIAAVELTMAHLLSSARSFVNAHNFLKNERKWEREKWYGVELMGKTLGVIGFGNIGSRVAIRAKAFGMKILAYDPYISASKITDLDMEQAKSLDEILTQSDFITIHTPKTKETDGMIGANEIAKMKDGIRLINCARGGLYTEEALCEGLKSGKIAWLGIDVFKKEPATNHPLLDFENVSVTSHLGANTLESQDNIAREACEQALSAARGVAYPNALNLPIKTEDLPPFVAPYIELVSKMAFLAVQIDKNPIKSIKLEAEGAIGEYATSMLTFAAVGALSGILGEKINYVNAEFVAKEKGVDLSCETLPNSGYNNKLSVKIITENSNINVSGTVFNENEQRIVGLNGFQTDFKPKGKMIIFKNKDIPGVIAKISSVLASKNINIADFRLGRDGFGYALAVVLIDEKVQKEVLEELRQLEACIFVQYVEI

SEQ ID NO: 30410 - protein, 648 aa, Campylobacter coli RM2228
MNNNNNAPNNKSNPQGNNFFNKNPIFIFAIFAIVMIIVFKGFFDGNGSLGGALNGTEVSKNVPYSELKKLIESGQINQVSIGQTTIKAVSSVQNTVYTTKKVNDPEFVSLLDSKNIAYGAYSETNWFTDILFSWVLPIFIFFGIWMFLASRMQKNMGSSILGIGSSKKLVNSEKPKVKFNDVAGVEEAKEEVKEIVDFLKYPERYIKLGAKIPKGLLLVGPPGTGKTLLAKAVAGEADVPFFSVSGSSFIEMFVGVGASRVRDLFENAKKEAPAIVFIDEIDAIGKSRAASGMMGGNDEREQTLNQLLAEMDGFGTESSPVIVLAATNRPEVLDAALLRPGRFDRQVLVDKPDFKGRCDILKVHMKDVKISPKVKVEDIARLTAGLAGADLANIINEAALLAGRDSKKYVEQNDLVEAVERAIAGLEKKSRRINDKEKKIITYHECGHALIAETTKGAKRVSKVSVIPRGLAALGYTLNTPEENKFLMQKHELIAEVDVLLGGRAAEEVFIGEISTGASNDLERATDIIKAMISMYGMSEIAGLMVLEKQRNTFLTGGQTIKDYSEKMAESLDDYVKKTLDERYKDVKDTLNTYKGAIETMVAALYEEETIEGAKVRDIIKSYENENNLPTRLQEINEEHKEESKQAE

SEQ ID NO: 30411 - protein, 130 aa, Campylobacter coli RM2228
MKLLVVDDSSTMRRIIKNTLTRLGHNDVLEAEHGVEAWDLLEKNEDIKILITDWNMPEMNGLELVKKVRAEKKYEDMPIIMVTTEGGKAEVITALKAGVNNYIVKPFTPQVLKEKLEDVLGTGNGDSEAE

SEQ ID NO: 30412 - protein, 187 aa, Campylobacter coli RM2228
MFIFFNLNYIIIYSMKRKALFLDRDGIINIDKKYVYKIQDFEFCDGIFELCRYFLAQKYLLFVATNQSGIARGYYTQEDFFKLCDFMLNEFLKENIKIDKIYHCPHLEGCECRKPKAGMLLKAREEFDIDMDNSIFIGDNLSDMQAGKNAQIGTLCLVNEEEKEGDFFRQFKNLNELLDFFKKKEDR

SEQ ID NO: 30413 - protein, 400 aa, Campylobacter coli RM2228
MLIVQKYGGTSVGTLERIDAVAERVIKSAKEGHQLVVVVSAMSGVTNTLIEQAEYFSKNPNGKDMDMLLSSGERVTSALLSIALNERGYPSLAFSGRKAGIITDSVSTKARISYIDTQAITKALNEGKIVVVAGFQGVDKEGDVTTLGRGGSDLSAVAVAGALKADLCEIYTDVDGVYTTDPRIEPKAKKLDKISYEEMLELASLGAKVLQNRSVELAKKLNVKLVTRSSFNDNEGTMITKEDGMEQALVSGIALDRNQARVTLRNIEDKPGIAAEIFSVLADENINVDMIIQNVGVDGATNLGFTVPQNELDLAKNAMQKILGSKTTIESDSAVVKVSIVGVGMKSHSGVASKAFKALADEGINIGMISTSEIKISMIVHEKYGELAVRALHECYGLDK

SEQ ID NO: 30414 - protein, 566 aa, Campylobacter coli RM2228
MRKISGSAMICEALKEENVKIVFGYPGGAALNIYDEIYLQKYFKHILVRHEQAAVHAADAYARMSGEVGVAVVTSGPGFTNTITGLATAYSDSIPLVLISGQVANSLIGTDAFQEIDAVGISRPCVKHNYLVTCIEEFPRILKEAFYIAKSGRKGPVHIDVPKDVSAALGIWDYPKEISMKTYKPIYKGNSKQIKKLAENLEEAKRPLFYLGGGCIASNAANEIRELVKITQIPAVETLMALGTLRSDDELNLKMAGMHGSYTANMALSECDLLVAIGARFDDRITGKTSEFAKHSKIVHIDIDPSSISKIINAHFPIVGDIKEVVKELLEELKKNQFKSNIHEWRQTLKRYDELYPLAYEDSDEVLKPQWVIQECAKLAPDARIITDVGQHQMWVAQFYPFNYPRQLATSGGQGTMGYSLPAALGAKLAVGEEVVINFVGDGSVLMNIQELMTAYENGIKTINIILNNSFLGMVRQWQSMFYEEHFSATDLSLQADFIKIAEGFGCEGYNIKTKDEFRTAFKQALESNKTSLLNVFIDRFEDVLPMVPAGGAIYNMILPKLKDKQ

SEQ ID NO: 30415 - protein, 142 aa, Campylobacter coli RM2228
MTQEQIQIIKDCVPILQKNGEDLTKEFYKIMFNDYPEVKPMFNMEKQASGEQPKALAMAILMAAKNIENLENMRSFVDKVAITHTKLNVKEEHYPIVGACLLKAIKVVLNADETTLKAWEEAYKAIAQFYIDIEKEIYAKAK

SEQ ID NO: 30416 - protein, 393 aa, Campylobacter coli RM2228
MKVYLDNNATTMLDPSAYELMLPFLKDMYGNPNSLHQWGSATHPALREAMDKLYAGLGANDLDDIVITSCATESINWVLKGIYFDHILDKERNEVIISSVEHPAVAAAAYFLKSLGVKVIELPVNEEGVSTVEDLRKVISDKTALVSVMWANNETGMIFDIQKMAEITHEFGALFHTDATQAVGKIKVNLNQVGVDFASFSAHKFHGPKGVGGLFIKKGLKLTPLLHGGEHMGGRRSGTLNVPYIVAMGEALRIANTMLDFEDSHIRRLRDKLEDQILALPDTTVVGKREHRVPNTILASIKGVEGEAMLWDLNKNGIAASTGSACASEALESNPIMEAIGAENDLAHTALRLSLSRFNTEEEIDYAAKQIKNATQRLRAISCTYAYNPNNYK

SEQ ID NO: 30417 - protein, 126 aa, Campylobacter coli RM2228
MNITLLKSKIHRASVTEARLDYVGSISIDEKLLQASGILEYEKVQVVNVNNGARFETYTIATQEEGVVCLNGAAARLAEVGDKVIIMSYADFNEEEVKTFKPKVVFVDENNTATKITNYEKHGAIF

SEQ ID NO: 30418 - protein, 351 aa, Campylobacter coli RM2228
MFIDSVKITLASGDGGKGAVSFRREKHVPLGGPDGGDGGNGGDIIFVCDNNTHTLVNFKGKRELRAQNGAGGMGRNKNGKKGENLELIVPEGTQVIDAQTNEVLLDLTKEGQRELFLKGGKGGLGNTHFKHATNQRPDYAQPGIKGESRLVRLELKLIADVGLVGFPNVGKSTLISVVSNAKPEIANYEFTTLTPKLGLVDVDEYNSFVMADIPGIIEGASGGKGLGLAFLKHIERTSFLLFVLDPMREMPLKEQFIVLRKELEKFSNELFGREFGIMISKSDSVNLGEDFAEQIAQNIANLEEYLKSIDNPQSFLIKVSSLEKTGLKELKFMLLEEIKKLREKREKKVIK

SEQ ID NO: 30419 - protein, 279 aa, Campylobacter coli RM2228
MKKMLLSIFTTFVAVFLAACGGNSDSGASNSLERIKQDGVVRIGVFGDKPPFGYVDEKGVNQGYDIVLAKRIAKELLGDENKVQFVLVEAANRVEFLKSNKVDIILANFTQTPERAEQVDFCLPYMKVALGVAVPQDSNISSIEDLKDKTLLLNKGTTADAYFTKEYPDIKTLKYDQNTETFAALIDQRGDALSHDNTLLFAWVKEHPEFKMAIKELGNKDVIAPAVKKGDKELKEFIDNLITKLGEEQFFHKVYDETLKSHFGDDVKADDVVIEGGKI

SEQ ID NO: 30420 - protein, 346 aa, Campylobacter coli RM2228
MVKIKISALVYIVLAIAFIMLAPQFFDGYGIGILNQIAIYITLAVSYNLINGVTGQFSLEPNGFIAVGAYAAALVLLSSEQKLDLFSLEDPNPIILALHTNSFILALLVAGFSACVLSLILAFAVFRVRGDYLAIVTLGFGIIIQKLAINFPSWTNGSMGLNGIPLLSNLYWTGGVAIISVILILNLVYSKFGRAMQAIRDDEDAASAMGVNTFWTKTLAFGTSAFLEGVGGGLLVCLLASVSPEQFGFEFTFMLLIIIVLGGLGSTTGAILGAILIIGGREWLRFLDEMQIKIDFLGIDMGSMPGLRMVGFSLILILVMLFARREIFGDRELNSFFKRPSKKGLK

SEQ ID NO: 30421 - protein, 317 aa, Campylobacter coli RM2228
MKVFISTHPFGETSKIPLELLDKNGFEVRINNRGRKITSKELSKDIGEAEVLIAGTEKITEDVLRNAPNLKLISRVGIGLDGIDFELCRKYNIKVVYTPDAPTMAVAELCVGLILDLSRKISFTDANLKQGIWNRHMGMLLYGKTIGIIGMGRIGKSLIKLLSSFNVSFKVCDPNPDFAFLKIYNVELTNKTKLLKESDVVSLNLPLKKDTMNFLMLDDLKNMKKSSILINTARGGIINEDDLYIALKENLIAGAAVDVFEEEPYKGKLRELNNVVLTCHMGASTIESRTDMETQAVEEVVRYKNHIPLKNEVFKNE

SEQ ID NO: 30422 - protein, 280 aa, Campylobacter coli RM2228
MLHTKGRCIVSGMGKSGHIGAKIAATLASTGTPSFFIHPGEALHGDLGMLTPDDVLIAISNSGETEEILKIIPAIKKRKIPLIAMCGKKNSTLVKQGDIFLNISVKEEACPLQLAPMSSTTATLVMGDALAAALMKARNFRPDDFALFHPGGSLGRKLLTRVSDLMVSKNLPIVHPDTEFNDLVDVMTSGKLGLCLVVENEKLVGIITDGDLRRALKANDKPRFDFKAKEIMSINPKVVDADAMASEAEEIMLKYKIKEIVVSKEDKVVGIIQLYAIGNV

SEQ ID NO: 30423 - protein, 352 aa, Wautersia numazuensis
MTYQLTIEPLGQTIDIEEGQTVLDACLRAGVWLPHACGHGLCGTCKVQTLEGELDHGEASPFALMDFEREEAKCLACCARPMSDMVIEADIEPDPDAQCLPLMDFTAEVVRIKALTPTIKGVFLRIEGESLQFQPGQYVNVWIGKEAAPRAFSVASAPSANEIELNIRLVPGGSATTYVHEQLGVGERLQLSGPLGRFFVRKSDPRPLVFMAGGSGLSSPRSMILDLLESGDQREIVLVQGARNAGELYYRDAFETIARQHDNFTYLPVLSGEPEQSDWAGERGYVHDLAGRHFSHDFRGWRAYLCGPPPMIEACIATLMQGRLFEKDIFTEKFLSAADASQATRSPLFRSL

SEQ ID NO: 30424 - protein, 312 aa, Oryza sativa Japonica Group
MIMLLQEMENHPVQCMAKTNYDFLARNNYPMKQLVQRNSDGDSSPTKSGESHQEASAVSDSSLNGQHTSPQSDINNNDSCGERDHGTKSVLSLGNTEAAFPPSKFDYNQPFACVSYPYGTDPYYGGVLTGYTSHAFVHPQITGAANSRMPLPVDPSVEEPIFVNAKQYNAILRRRQTRAKLEAQNKAVKGRKPYLHESRHHHAMKRARGSGGRFLTKKELLEQQQQQQQQKPPPASAQSPTGRARTSGGAVVLGKNLCPENSTSCSPSTPTGSEISSISFGGGMLAHQEHISFASADRHPTMNQNHRVPVMR

SEQ ID NO: 30425 - protein, 424 aa, Dehalococcoides ethenogenes 195
MFDRVEIRIKSGDGGSGKVSFRREKFVPYGGPDGGDGGDGGNVYLEADSGLYSLLNFKHKRVHKAANGENGMGSRCTGHNGADLVIKVPVGTVATIVEENGQKRVLADLAADGDRTLVARGGQGGLGNTHFVSSTNQAPMLAQKGQPGGEYELILELKLIADVAIIGYPNVGKSSLLSLLTAAKPRVANYPFTTLSPVMGVVERTEGTFVMAEVPGLIEDAHLGRGLGHDFLRHISRTRMVIHLLDGTSDNPIDDMIKVNSELYLYDASLSERPQVVAVNKIDDELVQLRREELTETFKEAGLEVFFISALTGEGVEVLLDKVAEKLAILKAADAPETETDQEIKVFRPAPKGKMGFHITRLEDGWQVEAPEIERIIEHSDIEDLEVRRQIMVLLKHRNVQQALIKAGAVIGQKIITGRLEWYL

SEQ ID NO: 30426 - protein, 405 aa, Dehalococcoides ethenogenes 195
MAVVVHKYGGTSVGDAERIKHVAKRIIAARQKGSDVVAVVSAMGDTTDDLIALAHKLNDCPEPREMDVLLSTGEIVSSTLLAMALKNMGQDAISLSGQQAGIRTDSAHSKARITGIDPKRIHDELAKGRVVIVAGFQGVSDCQDVTTLGRGGSDTTAVALAASLGASICERYTDVDGVYTADPRLIPDARRLAEISYEEMLELSSYGAKIMHPRAVEIGQVYNIPILVASSFNENPGTLIHGGENMEIRNRVSGIAHDFEVAKITILGVPDKPGIAAGLFAPLAKAGVSVDTIVQNSSQDHITDLTFTVTKSDLGKALEVIGPIAKDIQAREVLSDSRIGKVSIIGTGMLNAPGYAARMFKALSDAGINILLISTSEIRITCIIEEDKVKDAVKAIHKAFEMEKD

SEQ ID NO: 30427 - protein, 216 aa, Dehalococcoides ethenogenes 195
MRIFLDTANIEEIKKGLKLGVVSGVTTNPTLVAKEGISDYKSVVQQICALLPEGDVSAEITAEDPAEMLKQAREIAKWAPNVVVKIPATAEGLEIISKLSKEGVRFNMTLCFSVNQALLGALAGAAFVSPFVGRLDDAGHDGMMLINDIVSIYKEYGFETQVIAASIRHPLHCTQAAQTGAGIATVPYKVLMQMMQHPLTDSGIARFMADWKSVQK

SEQ ID NO: 30428 - protein, 637 aa, Dehalococcoides ethenogenes 195
MAKVVGIDLGTTNSEVAVMQGGEPVVIPSAEGSTLIPSVVAVNKNGERIVGRQAKNQAILNPENTVYSIKRFMGRKWGEPAGRELPVEADAKRKPYKVIQGNNNEVRVVMGDKDFSPPEVSAMILQKLKSDAEAYLGEKVTEAVITVPAYFNDAQRQATKDAGAIAGLKVLRIINEPTAAALAYGLDKKKDETIAVYDLGGGTFDISILELGEGTFQVKSTAGDTHLGGDDFDQKIIDWLIAEYKKDQGIDLSKDKTALQRLKEAAEKAKIELSTVQQAEINLPFITADASGPKHLNIILTRAKLEQMVMDLVDKSLEPCRQALKDSGKTASEINEVILVGGQTRMPLVQQKVKEFFGKEPNKGVNPDEVVAIGAAIQAGVLKGEVSDVLLLDVIPLTLGIETLGGVSTALITRNTTIPTSKSQVFSTAADNQPSVEIHVLQGERPMAADNRTLGRFMLDGILPAPRGVPQIEVTFDIDANGILSVKAKDKGTGREQKITITASSGLSKEEVEKMTREAEAHAAEDSKRKEEIEARNVADNLAYNAEKTLRDNKDKIPAELNTELESKIAAVRTALQGTDVDAIKTTTQELSTALQSVGSAVYGQQQEQGAPAQEEPSAEGKKNDDEGTVEGEFREV

SEQ ID NO: 30429 - protein, 398 aa, Dehalococcoides ethenogenes 195
MTSQVETDKGFISDRAKELKPSGIRKFFDLAAKMGSGAISLGVGEPDFTTPWHIRESAIYALEKGYTMYTSNAGLLELRQEIAKYLYQTYKLEYNPETEILITVGSSEALDLVMRATLNPGDEVLMTDPAYVAYPSCVFMAYGNPVQIPTFEANNFEISAADIAPRITPKTRSILLGYPSNPTGAVMPKAKLAEIAKLACEKNLLVVSDEIYDKIIYSGFEHTCFATLPGMRERSVIINGFSKTYAMTGWRIGYAAGPADIIQAMTKIHQHTMLCAPIAAQKAALEALKNGHDDVRLMVEEYDRRRRFIVKSFNDMGLSCFEPKGAFYTFPSVKKTGLSSAEFAEKLLLEETVAAVPGTAFGDSGEGYLRCCYATSMKDLEEAMKRFRHFLKHNCPGM

SEQ ID NO: 30430 - protein, 406 aa, Dehalococcoides ethenogenes 195
MSEKVVLAYSGGLDTSAAVKWLQEKYGMDVIAVTIDVGNEKDFTLIKEKALKVGAKKAYVRDVRKEFAEDYIWKAIKANSMYEGVYPLATALARPLIAKVMVDIAMEEGATAIAHGCTGKGNDQVRFDVGINTLAPHLKIIAPARQWGMTREQTMEYAQKWGIPVPISVKNPFSIDENLWGRSIECGLLEDPWNEPIPEVFAWTRPVEATPDAPEYLEVEFEQGVPVAVNGEKLSPLALIQKVHDIAGLHGVGRIDHVENRLVGIKSREIYEAPAAVVLIAAHQALEAMTLSKSQLRFKQMVEATYSDIIYNGLWFSALRQDLDAFIESSQRFVSGTVRLKLSKGSFRVVGRKSPYSLYHKGMATYDKGDQFDPSSAVGFITLWGLQAKLQAQLQPILEEEKGNKS

SEQ ID NO: 30431 - protein, 500 aa, Dehalococcoides ethenogenes 195
MKTFLPSKFIVDRIEDRCIKCKVCITQCSFDTHYYDEDDDQIKVRNQNCVGCHRCVTFCPTNALVVRNNPLEYRQNANWTPEMIEDIFKQAETGGVLLTGMGMDKAKPIYWDKLLINASQVTNPSIDPLREPMELTTYLGRRPDKAAFDNCGNVEENITPLVKIDVPVMFSAMSYGAISLNVHRSLAQAAKNMGTMWNTGEGGLHSSLMEFKDNTIVQVASGRYGVQNDYLNSGRIVEIKIGQGAKPGIGGHLPGEKVSADVSLTRMIPMGTDAISPAPQHDIYSIEDLSQLIYALKEATHYRVPISVKIAAVHNVSAIASGIVRAGADIVTIDGMRGATGAAPKVIRDNVGIPIELALAAVDSRLREEGIRNQASLVISGGIRNSGDVFKAIALGADAVNIGTAALVALGCHLCQQCHTGKCAWGICTSDLALTKRINPEIGAKRLTNLLRGWSLEIKDMLGGLGVNAIESLRGNRLHLRGVGLSAEELKILGVRAAGE

SEQ ID NO: 30432 - protein, 637 aa, Dehalococcoides ethenogenes 195
MSQNRNTPQLRMPMGGRPMGGGMHMGGGPMGGMRMAQSGEKARNFKDTMASLLKYLTPYRFPLIIALVLAIFGTVFTIIGPKLLGNATTKLFEGLVSKVTNAAGADIDFTYIGNIVLILVGLYVISAICSYIMGYIMTGVSIKVTYDLRKQIAEKINRLPMKFFDNKTYGEVLSHVTNDVDLISNTLTQSMSQMVTSIVTILGVLVMMFTINWIMALASLIIVPISIGLISMIVGRSQKYFRKQQDYLGHINGHVEEMYSAHNVMKAFNGEAKSIAKFKGLNEELYSASWKAQFLSSIMMPMMNFIGNLSYVVVCILGGFLAIQKTIQVGDILAFVQYVRSFTQPLAQTANIVNVLQSTAAAAERIFEFLGEDEEVPEPSNPVSLKDISGAVSFKDVSFGYSPAKTIIKDFNADIKPGQRVAIVGPTGAGKTTMVKLLMRFYDVNSGAILVDGVNIQDIKRQEYRSAFGMVLQDTWLFNGSIMDNIRFGKLDATDEEVYTAAKTAYVDHFIHTLPSGYEMIMNEESSNISQGQKQLLTIARAVLANPKILILDEATSSVDTRTEMLIQQAMENLMKGRTAFIIAHRLSTIHNADIILVMKDGAIVEQGSHETLLEANGFYASLYNSQFEAGPAEADS

SEQ ID NO: 30433 - protein, 277 aa, Dehalococcoides ethenogenes 195
MVIRLALWPLNRKQLTATKKMQEITVHMEALKKKHGNDRQKLAEEQMKLYKESGVSPTGCLVPMLIQFPIWIALYQAIVRVLAVTPEDFMNLADHLYSWPVVYQTLPLSNHFLWMDLSLPDFALAVLVGVSMYVQQKMSTPKAINQQQAAQGQMMSFMMPFMFFFFSLSFPSGLAFYWFVSAIVGIIMQYFITGWGQLEPMAEKVISYFRGGRQVRTGNTYKTEKRTATPSGQLIDSSAKGKQMEGSIDEKGRDERQDGGGSNKAGSKSAKRKPRRG

SEQ ID NO: 30434 - protein, 350 aa, Dehalococcoides ethenogenes 195
MDLPCGTRNFSYKTDMAIFRTKTHWAMLIGFLILLFSLPFNISSYWLGIMNLIGITVVAAAGLNILMGYCGQLSVGHAGFIAVGAYTTAILASKLGVPFPFDMIASGIMAGLVGVLFGLPSLRVKGFYLAISTIAAQFIIIWVINHWSSLTGGFNGIVIPPINLFNFDFTTQGSQYFIIMLVAVLAIFFMKNIARTRIGRAFVAIRDNDLAAEVMGINVFKYKLLAFFIGCFLAGVAGSLMAHWIGYLTAENFTLSDSILYVGIVIIGGLGTGVGPIFGALFIRLLQQGVQYVSPLMGSAFPQLPSGFAAGLGPMVFGLAIVLFLVLEPRGLAHRWQLFKSSYRYWPFSY

SEQ ID NO: 30435 - protein, 270 aa, Dehalococcoides ethenogenes 195
MNQPDTKIKIADLSLSFGGIKALKGINLDIYDNQITAVIGPNGAGKTSLLNCINGFYKPQAGSIVYKGQNIARIRPDRVAKMGIARTFQNIELYSGLTTLENLMAARHIFMKQNFLTGGAYFGPAHKEEIAHRKIVEDIIDFLEIEPVRKKVVSMLPYGMRKRVELGRALALEPEVLLLDEPMAGMNLEEKEDIARFIVDIFEGQGETYPDTPILRDGVKCIVLIEHDMGVVMDLADRIAVLDFGSKIAEGRPEEIKNDEHVIAAYLGDE

SEQ ID NO: 30436 - protein, 124 aa, Dehalococcoides ethenogenes 195
MLKSKIHRATITDACIDYEGSITIDKNLMQAANLLPYEQVHVVNVNNGTRLETYVIEGPAGSGQICLNGAAARMGMKGDKVIILGYSLITEEDTLTHQPNLVYVDSLNRITKVKNGVASRNLEV

SEQ ID NO: 30437 - protein, 569 aa, Dehalococcoides ethenogenes 195
MKLTGAQIVCESLLKEGADVIFGYPGGVLLPLYDTFPQYPALRHILTRHEQGAAHAADGFARVTGKVGVCLATSGPGATNLITGIANAYMDSIPMVAITGQVTRNLIGKDAFQEIDITGITLPITKQNYLVTRASALADTIKEAFYLARTGRPGPVLIDIPKDVFIEQAEFEYPDEPDLPGYKPVIKGNLMQIQKAAKLIETAEKPVIIAGHGVNISGANEELKTLAENCQLPVITTLLGVSSFPEDHILSYGMLGMHGMAYANMAVAATDLIVAIGMRFDDRVTGKLSAFAPHASVIHIDIDPAEIGKNIRVDVPIVGDVKTVLKSLNKQVECVQHSEWLRQLENWRREHPPLSIRHTDLILPQYIVQQISEATSGNAIVVTGVGQHQMWAAQHYTYIRPNSLVTSGGLGTMGFDLPAALGAKVGCPDETVWCIAGDGGFQMNMQELATIVQERAAVKIAVFNNGYLGMVRQWQDLFYNKNYVATPLGCPDFIKIAEAYDIPALNVKRKEEVRPAIEQAMATEGPFLINFIIEPEENVYPMVPPGAALHEVLEEPKKEVSACPRRSIP

SEQ ID NO: 30438 - protein, 251 aa, Dehalococcoides ethenogenes 195
MDLEILLEVKDLHVEVDGREILHGVDLVLPAGETHVIFGPNGSGKTTLLMTLMGFPRYKITQGQLIFNGKDITHVPIDERARLGIGISFQRPPVVRGVKLREMVRSSLRTKEDSGLIDELAKKAHMTDFLERDVNHGFSGGEIKRSELLQLLAQGPDMVLLDEPESGVDLENIALIGSLINDLLEKKHPIRERKRGGLVITHTGHILDYVNARTGYVLCHGRINCTGDPRDMLETIKQNGYQECVECPRKI

SEQ ID NO: 30439 - protein, 526 aa, Dehalococcoides ethenogenes 195
MKKVLVSDALSATGLSPLKEIAQVDVKTGLKPEELVSIIGEYDALLVRSQTQVTADIINAGKKLQVIGRAGVGVDNIDLKAATGNGIIVVNAPTGNTISATEHTLALMLSMARHIPRANASLKSGQWKRNEFVGSELKGKTLGIVGLGNIGSEIAKRALALEMRVIGYDPFISMERAKKLQVELVPFEDLLKQADFITLHVPMTGQTKGLIGPKELEMMKPTVRLINTSRGGIIDEEALAAAIREKRIGGAAIDVFSKEPCTESCLFECDNIIVTPHLGASTAEAQELATSDVVKQVIDVFEGRPARYAVNAPYISAESLPVVGPFMPVARTVGSLVSQLTDGHMKNVTIKYCGELAAYDTTALKALVLGGILEHISEERVNVVNADIVAAQRGLGVTEQKESACQNFSSLITVTIDTDNGKSNTVAGSLVRGDVHIVRLNDYWIDIVPTGGYFLFADHIDRPGLIGAAGKITGDADINISYMHLSRQKARGQALMILALDEPLPEKQRQQLLSLPDVQTVQVVKI

SEQ ID NO: 30440 - protein, 324 aa, Dehalococcoides ethenogenes 195
MLANGNLTDELKIFTGNANPDLAKAVADYLKVQMGKCEVFQFSNENIFVRIQESVRKKDVYVIQPTCSPVNQSIMELLIMMDALKRASSERITAVLPYYGYGRTDKKDQPRVPITARLIADLLTAAGASRILTLDLHAPQIQGFFDMPVDELTAENLLANYFKKKKLEDLVVVATDVGISKKARDFAAKLDAPLAIIEKRRMGNNDITRTINIIGDVEGKNALTFDDEIDTAGSLVGNVNILINKGVKEVYSCATHPVLSGPAIQRIAASPIKELVVTDSIPLTPPKKIDKITVLSIAPLIGEAIYRIHTGNSIGEMYDQMQME

SEQ ID NO: 30441 - protein, 608 aa, Dehalococcoides ethenogenes 195
MRYQMNSNWKRSTIIYIVMLVAIIAIFSFLVPNSQKPEEVPLSQIITLSQEHKIAEITVDSENIEVTTTDGTKLSTVKEYIASIYDIEGLDLTDVKVNIQPAGGLDWGTMILTYLPFLIFGGLLIFIFTQARGANNQAVSFGRSKAKLFNMDKPTITFANVAGVDEAKQEVGEVVEFLKSREKFQALGARIPKGILLIGPPGTGKTLLAKAIAGEAGVPFFSISGSEFVEMFVGVGASRVRDLFDQAKKNAPCIIFIDEIDAVGRQRGAGLGGGHDEREQTLNQILVEMDGFDTDTSVIVIAATNRPDILDPALLRPGRFDRRVVLDKPDITGREAILKIHAKGKPLADTVNLENLAKQTVGFSGADLANLLNEAAILAARKNRKVVETEDLEESIDRVIAGPERKSRRISTQEKEVTAYHETGHGLVLRLVQGADPVHKISIVARGMTLGHTRQLPNEDRYLMTRSQFKAMMAGLLAGYVAEELTFKELSTGASDDLRRATDIAHKMVTSYGMSDKLGPRTFGNKEEMVFLGREISEQKDYGEKVADMIDEEVRGLIEEAHQKAKTILTENKNRLKFIAEKLFEKETLEGAELENLFVGEFPVSESA

SEQ ID NO: 30442 - protein, 247 aa, Dehalococcoides ethenogenes 195
MKYLNCMMDLWLFDSLNPQEKTEISRLFRRPEYLKNEYLFSEGEPASAVFVVAKGRVKLFKTAENGREIILAYLTQNQLFGEEILFNDAIRTITAVAMEDTRLCACYKSDFENLLSQNSQIAVKVIRTLSEKINNITETLADMAIYDIQNRLARTLARLAKEHGEDVGDGRRLNFRLTHDDLGSLVGASRVMVTNVIKSLKKSGIIKDDIDHKLVVSQWFLNDFSDEMPKFIRKDSSACKCFPKPGE

SEQ ID NO: 30443 - protein, 383 aa, Dehalococcoides ethenogenes 195
MDELIYLDNAASTPVDPRVVTAMLPYFTWHYGNPSAIHPMGRRADEALETAREQVAALINCQPEEVIFTSGGTESDNLAISGAAMAGRGRHIITSEIEHHAVLLACHALEKKGFEVTYLPVDSFGQVSPKDVEAAITPQTALVSIMAANNVIGTLQPVAEIGAVCRRQGVIFHTDAVQMAGHLPLDVKRDNIDLLSLSAHKFNGPKGVGILYAKGDVPLAPLILGGGQESGLRSGTENVPGIAGLGLAAGIAALEMQEEAGRVSSLRKKLAEAILGSIPGSRLNGHPQKRLPGNLNISFEGVEGEYLSKELAKQGICVSTGSACSSASHEAPYVLLATGLERDLANCSIRLSLGKMTTPEHIQKTADTLSAVVSQIRRQTPVW

SEQ ID NO: 30444 - protein, 410 aa, Dehalococcoides ethenogenes 195
MNQKAVFIDRDGTIVEDVPYCNSPRKIRLLEGAGKAIRRLNDQGFLVILITNQSGVARGYFSEETLGEIHNKLKEDLGYFGAHLDDIFYCPHHPAQSCTCRKPATGLIDQAVAKYGLDISGSYFIGDRLIDIQAANRSGCQAVLVPYTLPETDYFKLEISVDSRPSFLAGDISAAVDWVLADALGKASVSVVIPTLNEEKNICSVLPRLRCVPGIAEVILVDGRSTDKTVENALRLWPEIKVINQPGRGKGDAMRAGFEAACGDIVVTLDADGSLAPEEIPCYVGPLFDGYQMVKGSRFCRGGGTSDMPLFRRFGNFVFTKMANLVCGCRYTDLVYGYHAFRRQILGSLCLKSDGFEIDTEMYIRATRKGLKVKEVPSYEAKRLEGAGKLRSFHDGARILRTILRESVNG

SEQ ID NO: 30445 - protein, 560 aa, Dehalococcoides ethenogenes 195
MSFESFNFAPAVMAGVRACGYQEPTPIQAQAIPPILEGHDVIGLAQTGTGKTAAYALPVIQKMLSTPRGRVRTLVLAPTRELACQIAESFRSLGQRARIRECSIYGGVNMDQQIRRLRSGVDVVVACPGRLLDHIWRGTIDICGVETLIIDEADRMFDMGFQPDIQSILKCLVQPHQTLLFSATMPPEVRKLTLETQTNPVTIQIGTQAPASSVSHSVYPVKNHQKTPLLIEILKTTETKSVLIFARTKYGAENLADEISRAGFTTASLQGNLSQNRRHAVMEGFRRGNFKILVATDIAARGLDIDHISHVINYDMPDTPEDYTHRIGRTGRFDRTGQALSLVTGRDGDMVRDIQKLINSPIQRLRVDGFDYATTRNDGQNHSQRRGFAPRRGYSAEGYNRSEMPAAETSPNSLTAEMPSGNVRPFSQAVRSGRPADSAPRFRREGYSAPRFGGRPSFEDAPMAAKPVARFNARPAFRKEDDAQAAAKAYPSFGRETGVTSAENTRSVSENPEQFSSRRPARFNGKASFANRPARPGNKVGKPPFFRRSKPPVSENNPTY

SEQ ID NO: 30446 - protein, 1496 aa, Campylobacter jejuni RM1221
MDLENILENNQSIGLYHPKNEHDACGIAAVANIRGIASYKVICDALEILMNLEHRGGAGAEENSGDGAGILIQIPHDFFKTQELGFELPKKGDYAVAQMFLSPNTDAKEEAKEIFLQGLKDKKLEFLGFREVPFNPSDIGASALKAMPYFLQAFVKKPSKISAGLEFERVLYSTRRLIEKRAINVPKFYFSSFSSRTIVYKGMLLSTQLSDFYLDFKDVNMKSAIALVHSRFSTNTFPSWERAHPNRYMVHNGEINTIRGNVDSIRAREGLMQSEYFENLDEIFPIIAKPSSDSAMFDNTLEFLALNGRTLEEAFMMMVPEPWHKNENMESKKRAFYEYHSLLMEPWDGPAAIVFTDGVIMGASLDRNGFRPSRYYLTKDDMLILSSETGALKLDEKNIKAKKRLEPGKLLLVDTARGRVIADNEIKEHYANAKPYKKWLKNLVELEKQKSGVYKHQFLKEDEVLKLQKAFGWSYDELKMSVAAMAQNGKEAIAAMGVDTPLAILSKTYQPLYNYFKQLFAQVTNPPLDAIREEIVTSTRIYLGSEGNLLKPDENNAKRVKIALPVISNEELFEVKALNKFQVKEFSILYDYSKKTLEKALDELCVKIEDEVKKGVSIIILSDKGVDEKNAYIPALLAVSGVHNHLVRKNLRTHTSLIIESGEPREIHHFACLLGYGATVINPYLVYESIQKLIANKDLNLSYEKAVENFIKASSSGIVKIASKMGVSTLQSYNGSALFECLGLSSKVIDKYFTSTTSRIEGMDLEDFEKELIALHKHAFNDTHKALDSKGIHGFRSAKEEHLIDPLVIFNLQQACRNKDYKSFKKYSALVDEKQVNLRSLMEFDFSEAISIDKVESVESIVKRFRTGAMSYGSISKEAHECLAQAMNKIGAKSNSGEGGEDEERYEIKEGVDKNSAIKQVASGRFGVDLNYLSHAKEIQIKVAQGAKPGEGGQLMGFKVYPWIAKARHSTAGVTLISPPPHHDIYSIEDLAQLIYDLKHANKDAKISVKLVSENGIGTVAAGVAKAGANLILVSGYDGGTGASPRTSIPHAGIPWELGLAETHQTLILNKLRDRVRLETDGKLMNGRDLAIAALLGAEEFGFATAPLIVLGCTMMRVCHLNTCPFGIATQDTELRDRFKGKVDDVINFMYFIAEELREYMARLGFERLDDMIGRVDKLRQKSVQGKAGKLNLDKILKSLPTYNRTAVHFKDYKDNKLEKTIDYRILLPLCKNAVEKKEPIKLSLEVGNQSRTFATMLSSEILKTYGKDALDEDSIHIKAIGNAGNSFGAFLLKGIKLEIIGDSNDYLGKGLSGGKIIAKISNEATFSPEENIIAGNACLYGATKGEVYLDGIAGERFCVRNSGALAVVLGTGVHGCEYMTGGKVVVLGDVGANFAAGMSGGVVYIFGRHNEAHVNTELVDIKDLNAKDEKELKAVIEKHIAYTDSKKAKDILEKFDKKDFFKVMPRDYEKMLKMLDLCKNEKDPNLAAFLKITQK

SEQ ID NO: 30447 - protein, 291 aa, Campylobacter jejuni RM1221
MKSGFVSIIGRTNAGKSTLINSLLEEKIALVSHKQNATRRKIKAIVMHEKNQIIFIDTPGLHESGATLNQLLVQSAIKSMGDCDVILFVASVFDSTKDYENFLSLNPQVPHIIALNKVDLTDNATLLKKLSEYAKFSQHFKAIIPYSSKKKSYKKGLLDEIVKYLDEHEYFYNPEFLSASSEKELYRDFILESIYENLSDELPYSSEVLINRTKDTPNLLILEANIITDTNSHKGMLIGKEGATLKRIGKDARFKISKLAQKKVLLKLFVTVKKNWQKDEEFLKKLLNDEN

SEQ ID NO: 30448 - protein, 406 aa, Campylobacter jejuni RM1221
MKNEVKKVVLAYSGGLDTSIILKWLQDEYNCEVVTFTADIGQGEELEPARKKALSLGIKEENIFIKDLRDEFVKDYVFPMFRANAIYEGEYLLGTSIARPLIAKTQAQIALQTGADAVSHGATGKGNDQVRFELGYLAFNPDLKIIAPWREWDLNSREKLLAYAQKHGIDISKKKGKSPYSMDANLLHISYEGLVLEDPAHAPEEDMWRWSKSPKDAPNESEIIELDFQKGDLVAINGEKLSPAGLLTKLNELGCKHGIGRLDIVENRYVGMKSRGCYETPGGTILLKAHRALESITLDREAAHLKDELMPKYASLIYNGYWFSPERMMLQALIDESQIHANGRVKLELYKGNVIVIGRESSNDSLFNAAYCTFEEDEVYNQKDAAGFIKLNALRFIIAGKNGRKF

SEQ ID NO: 30449 - protein, 501 aa, Campylobacter jejuni RM1221
MMANLYLMRSRSDELNTIISTNLLKNYSKIYKNIAIYCPVIYIHRVPVLQGWLEEFNINQTVKSAYGFTFREAMEEFSKDPHNFFNVILEEYEELKRKYDFVLVNSFCEFGILDGFDLSIKLAKNLNTPIAAIINDEDKLIAQKYFDHALDGRNYVLINENFNFEEVQKLKEYDFITPHRFKYELIKQSIKNKKTVVLPESNDERILKAAEILLKSKVVDLILLGDEEKIKQDATRLSLDLSAMQIMNPLNSEYNQEFTSILYEARKSKGMSLEEAKMLVQDKTYFGTLLIHTGKADAMVSGASTTTAETIRPALQLIKTKEGISSVSGIFFMGLEDQVLAFADCAVNPSPTAEQLATSAYVSAMTAKSFGLEPRIALLSYSSGDSGKGESVDLVKEALKIAKEKYPELNIDGPMQFDCAYDPKTAAKKMPNSKIAGHANVYIFPDLNAANICYKAVQRTANALAIGPILQGLKKPVNDLSRGCLVDDIVDTVILSAIQAQ

SEQ ID NO: 30450 - protein, 396 aa, Campylobacter jejuni RM1221
MKILVLNSGSSSIKFKFFDNKIVKASGLVEKIGEQNSKVVLKNTLNNESFERELTINNHEEGLSIVNELFKESGILADLNALDGCGHRIVHGGRNLSEHCLVDDYVLKEIDRVSIFAPLHNPAHLAGIKTMIKAAPSVANAAIFDTAFHRTMPDFAYMYALPYDFYDKHNIRRYGFHGTSHAYVSSRAAKFLQKDQNELNVISAHLGNGASVCAIEKGKSMDTSMGFTPLEGLIMGTRCGDLDPAILPFVSHLKGLTIEEIDTLMNKKSGVYGICGYNDFRDIEREIEQGNDKARLALDMFCYRLVKYIGSYFAVLPKTDAIIFTGGIGENDSLVRQKVCERLAHLGIELDFELNKQRISGERMINHANSKLKVLVIPTDEELEIARITEELIGKN

SEQ ID NO: 30451 - protein, 350 aa, Campylobacter jejuni RM1221
MFIDSVKITLASGDGGKGAVSFRREKHVPLGGPDGGDGGNGGDIIFVCDNNTHTLVNFKGKRELRAQNGAGGMGRNKNGKKGENLELIVPEGTQVIDVQTNEILLDLTKEGQRELFLKGGKGGLGNTHFKHATNQRPDYAQPGIKGESRLVRLELKLIADVGLVGFPNVGKSTLISVVSNAKPEIANYEFTTLTPKLGLVDVDEYNSFVMADIPGIIEGASGGKGLGLAFLKHIERTSFLLFVLDPMRQMPLKEQFIVLRKELEKFSNELFGRKFGIMISKSDSVRLGEEFAEQIALNINELDNYLKEINNPQSFLIKVSSLEKTGLKELKFMLLEEIKTLRNNKKILTI

SEQ ID NO: 30452 - protein, 271 aa, Campylobacter jejuni RM1221
MKNNTDKFLKTSTLTKPTRTTLKAPFAWVGGKNYLAKEIIALMPEHKSYIEVFGGALSVFYQKSASKIEVINDINDELINLHLCIRNKPQSLANVLNSMIISRKIFHMLKNKEIKPRNDLERAAFYFYLISTSFGSSMGQFAMNKQRAPKRLCRDFSLHTKRLKNASIENKSFEYILKEYDYNEALFYLDPPYVGTENYYKNTGGFGLKEHELLCNLLKNIKGKFMLSYNDCELIRKLYKDFNFKELKVRYSLNNNVLKRKESKELLIMNF

SEQ ID NO: 30453 - protein, 393 aa, Campylobacter jejuni RM1221
MKVYLDNNATTMLDPNAYELMLPFLKDIYGNPNSLHQYGSATHPALREALDKLYAGLGANDLDDIVITSCATESINWVLKGVYFDHILDRERNEVIISSVEHPAVAAAAYFLKSLGVKVIELPVNEEGVSTVEDLRKVISDKTALVSVMWANNETGMIFDIKAMAELAHEFGALFHTDATQAVGKIKVNLTQVGVDFASFSAHKFHGPKGVGGLFIKKGLKLTPLLHGGEHMGGRRSGTLNVPYIVAMGEALRIANTMLDFEDSHIRRLRDKLEDQILALPDTTVVGKREHRVPNTILASIKGVEGEAMLWDLNKNGIAASTGSACASEALESNPIMEAIGAEHDLAHTALRLSLSRFNTEEEIDYAAKQIKNATQRLRAISCTYAYNPNNYK

SEQ ID NO: 30454 - protein, 126 aa, Campylobacter jejuni RM1221
MNITLLKSKIHRANVTEARLDYVGSISIDEKLLQASGILEYEKVQVVNVNNGARFETYTIATQEEGVVCLNGAAARLAEVGDKVIIMSYADFNEEEAKTFKPKVVFVDENNTATKITNYEKHGAIF

SEQ ID NO: 30455 - protein, 623 aa, Campylobacter jejuni RM1221
MSKVIGIDLGTTNSCVAVYERGESKVIPNKEGKNTTPSVVAFTDKGEVLVGDSAKRQAVTNPEKTIYSIKRIMGLMINEDAAKEAKNRLPYHITERNGACAIEIAGKIYTPQEISAKVLMKLKEDAEAFLGESVVDAVITVPAYFNDAQRKATKEAGTIAGLNVLRIINEPTSAALAYGLDKKDSEKIVVYDLGGGTFDVTVLETGDNVVEVLATGGNAFLGGDDFDNKLIDFLANEFKDETGIDLKNDVMALQRLKEAAENAKKELSSANETEINLPFITADASGPKHLVKKLTRAKFEGMIDSLVAETITKINEVVSDAGLKKDEIKEIVMVGGSTRVPLVQEEVKKAFNKDLNKSVNPDEVVAIGAAIQGAVIKGDVKDVLLLDVTPLSLGIETLGGVMTKIIEKGTTIPTKKEQVFSTAEDNQSAVTINVLQGEREFSRDNKSLGNFNLEGIPPAPRGMPQIEVTFDIDANGILTVSAKDKATGKAQEIKITGSSGLSEEEINNMVKDAELHKEEDKKRKEAVDARNAADSLAHQVEKSLSELGEKVAAADKENIQKALDDLRETLKNQNASKEEIESKMKALSEVSHKLAENMYKKDEPNTANDKKKKDDDVIDAEVE

SEQ ID NO: 30456 - protein, 389 aa, Campylobacter jejuni RM1221
MLTKRSQVLEESITLAITALANELKAKGEDIISFSAGEPDFDTPQTIKNAAISAIEKGCGKYTAVAGIPEVLKAIQTKFKKDNNLDYETNEIITNVGAKHSLFECIECLVEKDDEVIIPSPYWVSYPEMVKFAGGKPVFIEGLEENGFKITAEQLKKAITAKTKVLMLNSPSNPVGSIYSKEELTQIAKVLEGTQITVLSDEMYEKLRYDGFDFVAFASVSEDALKRTVTINGLSKCGAMPGWRFGYMASKNKALISAVKRLQGQSTSNICSITQHAAIPALNGKCDKDIEKMRQAFEKRRNLALDMLKQIPNISVYKPEGAFYLFVNIQKIEKDSMKFCQKLLEQEKVAVVPGIGFGTDGYFRLSYATSDELIEKGLERIANFIKNYK

SEQ ID NO: 30457 - protein, 309 aa, Campylobacter jejuni RM1221
MRGYKIFSGSANVEFARQVSKYLSLPLSDAGVKRFSDGEISVQIDESVRGKDVFIIQSTCAPTNDNLMELLILTDALRRSSANSITAIIPYFGYARQDRKANPRVPITAKLVANLIQAAGIDRVATIDLHAGQIQGFFDIPVDNLYGSIVFNDYIKAKHFKNAIIGSPDIGGVARARSVAKHLGLDIVIVDKRREKANESEVMNIIGDVKDKEVILVDDIIDTAGTIVKAAEALKEKGAKSVMACCTHAVLSGKAYERIASGVLDELVVTDTIPLKEQLPNIKVLSVTPVFAEVIRRVYHNESVNSLFI

SEQ ID NO: 30458 - protein, 259 aa, Campylobacter jejuni RM1221
MVFRKSLLKLAVFALGACVAFSNANAAEGKLESIKSKGQLIVGVKNDVPYYALLDQATGEIKGFEIDVAKLLAKSILGDDKKIKLVAVNAKTRGPLLDNGSVDAVIATFTITPERKRIYNFSEPYYQDAIGLLVLKEKNYKSLADMKGANIGVAQAATTKKAIGEAAKKIGIDVKFSEFPDYPSIKAALDAKRVDAFSVDKSILLGYVDDKSEILPDSFEPQSYGIVTKKDDPAFAKYVDDFVKEHKNEIDALAKKWGL

SEQ ID NO: 30459 - protein, 530 aa, Campylobacter jejuni RM1221
MNNSNNIFQQKRILLAVVISFLFFVVYDYFFIPKQPLKIEQNITQQNQQNTSINNTPNIQNTTTNTPSAALVSQDSVISKVQSKHFEAQIDSFGRISAFYLKDKKYQNEKGEFINLVSKENSPYPLEMRFSDPSINSEAFKIPYVANASNLFVDENGSQVLKLTQNLSGLKIEKDITFYPKGNYEIEVKLSKNANYFISPGYRPNIAVDSYTVHGALVMDNKETIETYKDGDVEKDESANNVVMTSAFDRYYATFFYNFDKPLNVAISKDANQNPIVFAYSDNEFKAGGYIGSKEHVILRSIDPRLEAVVEYGWFTFIAKPMFEFLNFLHQYIGNWGWAIVVMTLIVRIILFPLTYKSMISMNKLKDLAPKMKDIRERYKGDPQKMNMHMMELYKKHGANPMSGCLPILLQIPIFFAIYRVLLNAIELKAAPWAFWIHDLSVMDPYFILPILMGATMFLQQLITPMTIQDPMQAKIMKFLPVIFTFFFITFPAGLTLYWFVNNLCSLVQQWVINKIFAKEHHKKQAEHEK

SEQ ID NO: 30460 - protein, 279 aa, Campylobacter jejuni RM1221
MKKILLSVLTTFVAVVLAACGGNSDSKTLNSLDKIKQNGVVRIGVFGDKPPFGYVDEKGNNQGYDIALAKRIAKELFGDENKVQFVLVEAANRVEFLKSNKVDIILANFTQTPQRAEQVDFCLPYMKVALGVAVPKDSNITSVEDLKDKTLLLNKGTTADAYFTQNYPNIKTLKYDQNTETFAALMDKRGDALSHDNTLLFAWVKDHPDFKMGIKELGNKDVIAPAVKKGDKELKEFIDNLIIKLGQEQFFHKAYDETLKAHFGDDVKADDVVIEGGKI

SEQ ID NO: 30461 - protein, 350 aa, Campylobacter jejuni RM1221
MMVRIKVSHLIFLIASIIFIFISPYIFGDYGLNIVNQIAIFIILAVSYNLINGVTGQFSLEPNGFVAIGAYVAALVLLSADAKNDQFFLDGPSSFILAIHSNSFILALIMAGICSSLLALILAFAVFRVRGDYLAIVTLGFGIIIKIAAINFPSITNGSRGLVDIPQFSTIYWTGGIAIVAVILILNIVYSKYGRAMKAIRDDEDAASAMGINTFWIKTLAFSTSAFLEGVGGGLLACLLTTVSPTQFDFLLTFQLLIIIVLGGLGSTTGAIIGAILVIGGSEWLRFLDELNIKIDSLNLYIQSTPGLRMVVFSIVLILVMLFARKGIMGYYELSDVIRGIKKRFKRSKK

SEQ ID NO: 30462 - protein, 645 aa, Campylobacter jejuni RM1221
MNNNTQNNKGNPQGNNFFNKNPIFIFAIFAIVMIIIFKGFFDGNGSFGGALNGNEVNKNVPYSELKKLIESGQINQVSIGQTTIKAISSSHNTVYTAKKVNDPELVSLLDSKNIAYGAYSETNWFTDILFSWVLPVFIFFGIWMFLASRMQKNMGSSILGIGSSKKLVNSEKPKVKFSDVAGVEEAKEEVKEIVDFLKYPERYIKLGAKIPKGLLLVGPPGTGKTLLAKAVAGEADVPFFSVSGSSFIEMFVGVGASRVRDLFENAKKEAPAIVFIDEIDAIGKSRAASGMMGGNDEREQTLNQLLAEMDGFGTESSPVIVLAATNRPEVLDAALLRPGRFDRQVLVDKPDFKGRCDILKVHMKDVKISPKVKVEDIARLTAGLAGADLANIINEAALLAGRDSKKYVEQNDLVEAVERAIAGLEKKSRRINEKEKKIVTYHECGHALIAETTKGAKRVSKVSVIPRGLAALGYTLNTPEENKFLMQKHELIAEVDVLLGGRAAEEVFIGEISTGASNDLERATDIIKAMISMYGMSEIAGLMVLEKQRNTFLSGGQTIKDYSEKMAESLDDYVKKTLDERYKDVKDTLNTYKGAIETMVAALYEEETIEGNKVREIIKEFEDQNSLPTRLQELEEVKTEVKIEE

SEQ ID NO: 30463 - protein, 175 aa, Campylobacter jejuni RM1221
MFFMKTKALFLDRDGVINIDKKYVYKIEDFEFCDGIFELCRYFLAKKYLLFIATNQSGIARGYYKESDFFKLCDYMLKEFTKQGIKIDKIYHCPHLEGCECRKPKAGMLLKAKDEFNLDMKNSIFIGDNLSDMQAGLNANIGTLVLVNEEKKEGDFFRQFKNLKEILSFFKEKDI

SEQ ID NO: 30464 - protein, 400 aa, Campylobacter jejuni RM1221
MLIVQKYGGTSVGTLERIEAVANRVIQSVQQGDQLVVVVSAMSGVTNTLIEQAEYFSKTPNGKDMDMLLSSGERVSCALLSIALNEKGYPAISFSGRKAGIITDSVFTKARIHHIDTKAIKSELQNGKIVVIAGFQGVDEEGNVTTLGRGGSDLSAVAVAGALNADLCEIYTDVDGVYTTDPRIEPKAKKLDKISYEEMLELASLGAKVLQNRSVELAKKLNVNLVTRSSFNNNEGTMITKEDGMEQALVSGIALDKNQARVTLRNVEDKPGIAAEIFSVLANENINVDMIIQNVGVDGATNLGFTVPQNELELAKNAMQKILSSKTTIESDSAVVKVSIVGVGMKSHSGVASKAFKALADEGINIGMISTSEIKISMIVHEKYGELAVRALHECYGLDK

SEQ ID NO: 30465 - protein, 857 aa, Campylobacter jejuni RM1221
MANIQDFLTDNMLSNLESAASLAIHSKNTEVVPLHLLWALSVDSTSILNQILNKLNISKEALELEIKSRISKLATSSNVNRENIRFSNELINSLENAKGLMSANGDSYLSVDTWLISESQKSPIKEILAQFLDLREFQKELESLRAGRKMDSKTSDETLDSLNKFGIDLTLKASEGKLDPVIGREEEIERLMQILIRKTKNNPILLGEPGVGKTAIVEALAQRIIKKDVPKSLQNKKVIALDMSALIAGAKYRGEFEDRLKAVVNEVIKSENIILFIDEIHTIVGAGASEGSMDAANILKPALARGELHTIGATTLKEYRKYFEKDAALQRRFQPVNVGEPSVNEALAMLRGIKEKLEIHHNVTINDSALVAAAKLSKRYITDRFLPDKAIDLIDEAAAELKMQIESEPSSLRKVRKDIETLEVENEALKMENDEKNQKRLDEIAKELANLKEKQNALNSQFENEKSVFDGISAKKKEIDLLKNEASLAKARGEFQKAAELEYGKIPSLEKEVEILEDKWKKMSENGVLLKNQVDEDLVAGILSKWTGISVQKMLTSEKQKFLEVEKHLKESVIGQDKALSALARAIKRNKAGLNADNKPIGSFLFLGPTGVGKTQSAKALAKFLFDDEKAMIRFDMSEFMEKHSVSRLLGAPPGYIGHEEGGELTEAVRRKPYSVLLFDEVEKAHKDVFNVLLGILDDSRATDSKGVTVDFKNTIIILTSNIASSAIMNLSGKEQEDAVKNELKNFFKPEFLNRLDDIITFNPLGKDEAYEIVKLLFKDLQMSLENKGIKASLSENAALLIAKDGFDPDFGARPLRRAIYDLIEDKLSDMILADELHENDSIIIDAKDDEIIIKKA

SEQ ID NO: 30466 - protein, 315 aa, Campylobacter jejuni RM1221
MNTLEIAKEVFEKEAQAILDLAKNLDENFNQAVNLMLNTKGRCIVSGMGKSGHIGAKIAATLASTGTPSFFIHPGEALHGDLGMLTPEDVLIAISNSGETEEILKIIPAIKKRKIPLIVMCGKKNSTLVKQSDIFLNIAVEKEACPLQLAPMSSTTATLVMGDALAAALMKVRNFKPDDFALFHPGGSLGRKLLTKVKDLMVSSNLPIVHPDTEFNDLVDVMTSGKLGLCVVLENEKLVGIITDGDLRRALKTSDKPRFDFRAKEIMSTNPKVVDADAMASEAEEIMLKHKIKEIVVSKENKIIGIIQLYAIGNV

SEQ ID NO: 30467 - protein, 489 aa, Campylobacter jejuni RM1221
MEVVQINTPIAVMFVVYALLMLYIGFYFYKQNKNSEDYFLGGRTMGPVISALSAGASDMSGWLLMGLPGALYVSGFIDSYIAIGLTIGASLNWIFVAKRLRIYTSVIANSLTIPDYFETRFDDDKHILRIVCAVVILIFFTFYVSSGLVSGAKLFESTFGIRYDYALTTGTIIIVAYTFLGGYKAVCWTDMIQGLLMMIALIIVPLVMLYHLGGFGEAMNIVKEIKPQALSMGEGVGVISIISALAWGLGYFGQPHILVRFMSIRSTKDIPMATFIGIAWMAVCLLSACMIGILGIAYVHKFELSLQDPEKIFIVMSQLLFNPWIAGILLSAILAAIMSTASSQLLVSSSTIAEDFYKKIFREDAPSHIVLNLGKLGVLLVAVIAFLISTDKNSSVLSIVSYAWAGFGASFGSVMLFSLFWSRMTRVGAILGMITGAATVVLWKNFANSGLYEIVPGFLAASAVIIIASLFTNVRSGTKAAYEKMLKEL

SEQ ID NO: 30468 - protein, 140 aa, Campylobacter jejuni RM1221
MTKEQIQIIKDCVPILQKNGEDLTNEFYKIMFNDYPEVKPMFNMEKQISGEQPKALAMAILMAAKNIENLENMRNFVDKVAITHVNLGVKEEHYPIVGACLLKAIKNLLNPDEATLKAWEVAYGKIAKFYIDIEKKLYDK

SEQ ID NO: 30469 - protein, 352 aa, Campylobacter jejuni RM1221
MSQKILFIDRDGTLIEEPKSDFQIDTLEKLRFEKDAIPTLLKLKKFGFKFVMVSNQDGLGTPSFPKENFEIAHEKMLDILKSCGIEFQDIFICPHFENENCVCRKPKTAMLEEYIKHELYDKEQSFVIGDRESDMILASNLGVRGLKYGELSWKEIENEILSSFRSASYQRTTKETDIKVKVCLNGGKVSIKTGIDFFDHMLEQIAVHGGIGLEISCKGDLEIDEHHSVEDVALALGACIKKTLGDKIGIARYGFALPMDECLASCAMDFCNRPHLVYKAKFKKSHLGALSTEMIEHFFYSLSYAMGVSLHLKVKGKNDHHKAEGLFKAFAKALKMAVKIESENLASSKGVI

SEQ ID NO: 30470 - protein, 755 aa, Ehrlichia ruminantium str. Welgevonden
MGDLENNGFDAKKREALEFHCKGLKPGKVSLMPTKPLLTQRDLSLAYSPGVAVPCLEIAENPDLVYKYTARGNYVAVISNGTAVLGLGNIGPLASKPVMEGKAVLFKRFADIDAIDLEVDTSDVDEFVNAIKYLGLSWGGINLEDIRAPECFIIEEKLSKIMDIPVFHDDQHGTAIIVSAGLINALDITGKNIKDIKIVVNGAGAAGIACLEMIKLIGVPAENITLCDQNGVIYKDRQLGMNEWKAKHAIDTKNRSLKDALVMADVFLGLSVKDVLSENMLLSMNKDPIIFALANPDPEINPDIARKIRPDAIIATGRSDYNNQINNVMGFPYIFRGALDVQARCVNSAMKVAAANAIAMLAREYVSDEVSDAYGGRKMNYGKDYIIPTPFDPRLITVVAPAVAKSAIESGVARRNIENWDEYVKQLESRLSSTSNVLNMMYSSVKRDPKKVIFSEGEEEKIIQAAVQWRNQGYGVPILVGRIDKVHEGFERLGIKDMKGIEIANAAISENNNKYTDYLYKQLQREGYLYRSCVRDVKTDRNVFAACMLACGDGDILITGLTRGYTVSIHDVQKVIKPKGVMFGLSIIVMKERTIFIADTAIHESPTPEQVAEIAIQASMQARKMGHEPRVAFISSSNFGSHSQKDARRMRKAIEILDNCNVNFEYDGEMSIDVALNPELLTLYPFCRLTSSANVLIMPTLHSASISSKLLREATGVPVIGPILVGMEKPVQIVQMSSSVSEILNLTVLAPSINN

SEQ ID NO: 30471 - protein, 575 aa, Ehrlichia ruminantium str. Welgevonden
MLEIRNLVFAVVLSVLIMMGWRLVYEKFFTVQHVVEDEDSSSMIPEIDNVLTYRSRNEIIDSTQNLRVKLSNKEINGSISLKGAQLDDLVFKNYHITPDSSSDGIILLSPENTEGVYFIEFGWIDPQHKIVVPNQLSTWTSDKSVLSPNNTVTLTWDNQQGVIFQIKVTLDDYYMFKIEQIIINNTDNVVNLIPYGRINRARHTTEKSYWISHEGAVGSFGYTLKEWTYKNIIKERNIKISQQNTDDNQWVGIADKYWFTALIPNILQKKSKLSFHVKHGKYNNEDRFQVDFSHDSYSAYPNKTASSTSYLFAGAKELKLLDKYKKDLNISLFDKAVDFGILYFITKPVFLLLEYFYDLIGNFGLAILLLTIVIKLIMFPLSYKSYVSMFKLKYLQPEILKIKELYKNDNTKMSKEVSLLFKKNDVSPMSGFIPILIQIPVFFALYKVLFVTIEMRHAPFYLWVKDLSNFDTANVLTLFGLLNFNPPICIGILPVILGITMIIQQKMNTSTHSSQDQDKIQASFIKFLPYVFIFIFSSFPTGLIIYWICSNSITIIQQLIIKAYIGRKFNLKHDL

SEQ ID NO: 30472 - protein, 399 aa, Ehrlichia ruminantium str. Welgevonden
MSFLSKRMECIKPSPTLEIASQAQKLKMLGRDIISLSAGEPDFDTPEHIKQAAINALNLGKTKYTAVDGIIELKKAIISRLKQDHNLIYDVSQISVGNGAKQCIYNLFMSTLNDGDEVIIPAPYWVSYPDIVKIAGGNPVIIDCSSTSKLSAELLENAITDKTKWLILNSPNNPSGLVYTYDELKDIAQVLLKYSNVHIMTDDIYSKIVYDDLKFFTIAQVEEDLYSRVFLVNGVSKAYAMTGWRIGYIAGASEVIKAISVIQSQSTTNPNSIAQFAAVEALTGDQKFLEERNKVFIERRDIMLDMINNTPLLSAEKPQGAFYVFISCKELIGRTTKSGFCITSAMDFTKYLLEDYNIAVVPGEAFGVQGFFRVSYATSTQCVSEACDRILTACNELIY

SEQ ID NO: 30473 - protein, 394 aa, Ehrlichia ruminantium str. Welgevonden
MKKIVLAYSGGLDTSVILKWLQENYNCEVVVFTADIGQEDDMSVIQKKAAALNVKEIFIEDLKEEFVRDFVFPMFRANTIYEGYYLLGTSIARPLIAKRQIEIAHLTGADAVAHGATGKGNDQVRFEFGYYCCDPNIKVIAPWRQWELTSRHSLIEYARKNNINVPLDKVNEPPYSIDANLLHISYEGKSLEDPYVEPDYTMLSRSLTPELASSIPEYIEITFEQGDPIAINDISLSPANLLHQLNKIGGKHGIGIVDIVENRYIGIKSRGIYETPGGTILLHAHRAIESITLDRESAHLKDEIMPKYAKLIYNGYWWTTERKMLQSLIDKSQEKVNGTVRIKLYKGSVIVVGRKSNNSLYSYNLASFDSESQGYDHKDAEGFIKVNSLRLKKS

SEQ ID NO: 30474 - protein, 522 aa, Ehrlichia ruminantium str. Welgevonden
MLITARLRYAIMFMVKLAHGLCTQQNKLQPVRMSYIASNQSLSEGYLEQVIVQLKKKGLINATKGPGGGYSLSIAPHLITLSLILESIGENIKITRCENNSPGCLSNNNRCVTHKLWDDIGNYIKDYLNNISLEDIVNNNFKSNIALHKDDKPYIYADYNSTSTILPEVKYQLNNLSYIKLYNPSSIHKLGQKTRSIIEEARNIAIKQLNAQYYDVVFTSSGTEANNLVINSTSDYKHLISSTEHLSIIKCATNAELIPVDSNGIICLNALSSLLHKFKDDKILVSVMTANNETGAIQPIKKIVELSHKFGALVHTDAIQACGKIHIDIEDLGVDLLTISSHKLGSIAGAGVLFFNSKKIKIKPMIIGGHQEKGLRAGTENVLAIYLLSISLSNLYKSITKMLLVEKLRNKLENEILSLVPDAQIFSRNVERLPNTSCISMPNVNSEIQVISFDIKNIAVGNGSACSTGVVEPSHVLSAMGVNQEIANNSIRISLSPDTTDEHIRTIVNCWYEIYTHNQVHK

SEQ ID NO: 30475 - protein, 413 aa, Ehrlichia ruminantium str. Welgevonden
MEKIKDIQRHINLPIFLDYQSTTKTDSRVLDAMIPYFQEFSNPHSRSHCFGWKAESAVELARERIASLINAESKEVIFTSGATESNNLAIKGVANFYKSKGNHIITVRTEHKCVLDSCRHLETEGFDVTYLDVQKNGILDLNLLKSAITDKTILVSVMMVNNEIGVIQPIEEIGKICHNHGVFFHTDAAQAFGKIPIDVNKMNIDLLSISGHKIYAPMGIGALYVRKRQPRIRLTPIINGGGQERGMRSGTIPTPLAVGLGEAAYIAQEVMEDEAIRIKELRDILYSEIKKHLPYVILNGDYEQRIAGNLNLSFPYVEGESIIMAINNLAVSSGSACTSASLEPSYVLRALNIDKDLEHSSIRFGIGRFTTKAEILYAADLIVNSIKRLREMSPLWEMVQEGINLNEIKWDVH

SEQ ID NO: 30476 - protein, 220 aa, Ehrlichia ruminantium str. Welgevonden
MKIFLDTIDISFLEEFCISGLIDGVTTNPSLFSKSELKCSDLIFKLCSLIKGPVSIEVISTSYKDMISEALEISKIAENVVIKLPLTYDGLIACRILSNEHNLKVNVTLCFSPAQAILAAKSGAYFISPFVGRLDDIGQIGMELIKDIREIYSKYHSFNTQILVASIRHPMHVVQAAKIGADIVTISPSIFKQMFVHPLTNKGLEDFLRNWSESGKKMFS

SEQ ID NO: 30477 - protein, 102 aa, Ehrlichia ruminantium str. Welgevonden
MFAIIETGGKQYKVKEHDIIRIEKLNASVGEEVTLSKVIALTGVNNEVIFTQNASVTASVLEQCRNDKVIIFKKKRRKNYRRKNGHRQYMTVLRITKINNME

SEQ ID NO: 30478 - protein, 340 aa, Ehrlichia ruminantium str. Welgevonden
MSFIDEAKVYLKAGKGGDGCSSFRREKFIEFGGPDGGNGGNGGSIIFIASHHVNTLIYFKYKQHIKAENGHPGLSKNKFGLSGRDITIEVPIGTQIYDEEGTLITDLNSENQKFIAAQGGKGGIGNSRYKTSTNRAPRYFTLGEQGEEKWIILKLKIISDVGIIGLPNAGKSSFLASCTNSKTKIANYPFTTLEPELGVAFINNTELVLADIPGLISGAHLGYGIGDKFLKHIERCSILLHIIDCTLEDIIDSYKCIRKELSLYSKALTEKTEFILLNKCDLLDKEEIAIKKRLLAEHTKKEIFTSSIKKSKQHILSILIKHINKDCSINKPFIYDPFNT

SEQ ID NO: 30479 - protein, 296 aa, Ehrlichia ruminantium str. Welgevonden
MNHVGRKCSMSAIVGATNAGKSTLVNVLVGQKVAAVTPKVQTTRVRMHAVSNHENVQLIFIDTPGIFSPKTKLEKFLVKHAWMSLKGIENVIVLVDVKNYLNQHLKKIIDRIKHSNLNAILVLNKIDIVHQSIVSEVIEYMYSLYKFSKAFTISALYGIGIDKLVDYLCETSPYGPWLYNDDQISDAPLKFFMAEITREKLFITLRHELPYSLSVVTELVEEKEDNSLIIKQVIYVTKGSHKTIILGKKGEMVKKISMESKSDLENILQVKVHLFLFVKVREFWQNHLNECVGYAE

SEQ ID NO: 30480 - protein, 645 aa, Ehrlichia ruminantium str. Welgevonden
MILCRGLFMAVIGIDLGTTNSCVAVMEGGDAKAIENSEGARTTPSIVAFTDSEVLVGDPAKRQATTNAKNTIYASKRLIGRRYQDTRDIKTSYDIVSAKNGDAWIKVRDKDYSPSQIGALILEKMKETAERHLGCKVEKAVITVPAYFDDAQRQATKDAGRIAGLDVIRIINEPTAAALAYGLNKSDKQKVIAVYDLGGGTFDVSILEIADGVFEVKSTNGDTMLGGEDFDHAIMEYLMDDFKKSTGIDLHSDAMAMQRIKEAAEKAKIELSSRMETDINLPFLSSDSTGPKHLSLKLTRATFENLVSDLVKRTIEPCKKALKDAGISADKIDEVVLVGGMTRVPKIIQTVKEFFGKEPHKGVNPDEVVAIGAAIQGGILAGDVRDVLLLDVTPLSLGIETLGGVFTPLIERNTTIPTKKSQVFSTAEDGQTAVTIKVFQGERKMANDNKLLGQFSLEGIPPAPRGMPQIEVTFDIDANGIVHVSAKDKASGKEQAIRIQSSGGLTDDEIQNMIKEAESKAEEDEKRKKFVEVKNNAENLVHSTEKSLKEHGDKISNADKLDIENAIRDLKDCISKDNIEDTDTMQNKLDHLMKVSMKLGEALYSNTNNATAGDNNTTDTGSSSNSDGSKVVDSDYQEIDKKDGK

SEQ ID NO: 30481 - protein, 859 aa, Ehrlichia ruminantium str. Welgevonden
MDLNKFTDISKNFIVQAQTSAVALGHQSLVPEHLLKVMLDDKDEIVEVLLTSCGCNVETLRNDVISALNKLPVVSGPGSGHIHLSKEMAQVLQEAVNLAKRHQDSYVTVERLLQALTIIKDSNVSRILIAHGVTPQKLESLIVNMRNGARADSVNSEQKFNALKKYAKDVTEVARAGKLDPVIGRDEEIRRTIQVLLRRTKNNPVLIGEPGVGKTAIIEGLAHKIVKGDVPIGLRDMRIMSLDLGMLVAGTKYRGEFEERLKAVVNEIVSSNGSIILFIDELHTLVGAGATDGAMDASNLLKPALARGEIHCIGATTLDEYRKHIEKDVALARRFQTIFISEPTCDDTISMLRGLKERYEGHHGIDIPDRSIIAAVALSQRYITDRYLPDKAIDLIDEAASRARMEIDSKPEVIDKLDRKIMQLKIEIGVLEKESDESSKQRLMKLKDELEKLNVQSAELSSKWQAEKMKMSKMKACKEKLDIARSDLERAQRSGDLAKAGELMYGVIPEIEKELKEHEKFTSSLFKKEITEHDIASIVSKWTGIPIENIMSSEREKLLRMEEEIGKTVIGQDSAVKAVSDAVRRSRAGVQDAQKPLGSFLFLGPTGVGKTELVKTLAEFLFCDKSALLRFDMSEFMEKHAVSRLIGAPPGYVGYDQGGALTEAVRRRPYQVILFDEIEKAHGDIFNILLQVLDEGRLTDNHGKLVDFRNTILVLTSNLGQEILMNNESGNINEESVKESVTNVLRSHFRPEFLNRLDEIIIFHRLTKEHIERIIDVQFSILQKIVAQRKLEITLSSDAKTWLINNGYDPLYGARPLKRLIQQQIQNNLAKLILANQVAEGNKLRVDLLDDNLVIHKIS

SEQ ID NO: 30482 - protein, 583 aa, Ehrlichia ruminantium str. Welgevonden
MKILFQFVKPYLLYFIFAYLVVAVSSVTILAFGYGLHNLVDSWVTTSSVTSINNALLFLLIVVLIVGVTSFLRMWLTGYGSERVITGIRLNLYNRIIHFSPRFFENNSISSLVTRLMADTSALQVILSASMSTILRNATTLLGSIVMLVHTNFKLTTYTVVVIPVILVILTSLGKKVKLLSQKVRLKTDEITSFVEETYRGISVIQSFSKENTTKQKFSNLLGVSLNITNKYIILRALLVTLIITSAMTSIGLVLSLGIKEVLNNNITVGSLFSFIFYAAIAAGSVNNMGDNLHDIQKAVRISEDISKVLLMPLDIHEIENPKIVDELKDAILINNVTFSYPSKPNDPALKGVSFSIDKGQVVALVGPSGSGKSTITNILLRFYDITAGDVTIDGINIKDLSLSSLRSLFSVVPQNPVMFSGTILENITYGVSDATYEDVKNAAKTACILDFIESLPNKFSTFVGERGLCLSEGQKQRIAIARAVLKKDSGVLILDEATSSLDSKNEQLIHDALDNLKNNKTMLIIAHRLSTIVKADKIVVFNNGCIDDIGTHKSLIAKQDGLYSKLAKLQLSNENFSDGSSN

SEQ ID NO: 30483 - protein, 110 aa, Ehrlichia ruminantium str. Welgevonden
MTNNIMDRIKHDIETNDVVLYMKGDANMPQCGFSSVVVTILKKMNISFKSINVLEDQELREAIKEFTNWPTIPQLYVKGEFIGGCDIVKEMYHTGELQELFVKNNLITAN

SEQ ID NO: 30484 - protein, 415 aa, Ehrlichia ruminantium str. Welgevonden
MTKILVKKFGGTSLQNIKCINQVTEIIKQDVCSNHKVVVIVSAMGKFTDNIISQIKEISDVKSYNELSEYDLIISSGEQISCGMLSLALQKLGIKAQSWLGWQLPIVTTDDHTKARIMEINTSALQDFLVNNDVAIIAGFQGMHKENRVTTLGRGGSDTSAVAIAAALGIDLCYIYTDVDGIYTSDPNIVPKARKLDYIAYDEMIEMASLGAKVLQVRSVELAMKYNIKLHVLSTFNSIKGTILCKKGEIEMESQLITGITYNSNTASITLKKVRALFGITTLFSIIADNGINVDMIIQNMDNNANDITFTIPEEDLSITETLLIKIKDKLMYEELIINPDVAKVSVIGVGMISHPGIAYKMFDTLTSNNITILAVTTSEIKISVLVLRKDGQLATQYLHSSFKLDSQSNLHTTS

SEQ ID NO: 30485 - protein, 318 aa, Ehrlichia ruminantium str. Welgevonden
MLISAGIHSTDLAKRISELTCIKLVKSYTSNFADQELNVEVEEIQSNKNKHIIIIHTIGFPVHDNLIELLLLIDALKRALSPNRITLIVPYCCYTRQDRVMYRNLNNINIVSALSAKVIANILKTINVNNMIFIDLHSNQLAGFFDTEITNLNPNSIFIDAIIEKFTMENLVIVSPDHGALNRTRTFAYTLAKQYNLKHEIQVAVIDKYRTKPGVSEVMNIIGNVENKECIIIDDIVDSGGTLCNAASALKNNGALQVSAYITHGVLSNNAIAKITNSQLNTLTITDTVNHCSINTPKIKVLSIDKFLSDYILHNLTN

SEQ ID NO: 30486 - protein, 341 aa, Aegilops tauschii
MERYEVIKDIGSGNFGVAKLVRDVRTKELFAVKFIERGHKIDENVQREIMNHRSLRHPNIVRFKEVVLTPTHLAIVMEYAAGGELFERICGSGKFNENEARFFFQQLLSGVSYCHSMQICHRDLKLENTLLDGSEAPRLKICDFGYSKSSVLHSQPKSTVGTPAYIAPEVLSRREYDGKVADVWSCGITLYVMLVGAYPFEDPDEPKNFRKTITRILSVQYSVPDYVRISMECRHLLSRIFVANPEQRITIQEIKNHPWFLKNLPIEMTDEYQMSLHMVGVNAPPQTLEEIMAIIQEARIPGDGSKFAGQLSVPGLGSMELDDIDDVDVDVEDSGDFVCAL

SEQ ID NO: 30487 - protein, 316 aa, Campylobacter upsaliensis RM3195
MKETLKIAKEVFEIEAEAIRNLSENLDHNFSKAIELILDIKGRCIISGMGKSGHIGAKIAATLASTGTPSFFIHPGEALHGDLGMITSEDVLIAISNSGETEELLKIIPAVKRRQIPLIAMSGNIKSTLAKQAEIFLNIAIKKEACPLQLAPMSSTTATLVMGDAIAAALMKARKFQPDDFALFHPGGSLGRKLLTKVKDLMVSKKLPIVNPQTEFNELVNVMTSGKLGLCIVLENDKLVGIITDGDLRRALKANAKPRFDFKAKEIMSHNPKIIDQEAMATEAEQLMLKHKIKEIVVGKNGRVVGIIQLYAIGNV

SEQ ID NO: 30488 - protein, 172 aa, Campylobacter upsaliensis RM3195
MKKALFLDRDGVINVDKKYVHKIEDFEFCDGIFKLCRIFTQKNYLIFVITNQSGIARGYYDEKDFATLSAFMCEEFAKKGILINKIYHCPHLEGCECRKPKPGMFLKAYEEFDIDRENSFFIGDNLTDMQAGLKAGLKKLYLINSTQKGDFYQNYTNLNALLKDIEKGEICV

SEQ ID NO: 30489 - protein, 390 aa, Campylobacter upsaliensis RM3195
MLSKKSQVLEESITLAITALANELKAKGEDVLSFSAGEPDFDTPQTIKNAAIKAIENGCSKYTPVAGIKDVLNAVATKLKRDNDLSYETSEIITNVGAKHSLFQCLECLVDEGDEVIIPSPYWVSYPEMVKFAGGKCVFVDTKEENGFKITADELKGALSEKTKVFILNTPSNPVGCVYTKEELRALAKVLEGTRVVVLSDEMYEKLCYDGVKFHAFASVSEDAMKRTVTINGLSKCGAMPGWRFGYMASKIKGLVPAVKKLQGQSTSNICSISQHAAIPALLGECDEDIEMMRKAFERRRNVALEMLSKMENVSIYKPSGAFYLFINISKLEKDSMKFCQKLLEEKKVAVVPGIGFGMDGYLRLSYATSEENIIKGLERFGEFVENYKA

SEQ ID NO: 30490 - protein, 400 aa, Campylobacter upsaliensis RM3195
MLIVQKYGGTSVGDLERIRAVALRVIESVKAGNELVVVVSAMSGVTNSLIEQAEYFSKNPNGADMDMLLSSGERVTSALLSIALNELGYRAVSFSGRKAGIITNSVFTKARIKHIDTSAIKAALKEGKIVIIAGFQGVDEEGNVTTLGRGGSDLSAVAVAGALSADLCEIYTDVDGVYTTDPRIEPKAKKLDKISYEEMLELASLGAKVLQNRSVELAKKLNVNLVTRSSFNNNEGTMITKEDGIEQALVSGIALDKNQARITLRNIEDKPGIAAEIFSSLARANINVDMIIQNVGTNGATNLGFTVPENELDQAKNTMKEVLGDQVSLESDSAVVKVSVVGVGMKSHSGVASMAFKALADEGINIGMISTSEIKISMIVHEKYGELAVRALHEVYGLDK

SEQ ID NO: 30491 - protein, 126 aa, Campylobacter upsaliensis RM3195
MQITMLKSKIHRATVSEARLDYVGSISIDEELLKASGLYEYEKVQVVNVNNGARFETYTIATKEKGAICLNGAAARQVQVGDKIIIMAYANLEEKELKEHKPKVVFVDDENAITKISHYETHGELF

SEQ ID NO: 30492 - protein, 620 aa, Campylobacter upsaliensis RM3195
MAKVIGIDLGTTNSCVAVYERGESKVIPNKEGKNTTPSVVAFTDKGEILVGDSAKRQAVTNPEKTIYSIKRIMGLMINEDAAKEAKNRLPYHITERNGACAVEIAGKIYTPQEISAKVLMKLKEDAEAFLGESVVDAVITVPAYFNDAQRKATKEAGTIAGLNVLRIINEPTSAALAYGLDKKDSEKIVVYDLGGGTFDVTVLETGDNVVEVLATGGNAFLGGDDFDNKLIDFLAEEFKSETGIDLKNDVMALQRLKEAAENAKKELSSANETEINLPFITADASGPKHLVKKITRAKFESMIEKLVSETITKINEVVSDAGLKKDEIKEIVMVGGSTRVPLVQEEVKKAFNKDLNKSVNPDEVVAIGAAIQGAVIKGDVKDVLLLDVTPLSLGIETLGGVMTKIIEKGTTIPTKKEQVFSTAEDNQNAVTINVLQGEREFSRDNKSLGNFNLEGIPPAPRGMPQIEVTFDIDANGILTVSAKDKATGKAQEIKITGSSGLSEEEINNMVKDAELHKEEDKKRKEAVEMRNQADSLAHQVEKSLNELGEKVAEDDKANIQKALDDLRETLKNENASKEEIEAKMKTLSEVSHKLAETMYKKDEANDKKKKDDDVIDAEVE

SEQ ID NO: 30493 - protein, 257 aa, Campylobacter upsaliensis RM3195
MVLRNSLLKLAALALGAALAFTSANAGKLEDIKAKGTLVVGVKNDVPHYALLDQKTGEIKGFEVDVAKKLAKEILGDENKIKLVAVNAKTRGPLLDNGTLDVVIATFTITPERKKIYNFSQPYYQDAIGLLVLKEKGYKSLADMKGAKIGVAQAATTKRVIGEAAKKAGVSVSFSEFPDYPSIKAALDAKRVDVFSVDKSILLGYVDEKSEILPDSFEPQDYGIVSKKDDVEFAAFIDKFVGQNKAQIDDLAKKWGL

SEQ ID NO: 30494 - protein, 309 aa, Campylobacter upsaliensis RM3195
MRGYKIFSGSANLEFAKQISKYLSLPLSDAGVKRFSDGEISVQIDESVRGKDVFIIQSTCAPANDNLMELLILTDALRRSSANSITAIIPYFGYARQDRKANPRVPISAKLVADLIEAAGIDRVATIDLHAGQIQGFFNIPVDNLYGSIVFNDYIKSKHFKNAVVGSPDIGGIARARSVAKKLGLDIIIVDKRRERANESEVMNIIGDVNGKDVVLVDDIIDTAGTIVKAAKALKEKGANSVMACCTHAVLSGEAYERIAKGDLDELVITDTIPLKKEHEKIKVLSVAPIFAEVIRRVYHNESVNSLFI

SEQ ID NO: 30495 - protein, 256 aa, Campylobacter upsaliensis RM3195
MILELKKISKSFGGVKAINETSFSVSEGEIFALIGPNGAGKTTLFNIITGNYKPTSGEVLFKGQRIDTLKPHKIVHCGIARTFQNIRLFSSMNVLENVLIGFNNQMKYSILEAFLHLGRFSRVEGEFKDRAYTLLKELELDNVAYHKATSLSYGQQRKVEIARAMATNPSLLLLDEPAAGMNGAESGALAELIFRLRRDYKMGVLLIEHDMKFVNKLCDRVLVLDYGRTIFEGKLSDAINHKEVIAAYLGDFDADC

SEQ ID NO: 30496 - protein, 350 aa, Campylobacter upsaliensis RM3195
MMSRAKISHLIFLFLALAFIFISPKIFSDYGMSIVNQIAIFIILAVSYNLINGVTGQFSLEPNGFVAVGAYVAALVLLSAEAKEEQFFYDGINPFILALHFPSFIVALLAAGLCACLLSFILSFAVFRVRGDYLAIVTLGFGIIIKLLALSFPTFTNGSRGINEIPAYSNIYWTGGIAIIAVMLILNIVYSKYGRAMKAIRDDEDAASAMGINTFWIKTLAFGTSAFLEGVGGGLLACLLTTVSPEQFDFLLTFQLLIIIVLGGLGSTTGAILGSILVIGGAEWLRFLDEFKIQMDLFGAEIQTGHGLRMVVFSLILILVMLFARRGIMGDKELVEIFKAFQKHFRGSEK

SEQ ID NO: 30497 - protein, 537 aa, Campylobacter upsaliensis RM3195
MNHSNNNNIFQQKRILLAVVLSFIFFVAYDYFFLPKPNLNEQNITQNNTTKTQNLEANAAPKLQEDLAKSVETNGALSSVKSGVLASVESPHFKAEIDTLGRISSFYLKDKKYLNEDKNQINLIAKDQNPRPLELRFSNSSINEEAFKTDYKTSTNELFLDINESKKLILTQNLSNLKVEKIITFDPRGNYEIEVRLNQNAPFFITPGFRPSIAVDSYTVHGALVLDSENTTHTFEDGDMDMEERIDKAFIASAFDRYYASFFYNFDKPLNLTISKDTNDNPILFAYADREFKAGGYIGAKEHEALRAIDKRLEDVVEFGWFTFIAKPMYVGLDFLFKHIGNWGWAIVVLTLIVRVILFPLTYKSMISMNKLKDLAPKMKEIRERYKGDPQKMNMHMMELYKKHGANPMSGCLPILLQIPIFFAIYRVLFNAIELKDAPWIFWIQDLSAMDPYFILPILMGATMFLQQLITPMTIQDPLQAKIMKFLPVIFTIFFITFPAGLTLYWFINNLCSLLQQWIINKMFEKEHHKRESEKAK

SEQ ID NO: 30498 - protein, 291 aa, Campylobacter upsaliensis RM3195
MKSGFISLIGRTNAGKSTLINSLLEEKIALVSHKQNATRRKIKAIVMQDDNQLIFIDTPGLHESKATLNQLLVQSALKAMKDCDVIVFVASIFDEISDYEKFLTLKSQIPHLVVLNKVDLAKNEEVLQKLSEYAKFSGDFQAILPYSCKQKSYKKAFLDEIVKLLPSHTHFYDSEFLTPSSEKELFRDFILESLYENLSEELPYCSEILMQSVKEKPHLLIIHAQIITDTNSHKAMIIGKEGATLRRIGQKARIKIENLTQKKVLLKLFVVIKKAWQKDENFLKKMLEYEE

SEQ ID NO: 30499 - protein, 352 aa, Campylobacter upsaliensis RM3195
MSEKILFIDRDGTLIKEPKEDFQVDSLEKLAFEKGAIPALLKLQKFGFKFVMISNQDGLGTTSFPKEDFEKAHFKMLEILQGCGIEFKDIFICPHFEKENCACRKPKAALLKDYIKYHLYDKGQSFVIGDRQSDMDLALNLGLSGLRYGELSWEEITEQILNSFRYASVKRKTKETDISVKVALNGGEVSVKSGVAFLDHMIEQIAVHSGIGLELSCRGDLEIDEHHSVEDIALALGEALKRALGDKIGIARYGFVLPMDESLASCALDFSNRPFLKFKAKFKKKKLGTLSTEMIEHFFYSLSYALGVSLHLKVKGKNDHHKCEALFKAFAKALKQAIKIESENLASSKGML

SEQ ID NO: 30500 - protein, 394 aa, Campylobacter upsaliensis RM3195
MKILVLNSGSSSIKFKLFDNKIVLASGLVEKIGNNQSKIELKNAKTGTKMRRDTHIGNHEKGLRLVEELFNESGILRDLNKLDGCGHRIVHGGKNLTEHCLVNDFVLEEINRVSAIAPLHNPAHLAGIKTMLKTAPKVPNATIFDTAFHKSMPDYAYMYALPYDYYTEYNIRKYGFHGTSHSYVSSRAAILMQKENINAISAHLGNGASVCAIKNGKSIDTSMGFTPLEGLMMGTRCGDIDPATLPFIAKAKNLNADELDTMMNKQSGLYGVCGYNDFRDVASEIQNGNNLARLALDMYCYRLAKYIGSYFAILPHTDTLIFTAGVGENAKIVRQKTCERLKHLGFELDDSLNENDKDGEREISKANSKVKIFVIPTDEELEIAKITEELIKKA

SEQ ID NO: 30501 - protein, 500 aa, Campylobacter upsaliensis RM3195
MANLYLMRSKSDDLNTLITKKLLANYTKHYKNVAIYCPVIYVHRIAAVQEWLEEFNIKQSSKESYGFTLRDAMNTFSHDSHYFFNKILEEYENLKAKYDFVLVTSFSEFGILDGFELSVKLAKNLNTPIAAIIDQKDQNIAKKIFDESLKGEKYALIDANFDFNELINLKEYEFITPNRFKFELIKKSVKNKKIVVLPESDDERILRASEILLRSNVVHLILLGNETKIKEDALKLGLDLNGIEVLDPANSPLCEEFSAMLYEARKAKGMSLEEAAKLVKDRTYFGTLLVHSQKADAMVSGASTTTAETIRPALQIIKTKEGINSVSGIFFMGLEDKVLAFADCAVNPNPTAEQLAQSAYVSALSARAFGLEPRIAMLSYSSGDSGKGESVDLVNEALKIAKEKYPDLQIDGPMQFDCAYDSKTAAKKMPNSTIAGKANVYIFPNLDAANICYKAVQRTANALAIGPILQGLKKPVNDLSRGCLVEDIVDTVILSAIQAQ

SEQ ID NO: 30502 - protein, 406 aa, Campylobacter upsaliensis RM3195
MKDKVKKAVLAYSGGLDTSIILKWLQDEYGCEVVTFTADIGQGEELEPARLKALSLGIKEENIFIKDLKDEFVKDYVFPMFRANAIYEGEYLLGTSIARPLIAKTQAQIALQTGADAVSHGATGKGNDQVRFELGYLAFNPDLKIIAPWREWDLNSREKLLAYAAKHGIDISKKKGKSPYSMDANLLHISYEGLILEDPAARAEDDMWRMTKSPKEAPNESQIVELEFKQGDLVAVNGEFLTPAELLAKLNELGSKHGIGRLDIVENRFVGMKSRGCYETPGGTILLKAHRAIESITLDREAAHLKDELMPKYAHLIYNGFWFSPERLMLQALIDESQKFVNGKVRLELYKGSVMVVGRESANDSLFNAAFCTFEEDEVYNQKDAEGFIKLNALRFIIAGKNGRKF

SEQ ID NO: 30503 - protein, 1130 aa, Triticum aestivum
MSSSRAASSSSSRNRQSTQERVLAQTTLDAELNAEFEESSDSFDYSKLVEAQRDTPTVLQEGRSEKVIAYLQHIQRGKMIQSFGCLLALDEKSFNVIAFSENAPEMLTTVSHAVPSVDDPPRLDIGTNVRSLFTDQGAAALHKALGFADVSLLNPILVQCKTSGKPFYAIVHRATGCLVVDFEPVNPTEFPATAAGALQSYKLAAKAISKIQALPGGSMELLCNTVVKEVFDLTGYDRVMAYKFHEDNHGEVFAEITKPGLEPYLGLHYPATDIPQAARFLFMKNKVRLICDVRARPIKVIEDEALPFDISLCGSALRAAHSCHLQYMENMNSIASLVMAVVVNENEEDDEVGSEQPAQQQKKKILWGLIVCHHESPRYVPFPLRYACEFLAQVFAVHVNKEFEVQKQLREKSILRMQTILSDMLFKEASPLTIVSGAPNIMDLIKCDGAALLYGGKVWRLGTAPTESQIRDLALWLSEVHMDSTGLSTESLHDAGYPGASALGDTVCGMAVAKINSSDILFWFRSPTAKEIRWGGAKNDPSDMDDSRRMHPRLSFKAFLEVVKMKSLAWTDSEMDAIHSLQLILRGAVDGVVKPTGKASLDEQIGDLKLDGLAELQAVTSEMVRLMETATVPILAVDGNGLVNGWNQKAAELTGLRVDDAIGRHILTLVEESSVSVVQRMLYLALQGKEEKEVRFEVKTHGPKRDDGPVILVVNACASRDLHDDVVGVCFVAQDMTVHKLVMDKFTRVEGDYMAIIHNPNPLIPPIFGADESGWCCEWNAAMTKLTGWHREEVLDKMLLGEVFDSRNASCLLKNKDAFVSLCVVINSALAGEETEKAPFGFFDRSGKYTECLLSVNRRQNEGGLITGVFCFIHIPSHELQQALQVQQASEQKSLKRLKAFSYMRHAINNPLSGMLYSRKALKNTDLNEEQMRQIHVADNCHHQLNKILADLDQHNIMEKSSCLDLEMAEFVLQDVVVAAVSQVLIACQGKGIRVSCNLPERFMKQLVYGDGVRLQQILSDFLSISVKFSPVGSSVEISAKATKNSIGENLHLIDLELRIKHQGLGVPAELMAQMFEEDEPQQSEEGLGLLVSRNLLRLMNGDVRHLREAGVSIFILTAELACAPTAMEH

SEQ ID NO: 30504 - protein, 807 aa, Triticum aestivum
FGCLLALDEKSFNVIAFSENAPEMLTTVSHAVPSVNDPPRLDIGTNVRSLFTDQGATALHKALGFADVSLLNPILVQCKTSGKPFYAIVHRATGCLVVDFEPVNPTEFPASAAGALQSYKLAAKAISKIQALPGGSIELLCNTVVKEVFELTGYDRVMAYKFHEDNHGEVFAEITKPGLEPYLGLHYPATDIPQAARFLFMKNKVRMICDVRSRSIKVIEDEALPFDISLCGSALRAAHSCHLQYMENMNSIASLVMAVVVNENEEDDEVGSEQPAQQQQKKILWGLVVCHHESPRYVPFPLRYACEFLAQVFAVHVNKEFEVQKQLREKSILRTQTILSDMLFKEASPLTIVSGAPNIMDLIKCDGAALLYGDKVWRLGNAPTESQIRDLALWLSEVHMDSTGLSTESLHDAGYPGASALGDSVCGMAVAKINSSDILFWFRSHTAQEIRWGGAKNDPSDQDDSRRMHPRLSFKAFLEVVKMKSLAWTDSEMDAIHSLQLILRGTVDGVVKPTGKASLDEQIGDLKLDGLAELQAVTSEMVRLMETATVPILAVDGNGLVNGWNQKAAELTGLRVDDAIGRHILTLVEESSVSVVQRMLYLALQGKEEKEVRFEVKTHGPKRDDGPVILVVNACASRDLHDDVVGVCFVAQDVTVHKLVMDKFTRVEGDYMAIIHNPNPLIPPIFGADEFGWCCEWNAAMTKLTGWHREEVLNKMLLGEVFDSSNASCLLKNKDAFVSLCVVINSALAGEETEKAPFGFFDRSGKYTDCLLSVNRRENEGGLITGVFCFIHIPSHELQQALQVQQA

SEQ ID NO: 30505 - protein, 949 aa, uncultured bacterium
MARKQCQVCGQPATVRVEANLNGRHSTMLLCDDHYRQLVRQQKRTVSPLEALFGSRSGLFEDFLGSDFFRIGDDAPSMAADTDEVVDASFGEPAPAGTGTARRRGSGLASRISEQSEALLQEAARHAAEFGRAEVDTEHLLLALSDSDVVKTILGQFKIKVDDLKRQIESEAKRGDKPFEGEIGVSPRVKDALSRAFVASNELGHSYVGPEHFLIGLAEEGEGLAANLLRRYGLTPQALRQQVSKVVGKGAEDGRAETPTNTPELDKYSRDLTKMAREGKLDPVIGRAQEIETTIEVLARRKKNNPVLIGEPGVGKTAIVEGLAQRMVAGEVPETLRDKRLVELNINAMVAGAKYRGEFEERVQKVLKEVTEHQGELILFIDEVHTIVGAGQGGGEGGLDVANVFKPMMARGELNLIGATTLNEYQKYIEKDAALERRFQPVMVPEPTVAQTMMILRGLRDTFEAHHKVSITEDAIIAAAELSDRYITARFLPDKAIDLLDQAAARVKLSATARPVAVQELESELHQLRREQDYVASRKQYDKAAELGKHIEAKEAELKKLVEEWERERASGSAEVKAEHVAQIVSRLTGIPVNELTVEEREKLLHLEQRLHERLVGQDEAVRAVADAVRLSRAGLREGSKPVATFLFLGPTGVGKTELAKALAESIYGDEGALLRIDMSEYGERHTVARLVGAPPGYVGYDEGGQLTEKVRRKPYSVLLLDEIEKAHPDVYNILLQVFDDGRLTDGKGRVVDFTNTIIIATSNLGSDIIQRRLKARGAAGEEYEKTKGEVMDVLRGHFRPEFLNRIDEIIVFHALGKEEIRHIVGLQLDRVARNAASQGVTLAFDQTLIDHFAEEGYKPEFGARELKRLIRSELETALAREMLGGGIGKADHASARWDDKAERVVFERQEPPAKPAEPEKPDAANVAETPPSDASKPARKKKSAGGES

SEQ ID NO: 30506 - protein, 360 aa, Arabidopsis thaliana
MAAAISAAVSLPSSKSSSLLTKISSVSPQRIFLKKSTVCYRRVVSVKAQVTTDTTEAPPVKVVKESKKQEEGIVVNKFKPKNPYTGRCLLNTKITGDDAPGETWHIVFTTEGGVPYREGQSIGVIPEGIDKNGKPHKLRLYSIASSAIGDFGDSKTVSLCVKRLVYTNDGGEIVKGVCSNFLCDLKPGDEAKITGPVGKEMLMPKDPNATIIMLGTGTGIAPFRSFLWKMFFEEHEDYKFNGLAWLFLGVPTSSSLLYKEEFEKMKEKNPDNFRLGFSVSREQTNEKGEKMFIQTRMAEYAEELWELLKKDNTFVYMCGLKGMEKGIDDIMVSLAAKDGIDWLEFKKQLKRSEQWNVEVF

SEQ ID NO: 30507 - protein, 511 aa, Liquidambar styraciflua
MDSSLHEALQPLPMTLFFIIPLLLLLGLVSRLRQRLPYPPGPKGLPVIGNMLMMDQLTHRGLAKLAKQYGGLFHLKMGFLHMVAVSTPDMARQVLQVQDNIFSNRPATIAISYLTYDRADMAFAHYGPFWRQMRKLCVMKLFSRKRAESWESVRDEVDSAVRVVASNIGSTVNIGELVFALTKNITYRAAFGTISHEDQDEFVAILQEFSQLFGAFNIADFIPWLKWVPQGINVRLNKARGALDGFIDKIIDDHIQKGSKNSEEVDTDMVDDLLAFYGEEAKVSESDDLQNSIKLTKDNIKAIMDVMFGGTETVASAIEWAMTELMKSPEDLKKVQQELAVVVGLDRRVEEKDFEKLTYLKCVLKEVLRLHPPIPLLLHETAEDAEVGGYYIPAKSRVMINACAIGRDKNSWADPDTFRPSRFLKDGVPDFKGNNFEFIPFGSGRRSCPGMQLGLYALETTVAHLLHCFTWELPDGMKPSELEMNDVFGLTAPRAIRLTAVPSPRLLCPLY

SEQ ID NO: 30508 - protein, 367 aa, Liquidambar styraciflua
MGSTSETKMSPSEAAAAEEEAFVFAMQLTSASVLPMVLKSAIELDVLEIMAKAGPGAHISTSDIASKLPTKNPDAAVMLDRMLRLLASYSVLTCSLRTLPDGKIERLYGLAPVCKFLTRNDDGVSIAALSLMNQDKVLMESWYHLTEAVLEGGIPFNKAYGMTAFEYHGTDPRFNTVFNNGMSNHSTITMKKILETYKGFEGLGSVVDVGGGTGAHLNMIIAKYPMIKGINFDLPHVIEEAPSYPGVEHVGGDMFVSVPKGDAIFMKWICHDWSDEHCLKFLKKCYEALPTNGKVILAECILPVAPDASLPTKAVVHIDVIMLAHNPGGKERTEKEFEALAKGAGFEGFRVALCAYNTWIIEFLKKI

SEQ ID NO: 30509 - protein, 490 aa, Arabidopsis thaliana
MFKKALELSTLCNIEVCVIYYGRDGELFKTWPEDESKVRDMAERFTKLNERERRKKRTNLSLFLRKKILDDNKLSGKVLEMKDSLERGLRVLQDKLLLLQPENQTKSLTRSVSSLDYLRTGNMKKKRCILSSQIKLIVENEFCSKQNLTKKKSTKIFEKQNFLKCFFIYGVIFSYEIKPTAQFVSLGLVKSISNIIWKYKNFTILYNPEPCKKTKLSVRNQTCFKKSSLSSSSTAKKTTNLSMREQTMFKKALELSTLCNIDVCVIYYGRDGKLIKTWPEDQSKVRDMAERFSRLHERERCKKRTNLSLFLRKKILDDTKLSEKVLEMEDSLESGLRVLQDKLLLLQPEKNQTEFGQTRAVSSTTNPLSPPPSLIEDHRHQQWTEPLMSGVSNTEQDLSTSSLSQNQSRISVFLYNHDNRSFYQVPDSVSSFDQSALLGEQGSGLGSNFDLPPMVFPPQMQTQTPLVPFDQFAAWNQAPSFADPMMFPYN

SEQ ID NO: 30510 - protein, 421 aa, Amycolatopsis mediterranei
MALVVQKYGGSSLESADRIKRVAERIVATKKAGNDVVVVCSAMGDTTDELLDLAQQVNPAPPEREMDMLLTAGERISNSLVAMAIAAQGAEAWSFTGSQAGVVTTSVHGNARIIDVTPSRVTEALDQGYIALVAGFQGVAQDTKDITTLGRGGSDTTAVALAAALNADVCEIYSDVDGVYTADPRVVPDAKKLDTVTYEEMLELAASGSKILHLRSVEYARRYGVPIRVRSSYSDKPGTTVTGSIEEIPVEQALITGVAHDRSEAKITVTGVPDHTGAAARIFRVIADAEIDIDMVLQNVSSTVSGRTDITFTLSKANGAKAVKELEKVQAEIGFESVLYDDHVGKVSVVGAGMRSHPGVTATFCEALAEAGVNIEIINTSEIRISVLIRDAQLDDAVRAIHEAFELGGDEEAVVYAGSGR

SEQ ID NO: 30511 - protein, 655 aa, Claviceps purpurea
MDSNGNRLHLDFGSNDRLPVNDRAYPTTPSTFPQPVLSPPTAQQQQQQQQQQQTCGGLQPPQQQPNGASGSASASTPASASTSAVGYAPQGYFSQPGAAQSANNEFAQNGYLQGRSNTPGTNDPNVGLAHQFSHQNLGGSVRSAPRGPPSSQRPRTAGSQPAGAYAGYSNSNAPPLPTQSGTSTVSEFRPAPERNPDRYGPNAMSNQKKCSQLAVDFFKDSVKRARERNQRQSELEQKLQDPTQSSVRKEQLWSTAGRKEGQYLRFLRTKDKPENYNTIKIIGKGAFGEVKLVQKKGDGKVYAMKSLIKTEMFKKDQLAHVRSERDILAESDSPWVVKLYTTFQDAYFLYMLMEFLPGGDLMTMLIKYEIFSEDITRFYIAEIVLAIEAVHKLGFIHRDIKPDNILLDRGGHVKLTDFGLSTGFHRLHDNNYYQQLLQGRSNRPRDRNSVAIDQINLTVSNRSQINDWRRSRRLLAYSTVGTPDYIAPEIFTGHGYTFDCDWWSLGTIMFECLVGWPPFCAEDSHDTYRKIVNWRQTLYFPDDITLGVEAENLIRNMVCNTENRLGRGGAHEIKNHPFFRGVEFDGLRRIRAPFEPRLTSNIDTTYFPTDEIDQTDNATVLKAQALQMGHPMEESPEMSLPFIGYTFKRFDNNFR

SEQ ID NO: 30512 - protein, 432 aa, Juglans nigra
MAHILTPTTRWQMRITKNSANASPMTAKMWGSLLLKQNKKGSSKSSAKFRVFATKSENSTVNRIEKLLNLDLTPYTDKIIAEYIWIGGSGIDLRSKSRTISKPVEHPSELPKWNYDGSSTGQAPGEDSEVILYPQAIFKDPFRGGNNILVICDTYTPAGEPIPTNKRHRAAEIFTNKKVADEVPWYGIEQEYTLLQQNVKWPLGWPVGGYPGPQGPYYCGAGADKSFGRDISDAHYKACLYAGINISGTNGEVMPGQWEYQVGPSVGIEAGDHIWCSRYILERITEQAGVVLSLDPKPIEGDRNGAGCHTNYSTKSMREDGGFEVIKKAILNLSLRHKDHISAYGEGNERRLTGKHETASINTFSWGVANRGCSIRVGRETEKQGKGYLEDRRPASNMDPYIVTSLLAETTILWEPTLEAEALAAQKLALNV

SEQ ID NO: 30513 - protein, 167 aa, Methanothermobacter thermautotrophicus
VFDSYKVIVMDKVVLAFSGGLDTSVCIKLLEEKYGMEVITACVDVGQPREEVERPARVAEELGNYKHHTVDAREEFAENYIFPAIKANAVYEGYPLSTALARPLIAEKIVEVAESEGASAIAHGCTGKGNDQFRFEAVIRSRTDLEVIAPIRDLNLTRTEEMEYARS

SEQ ID NO: 30514 - protein, 750 aa, Arabidopsis thaliana
MPFSAGVTNLRDVSAINNLYITLGAPSLHHWLAFGGDPCGEKWQGVVCDSSNITEIRIPGMKVGGGLSDTLADFSSIQVMDFSSNHISGTIPQALPSSIRNLSLSSNRFTGNIPFTLSFLSDLSELSLGSNLLSGEIPDYFQQLSKLTKLDLSSNILEGHLPSSMGDLASLKILYLQDNKLTGTLDVIEDLFLTDLNVENNLFSGPIPPNLLKIPNFKKDGTPFNTSIITPPPPPVVDPPPATHRAPPVPRIPPVSGVPPAPFAPFAPLQPQQHPPPSPPLVWSPPSSDNGGGDPWNSVSGQPTLQISPPSGSGSGKFWSTQRIILVVSSVAIIVLVSGLCVTLWRCCRSKIYNRYYSGARKDLQRPYFNKPPSQPTPTMGKVSREPMVKPFDGYGAGDRKYGYPMPQRAEESRRAMPPTSYYNKDVNTPQKPLQQPPRQFQSNDTASKRAAHFPPGLNSSSSATVFTIASLQQYTNNFSEENIIGEGSIGNVYRAELRHGKFLAVKKLSNTINRTQSDGEFLNLVSNVLKLKRGHILELLGYCNEFGQRLLVYEYCPNGSLQDALHLDRKLHKKLTWNVRINIALGASKALQFLHEVCQPPVVHQNFKSSKVLLDGKLSVRVADSGLAYMLPPRPTSQMAGYAAPEVEYGSYTCQSDVFSLGVVMLELLTGRRPFDRTRPRGHQTLAQWAIPRLHDIDALTRMVDPSLHGAYPMKSLSRFADIISRSLQMEPGFRPPISEIVQDLQHMI

SEQ ID NO: 30515 - protein, 312 aa, Eucalyptus globulus
ANLFAMQLASASVLPMVLKAAIELDLLEIMAKAGPGAFLSPGEVAAQLPTQNPEAPVMLDRISRLLASYSVLTCTLRNLPDGKVERLYGLAPVCKFLVKNEDGVSIAALNLMNQDKILMESWYYLKDAVLEGGIPFNKAYGMTAFEYHGTDPRFNKIFNRGMSDHSTITMKKILETYKGFEGLETVVDVGGGTGAVLSMIVAKYPSMKGINFDLPHVIEDAPPLPGVKHVGGDMFVSVPKGDAIFMKWICHDWSDDHCAKFLKNCYDALPNNGKVIVAECVLPVYPDTSLATKNVIHIDCIMLAHNPGGKER

SEQ ID NO: 30516 - protein, 397 aa, Escherichia coli
MTKVTRAVIVGGGIGGAATALSLARLGIKVVLLEKAHEIGEIGAGIQLGPNAFSALDSLGVGEVARQRAVFTDHITMMDAVNAEEVVRIETRQAFRDHFGGPYAVIHRVDIHASVWEAVLTHPDVEYHTSTNVVDIRETEDDVTVFDDRGNSWTGDILIGCDGVKSVVRQSLLGDAPRVTGHVVYRAVIDCADMPEDLRINAPVLWAGPHCHLVHYPLRGGTQYNLVVTFHSRQQEEWGVKDGSKEEVLSYFEGIHPRPRQMLDKPTSWRRWSTADREPVAKWGTNRITLVGDAAHPVAQYMAQGACMALEDAVTLGKALAQCEGDAAQAFALYESVRIPRTARIVWSTREMGRVYHAAGVERQVRNLLWKGKSQAEFYRGMEWLYGWKEDNCLQPR

SEQ ID NO: 30517 - protein, 514 aa, Broussonetia papyrifera
MDTKSITLLQEALKPLPMAIFLVIPLLFLLGHILRSRGRLPYPPGPKGLPIIGSMSMMDQLTHRGLAALAKQYGGIFHLKMGYLHMVAISSPETARQVLQLQDNIFSNRPANIAIRYLTYDRADMAFAHYGPFWRQMRKLCVMKLFSRKRAASWESVRGEVEKTVLSVAGSTGTAVNVGELVFKTTMDIIYRAAFGASNKEGQDEFISILQEFSKLFGAFNMADFIPWLTWVDPQGLNGRLKRARKALDAFIDKIIDEHVVKKNEAAETDMVDDLLAFYSNEEAKVNDAEDLHNAIRLTRDNIKAIIMDVMFGGTETVASAIEWAMTEMMRCPEDLKKVQQELADVVGLDRRLEESDFEKLTYLRCAIKETLRLHPPIPLLLHETAEDAAVAGYHIPKGSRVMINAWAIGRDKNSWADPDSFKPARFLRDGVPDFKGSNFEFIPFGSGRRSCPGMQLGLYALELTVGHLLHCFTWNLPDGMKPSELDMNDVFGLTAPRATRLVAIPTKRVVCTI

SEQ ID NO: 30518 - protein, 456 aa, Arabidopsis thaliana
MVWLMKVFVFVTLLSLVFVITESAPESALITKLPGFEGTFPSKHYSGYVTIDKEHGKNLWYYFIESEKNPSKDPVVLWLNGGPGCSSMDGFVYEHGPFNFELPKKNNSLPLLHLNPYSWSKVSNIIYLDSPVGVGFSYSNNKSDYITGDIKTAVDSHAFLLKWFQMFPEFQSNPFFISGESYAGVYVPTLASEVVIGNKNGVKPALNFKGYLVGNGVADPKFDGNAFVPFAHGMGLISDELFEDTNQLNIYNILEPCYHGTSLSAFDIRSLPSSLLQLGKTEKRLPIRKRMFGRAWPVRAPVHPGIVPSWSQLLADVTVPCIDDRVATAWLNDPEIRKAIHTKEVSNSESEIGRWELCSGKLSFYHDAGSMIDFHRNLTLSGYRALIYSGDHDMCVPFTGSEAWTKSLGYKVIDEWRAWISNDQVAGYTQGYANNLTFLTIKGAGHTVPETNRGRL

SEQ ID NO: 30519 - protein, 1496 aa, Campylobacter coli RM2228
MDLENILENNQSVGLYHPKNEHDACGIAAVANIRGIASYKVICDALEILMNLEHRGGAGAEENSGDGAGILIQIPHDFFMTQELGFELPQKGDYAVAQMFLSPNADAKEEAKAIFLQGLKDKNLEFLGFREVPFNPSDIGASALKAMPYFLQAFVKKPSTVNAGLEFERVLYSTRRLIEKRAINVPKFYFSSFSSRTIVYKGMLLSTQLSDFYLDFKDVNMKSAIALVHSRFSTNTFPSWERAHPNRYMVHNGEINTIRGNVDSIRAREGLMQSEYFENLDEIFPIIAKPSSDSAMFDNTLEFLALNGRTLEEAFMMMVPEPWHKNENMESKKRAFYEYHSLLMEPWDGPAAIVFTDGVIMGASLDRNGFRPSRYYLTKDDMLILSSETGALKLDENNIKAKKRLEPGKLLLVDTARGRVIADNEIKEHYANAKPYKQWLKNLVELEKQHSGVYKHKFLKEDEVLKLQKAFGWSYDELKMSVASMAQNGKEALAAMGVDTPLAILSKTYQPLYNYFKQLFAQVTNPPLDAIREEIVTSTRIYLGSEGNLLKPDENNAKRVKISLPIISNEELFEVKALNNFQVKEFSILYDYSKKTLEKALDELCVKIEDEVKKGVSIIILSDQGVDEKNAYIPALLAVSGVHNHLVRKNLRTHTSLIIESGEPREIHHFACLLGYGATVINPYLVYESIQKLIANKDLNLSYEKAVENFIKASSSGIVKIASKMGVSTLQSYNGSALFECLGLSSKVIDKYFTSTTSRIEGMDLEDFEKELIALHKHAFNDTHKALDSKGIHGFRSAKEEHLIDPLVIFNLQQACRNKDYKSFKKYSALVDEKQVNLRSLMEFDFSEAISIDKVESVESIVKRFRTGAMSYGSISKEAHECLAQAMNKIGAKSNSGEGGEDEERYEIKDGVNKNSAIKQVASGRFGVDLNYLSHAKEIQIKVAQGAKPGEGGQLMGFKVYPWIAKARHSTAGVTLISPPPHHDIYSIEDLAQLIYDLKNANKDAKISVKLVSENGIGTVAAGVAKAGANLILVSGYDGGTGASPRTSIPHAGIPWELGLAETHQTLILNKLRDRVRLETDGKLMNGRDLAIAALLGAEEFGFATAPLIVMGCTMMRVCHLNTCPFGIATQDKELRDRFKGKVDDVVNFMYFIAEELREYMARLGFERLDDMIGRVDKLRQKPMQGKAGKVNLDKILKSLPTYNRTAVHFKDYKDNKLEKTIDYRILLPLCKNAVEKKEPIKLSLEVGNQSRTFATMLSSEILKTYGKDALSEDSIQIKAIGNAGNSFGAFLLKGIKLEIIGDSNDYLGKGLSGGKIIAKISNEATFSPEENIIAGNACLYGATEGEVYLDGIAGERFCVRNSGAKAVVLGTGVHGCEYMTGGLVVVLGDVGANFAAGMSGGVVYIFGRHNEAHVNTELVDIKDLSTKDEKELKTMIENHIAYTNSKKAKDILEKFDKKDFFKVMPRDYEKMLEMIELCKDEEDPSLAAFLKITQK

SEQ ID NO: 30520 - protein, 411 aa, Campylobacter coli RM2228
MNAINSSFIVLCTLLVLLMTPALAMFYSGMVRSKNTLNTIMNCFIVFGVITLQWVVLGFSLSFGKDEGLGLVGNFENFLLEGISGYNASGVPNILFVIFQMMFALIASAIITGSLVGRIKLGVLVIFLLFWSTLVYDVLAHMIWSSEGFLLKRGSLDFAGGGVVHISSGVAGLVGALMVGARKSDDEDKNAHSIPYAFLGAILLFIGWLGFNAGSAGEMNDIAINAFIVSIISAACGFLSWVVLEWLIHKKPTILGGLSGLVAGLVGITPACGYVDIYASLVIGTLSSVFCYFGLSFIKYKLKWDDSLDAFSLHGIGGIWGGIATGLFASAKVNPNVIAQNALGEGFFISGSLELLKEQIFAIVICVVLSALISFIIFKIISCFTDLRVKEEVEQKGLDVSLHGEKAYTLA

SEQ ID NO: 30521 - protein, 353 aa, Campylobacter coli RM2228
MSEKILFIDRDGTIIEEPKSDFQIDSLEKLRFEKGAIPTLLKLKNFGFKFVLVSNQDGLGTQSFPKEDFEIAHQKMLDILQSCGIEFKDIFICPHFENENCECRKPKTALLDEYIKHNLYNKEQSFVIGDRDTDMILASNLGVRGLKYSENLTWKEIEEEILNSFRTASISRITKETNIYVKVCLNGGKIAINTGVPFFDHMLEQIAVHGGIGLEISCKGDLEIDEHHSVEDVALALGSAIKQALGDKIGITRYGFVLPMDECLASCAIDFCNRPHLVYKAKFKKEKLGELSTEMIEHFFYSLSYSMGVSLHLKVKGKNDHHKAEGLFKAFAKALKMAVKIESENLASSKGVI

SEQ ID NO: 30522 - protein, 309 aa, Campylobacter coli RM2228
MRGYKIFSGSANVEFAKQISKYLSLPLSDAGVKRFSDGEISVQIDESVRGKDVFIIQSTCVPTNDNLMELLILTDALRRSSANSITAIIPYFGYARQDRKANPRVPITAKLVANLIEAAGIDRVATIDLHAGQIQGFFDIPVDNLYGSIVFNDYIKTKHFKNAIVGSPDIGGVARARSVAKNLGLDIVIVDKRREKANESEVMNIIGDVKDKEVILVDDIIDTAGTIVKAAEALKNKGAKSVMACCTHAVLSGKAYERIASGALDELVVTDTIPLREQLPNIKVLSVAPVFAEVIRRVYHNESVNSLFI

SEQ ID NO: 30523 - protein, 241 aa, Campylobacter coli RM2228
MAFTSANAAEGKLEAIKAKGELVIGVKNDVPHYALLDQATGEIKGFEVDVAKMLAKSILGDENKVKLIAVNAKTRGPLLDNGSVDAVIATFTITPERKRVYNFSEPYYQDAVGLLVLKEKNYKSLADMNGATIGVAQAATTKKVINTAAKKIGVKVKFSEFPDYPSIKAALDAKRIDAFSVDKSILLGYKDENNEILPDSFDPQSYGIVTKKDDANFSNYVNDFVKQNKTEIDALAKKWGL

SEQ ID NO: 30524 - protein, 857 aa, Campylobacter coli RM2228
MANIQEFLTDNMLSNLESAASLAIHSKNNEVVPLHLLWALIVDSSSILNQICNKFNISKEALELEIKSRISNLATSSNVNRENVRFSNEFINSLESAKGLMSANGDNYLSVDTWLISESEKNPIREILAKFIDIKEFQKELQNLRAGRKIESKTSDETLDSLNKFGIDLTAKASEGKLDPVIGREEEIERLMQILIRKTKNNPILLGEPGVGKTAIVEALAQRIIKKDVPKSLQNKKVIALDMSALIAGAKYRGEFEDRLKAVVNEVIKSENIILFIDEIHTIVGAGASEGSMDAANILKPALARGELHTIGATTLKEYRKYFEKDAALQRRFQPVNVGEPSVNEALAMLRGIKEKLEIHHNVTINDSALVAAAKLSKRYIADRFLPDKAIDLIDEAAAELKMQIESEPSSLRKARKDIETLEVENEALKMENDEKNQKRLDEIAKELANLKEKQSALNSQFENEKAVFDSISAKKKEIDSLKNEAVFAKNKGEFQKAAELEYGKIPECEKEVANLEEKWKKMSENGVLLKNQVDEDLVAGILSKWTGISVQKMLTSEKQKFLEVEKHLKESVIGQDKALSALARAIKRNKAGLNADNKPIGSFLFLGPTGVGKTQSAKALAKFLFDDEKAMIRFDMSEFMEKHSVSRLLGAPPGYVGHEEGGELTEAVRRKPYSVLLFDEVEKAHKDVFNILLGILDDGRATDSKGVTVDFKNTIIILTSNIASSAIMNLSGKEQEDAVKNELKNFFKPEFLNRLDDIITFNPLGKDEAYEIVKLLFKDLQKSLENKGIKASLSENAALLIAKDGFDPDFGARPLRRAIYDLIEDKLSDMILADKLNENDEIVIDAKNDEIVIEKA

SEQ ID NO: 30525 - protein, 393 aa, Campylobacter upsaliensis RM3195
MKVYLDNNATTMLDHSALELMLPYLKESYGNPNSLHQWGSLTHPALRAAMDKLYEGLGASDLDDIVITSCATESINWVLKSAYFDYILDKERDEIIISSVEHPAVSGAAHFLKSLGVKVIELPVNSEGVSSVEHLREVISDKTALVSVMWANNETGMIFPIKEMAELSHEFGALFHTDATQAVGKIKVDLRQSGVDFASFSAHKFHGPKGVGGLFIKKGLKLTPLLHGGEHMGGRRSGTLNVPYIVAMAEALRIANSMLNFEDSHIRRLRDKLEDAVLSIEDTSVVGDRKNRVPNTILASIKGVEGEAMLWDLNKNGIAASTGSACASEDLESNPIMEAIGAENDLAHTALRLSLSRFNTEEEIDYAATQIKAAAKRLRAISSTYAYNPNNYK

SEQ ID NO: 30526 - protein, 857 aa, Campylobacter upsaliensis RM3195
MANLQDFLTDSMLSNVESAVSLAIHSKNSEVVPLHLLWALAVDSTSLLSQLCNKLNISKEALELELKSQIKGLPTSSNVSRDNIRISNELLNSLENAKGLMSANGDSYLSVDTWLIAESKRSPIKELLSKFIDLNELKKELELLRAGRKIESKTSEDTMDALNKFGIDLTQKAQQNELDPIIGREEEIERTMQILIRKSKNNPILLGEPGVGKTAIVEALAQRIVKKDVPTSLQNKRLIALDMSALIAGAKYRGEFEDRLKSVVDEVIKSKNVILFIDEIHTIVGAGASEGSMDAANILKPALARGELHTIGATTLKEYRKYFEKDAALQRRFQPVSVNEPSINEALAMLRGIKEKLEIHHNVSITDSALVAAAKLSKRYINDRFLPDKAIDLIDEAAAELKMQIESEPSSLRKVRKELETLEVEKEALKMEQNEANEKRLEEIAKELANLKEEQNALNAQFENEKSVFDSISVKKKEIDTLKNEANLAKNKGDFQKAAELEYGQIPSLEKEVLSLEEKWQLLSQNGVLLKNKVDEDLVAGILSKWTGISVQKMLKSEKQKFLEVEKHLKESVIGQDKALNALAKAIKRNKAGLNEDSKPIGSFLFLGPTGVGKTQSAKALAKFLFDDEKAMIRFDMSEFMEKHSVSRLLGAPPGYIGHEEGGELTEAVRRKPYSVILFDEIEKAHKDVFNILLGILDDARATDSKGVSVDFKNTIIILTSNIASSAIMNLKGKEQEEAVKAELKNFFKPEFLNRLDDIITFNPLGENEAYEIVKLLFKDLQKSLENKGLKASLSDEAAKFIAKEGFDEDFGARPLKRAIYDKIEDKLSDMILSDTLSLNDTISIDLKENEIVINKI

SEQ ID NO: 30527 - protein, 640 aa, Campylobacter upsaliensis RM3195
MNENNKNNNTPQNNNFFNKNPIFVFAIFAVVMVIVFKSFFDGGTSSFGGNLSGSEVSKNVPYSELKKLIESGQISQVSIGQSTIKAVSSANNTIYNAKKVNDAELVKLLDSKNIAYGAYSETNWFTDMIFSWVLPVFIFFAIWMFLASRMQKNMGSSILGIGSSKKLVNSEKPKVKFGDVAGVEEAKEEVKEIVDFLKYPERYIKLGAKIPKGLLLVGPPGTGKTLLAKAVAGEADVPFFSVSGSSFIEMFVGVGASRVRDLFENAKKEAPAIVFIDEIDAIGKSRAANGLMGGNDEREQTLNQLLAEMDGFGTESSPVIVLAATNRPEVLDAALLRPGRFDRQVLVDKPDFKGRCEILKVHMKDVKISPKVKVEEVGRLTAGLAGADLANIINEAALLAGRDGKKFVEQDDLVEAVERAIAGLEKKSRRINDKEKKIVTYHECGHALIAETTKGAKRVSKVSVIPRGLAALGYTLNTPEENKFLMQRHELIAEVDVLLGGRAAEEVFIGEISTGASNDLERATDIIKAMISMYGMSEIAGLMVLEKQRNTFLTGGQSIKDYSEKMAESLDEYVKKTLDERYADVKQTLNIYKGAIETMVSALYEEETIEGAKVREIIKEFEEQNALPTRLQIEEKKEEQ

SEQ ID NO: 30528 - protein, 277 aa, Campylobacter upsaliensis RM3195
MKKILLSIFTAFVAVFLTACGSSESGVNSIERIKNAGVVKIGVFGDKPPFGYVDEKGTNQGYDIIFAKRIAKELLGDENKVEFVLVEAANRVEFLKSNKVDIILANFTQTPERAEQVDFALPYMKVALGVAVPKDSEIKSVEDLKDKTLILNKGTTADAYFTKNHADIKTLKFDQNTETFAALMDKRGDALAHDNTLLFAWVKERPDYKVVIKELGNQDVIAPAVKKGDKELKEFIDNLIISLAAEQFFHKAYDESLKAHFGADIKADDVVVEGGKL

SEQ ID NO: 30529 - protein, 1494 aa, Campylobacter upsaliensis RM3195
MCLKTHQNLGLYDPKNEHDACGIAAVANIRGIASYKVICDALEILMNLEHRGGAGAEENSGDGAGILIQIPHDFFKTQDLGFELPKKGDYAVAQMFLSPNLDAKEEAKTLFLEGLKEKNLEFLGFRAVPFNPSDLGESALKAMPYFLQAFVKRPAKVAAGLEFERLLYTARRLIEKKAFNVPKFYFSSFSSRTIVYKGMLLSTQLSDFYLDFKDINMKSAIALVHSRFSTNTFPSWERAHPNRYMVHNGEINTINGNVHSIKAREGLMQSDYFENLEELFPIIAKPSSDSAMFDNTLEFLALNGRSLEEAFMMMVPEPWHRNENMPSAKRAFYEYHSVLMEPWDGPAAIVFTDGVIMGASLDRNGFRPSRYYLTKDDFLILSSETGALKIDEKNIKAKKRLEPGKLLLVDTARGRVIADNEIKEQYANAKPYKKWLENLIRLENQEDQNYKHHFLKQDEILSLQKAFGWSYDELKLSVLAMANSGKEALAAMGVDTPLAVLSKQYQPLFNYFKQLFAQVTNPPLDALREEIVTSTRIYLGREGNLLKPNESNANRVKIQLPIISNEELFKIKNLKNFKVKEFSILYDHKEKSLESALEELFERVEAEIKKDVCVVILSDRGVSEKMAYIPSLLAVSGLHNYLVRKSLRTHTSIVLESAEPREIHHFACLLGYGATVINPYLVYESIKDLIEKGELKLDYQKAVANFIKASSAGIVKIASKMGVSTLQSYNGSALFECLGINSKIVEKYFSSTTSRIEGIDLEDIEKETLKIHNQAFKDKSKALDSLGIHGFRSEKEEHLIDPLAIFHLQQACKNKDYESFKKYSHIINNKQIHLRSLMEFDFSEAIDIDEVESIESIVKRFRTGAMSYGSISKEAHECLAKAMNQIGAKSNSGEGGEDESRYKKENLMKNSAIKQVASGRFGVDLNYLNHAKELQIKVAQGAKPGEGGQLMGFKVYPWIAKARHSTPGVTLISPPPHHDIYSIEDLAQLIYDLKNANQNAKISVKLVSENGIGTVAAGVAKAGANLILVSGYDGGTGASPRTSIPHAGIPWELGLAETHQTLILNGLRERVRLETDGKLMSGRDLAIAALLGAEEFGFATAPLIVMGCTMMRVCHLNTCPFGIATQDIKLRERFKGKVDAVISFMHFIAQELREYMARLGFKNVNEMIGRVDKLRQKEISTKANKLNLDRILKALPTYNKTAVHFKEHKDNKLKKTIDYRILLPLCKKAVAHKKPIKLSLEVGNQSRTFATMLSSELLKSYGKDALQEDSIQITAIGNAGNSFGAFLLKGIKLEIIGDSNDYLGKGLSGGKIIAKTSSEASFSPEENIIAGNACLYGATEGEVYLDGIAGERFCVRNSGAKAVVLGTGVHGCEYMTGGQVVVLGDIGANFAAGMSGGVVYILGRHNEANVNKELVDIKELNAKDEKELKTTIQRHINYTNSKKARGILDQFDKKDFFKIMPRDYEKMLKHLESFKGDKEQELRAFEKFIQEMRG

SEQ ID NO: 30530 - protein, 306 aa, Campylobacter upsaliensis RM3195
MTKIIQSKPSYIKSPLNYIGGKYKILSQILPLFPKRIDTFIDVFCGGCNVAVNVNAERILANDNLSYLIALLKFLQQNPLEKTLQEIEQIIHFYALSKENAEGYKLLRDDYNARKLPLKLLALIAFSFNHQIRFNNAHHFNTPFGRNRSSFNPQMQINLIAFIQSLQQINITLFSLDFSEVFSTLDSMQDKEIFVYCDPPYLITQGTYNDGKRGFSGWNESLEKDLLNYLSKLDSKGIRFGLSNVLTHKGGENKLLKEWLEKHNFYIHTIQAHYTNANYQAKYRDKQHTQEVFITNYKADNAFYWQ

SEQ ID NO: 30531 - protein, 338 aa, Campylobacter upsaliensis RM3195
MFIDSVKLTLASGDGGKGAVSFRREKHVPLGGPDGGDGGKGGDVIIICDNNTHTLMNFKGKKELRAQNGAAGQGRNKNGKKGTNLELIVPQGTQIIDAKTGKILLDLIKEGQREIFLKGGKGGLGNTHFKNSTNQRPDYAQPGVKGEICEVKLELKLIADVGLVGFPNAGKSTLISVVSNAKPEIANYEFTTLTPKLGLVEVDEYHSFVMADIPGIIEGASGGKGLGLLFLKHIERTNFLLFVLDTMRQMSLKEQFIILKKELKSFSKELSKRSFGVMISKIDSENLGLAKELKENIKDLENFLQDEKPMFILKVSSLDKTGLKELKFKLLEQVKNKN

SEQ ID NO: 30532 - protein, 484 aa, Hordeum vulgare subsp. vulgare
GKTLGIGSFGKVKIAEHIITGHKVAIKILNRRKIKSMEMEEKVKREIKILRLFMHPHIIRLYEVIDTPADIYVVMEYVKSGELFDYIVEKGRLQEEEARRFFQQIISGVEYCHRNMVVHRDLKPENLLLDSKCNVKIADFGLSNVMRDGHFLKTSCGRPNYAAPEVISGKLYAGPEVDVWSCGVILYALLCGTLPFDDENIPNLFKKIKGGIYTLPSHLSPLARDLIPRMLVVDPMKRITIREIREHSWFKARLPRYLAVPPPDTAQQVKKLDDETLNDVIKMGFDKNQLTESLQKRLQNEATVAYYLLLDNKLRTTSGYLGAEYQESMDSSFSQISPETPSSASEARQYGSPGFGLRQHFAAERKWALGLQSRAHPREIITEVLKALQELNVCWKKIGHYNMKCRWSPGFFENMMHNNNGFGVESAIIEADGLGDKSTHIVKFEIQLYKTRGDKYLLDLQRVSGPQLLFLDLCSAFLTQLRVL

SEQ ID NO: 30533 - protein, 1121 aa, Solanum lycopersicum
MASGSGSRGKHDRNHQPKNQSQFSGTSNTNALSKAVAQYTTDARLHAAFEQSGESGKNFDYSQSVRNSTESVTEHQITAYLNKMQRGGHIQPFGCTIAVEEASFCVIAYSENACEMLDIMPQSVPSLEKNEILKIGTDVRTLFSSSSSGLLEGAFGAREITLLNPIWVHSKNSGKPFYAILHRIDVGIVIDLEPARTEDPALSIAGAVQSQKLAVRAISLLQSLPGGDIDLLCDTVVKSVRELTGYDRVMVYKFHDDEHGEVVAESRRSDLEPYIGLHYPATDIPQASRFLFKQNRVRMIVDCTAIPVRVIQDESLMQPLCLVGSTLRAPHGCHPQYMVNMGNVASLTLAVVINGNDDEVVGGRNAMRLWGLVVGHHSSARFIPFPLRYACEFLMQAFGLQLNMELQLASQLAEKRVLRTQTVLCDMLLRDSPTGIVTQNPSIVDLVKCDGAALYYQGRYYPLGITPTAAQIKGIVEWLLTCHVDSTGLSTDSLADAGYPEAASLGAAVCGMAVAYVTSKYFLFWFRSHTASEIKWGGAKHHPEDKDDWQKMHPRSSFKAFLEVVKNRSLPWENAEMDAIHSLQLILRDSFKDASNSKSIVRVQLREEGLQGMDELRSVAREMVRLVETATAPIFAVDVEGRINAWNAKVAELTELSVEEAIGKSLVHDLVHEESQTTAQNLLRKALRGEEDKNIEIKLRTFGAEQLKKTVFVEVNACSNKDYTNNIVGVSFIGQDITAQKVVLDKFVRIQGDYKAIMHSPNPLIPPIFVSDENTCCFEWNTAMEKLSGWNKEEIIGKMLVGEIFGTFCRLKGPDDMTNFMIMLHKAIGGQEIDKFPFSFSDRNGKFVQALLTANKRVNVDGQIIGAFCFLQIASPELQKTLMQRQQEKTSNIHMKELAYICRELKNPLNGIRFTNSLLEATELTENQKQFLETSAACERQMSKIIRDIDLDNIEDGSLELEKGEFFLASVIDAVVSQVMLLLRERGVQLIRDIPDEIKTLRVYGDQVRIQQVFADFLQIMASYAPPREGWVEVHLRPSIKQISDGVTIVHIEFRIVCPGEGLPPELIQDMFHNSLWVTQQGLGLSMCRRILQLMNGQVQYIRESERCFFLIILQLPMLIQ

SEQ ID NO: 30534 - protein, 314 aa, Triticum monococcum
MAMGSASRISLVVLVALATAASGQLSSTFYDTSCPRALATIKSGVAAAVSSDPRMGASLLRLHFHDCFVQGCDASVLLSGMEQNAGPNVGSLRGFGVIDNIKTQLESICKQTVSCADILTVAARDSVVALGGPSWTVPLGRRDSTTASASLANSDLPGPSSSRSQLEAAFLKKNLNTVDMVALSGAHTIGKAQCSNFRTRIYGGDTNINTAFATSLKANCPQSGGNTNLANLDTTTPNAFDNAYYTNLLSQKGLLHSDQVLFNNDTTDNTVRNFASNAAAFSSAFTTAMIKMGNIAPLTGTQGQIRLSCSKVNS

SEQ ID NO: 30535 - protein, 313 aa, Triticum monococcum
MASSSLSAVLLLCLAVAASAQLSPTFYDTTCPNALATIKSAVTAAVNKENRMGASLLRLHFHDCFVQGCDASVLLSGMEQNAIPNVMSLRGFEVIDSIKAQLETMCKQTVSCADILTVAARDSVVALGGPSWTVPLGRRDSTNANEAAANNELPPPFFDLVNLTQSFGDKGFTVTDMVALSGAHTIGQAQCQNFRDRLYNETNINSGFATSLKANCPQPTGSGDRNLANLDVSTPYSFDNAYYSNLKSQKGLLHSDQVLFTGTGGGTDNTVNNFASNPAAFSSAFASAMVKMGNLSPLTGSQGQVRISCSKVN

SEQ ID NO: 30536 - protein, 322 aa, Triticum monococcum
MASSSGCRAWHCLLALFLLSSSAYGQLSPSFYAKSCPTLQLIVRATMIKALLAERRMGASLLRLHFHDCFVQGCDGSILLDDVGSFVGEKTAFPNVDSVRGYEVIDEIKKNVELLCPGIVSCADIAALAARDGTFLLGGPSWSVPLGRRDSTTASLTEANSDLPAPSLSLGLLIKAFDKKQLSPQDLTALSGAHTIGFSQCLNFRDHIYNGTNIDPAFATLRKRTCPAQAPNGDKNLAPFDVQTQLLFDNAYYRNLVAKRGLLNSDQVLFNGGSQDALVRQYVANPALFASDFVTAMIKMGNINPLTGTAGQIRRNCRVVNS

SEQ ID NO: 30537 - protein, 534 aa, Staphylococcus epidermidis RP62A
MDWTTFIGVVIVLLFAVIPMMVFPKASEIIITDINSAISNSIGSVYLFMGLAIFCFVLYIAFGKYGNVTLGKATDKPEFNNFTWAAMLFCAGIGSDILYWGVIEWAFYYQVPPNGAKSMSDQALQYATQYGMFHWGPIAWAIYVLPALPIGYLVFVKKKPVYKISQACRPILKGHTDKLLGKIVDILFIFGLLGGAATSLALGVPMISAGIERLTGLDGSNMILRSIILLTITVIFAISSYTGLKKGIQKLSDVNVWLSFLLLAFVFIVGPTVFIMETTVTGFGNMIKDFFHMATWMEPFGGIKGRKETNFPQDWTIFYWSWWLVYAPFIGLFIARISKGRTLKEVVLGTICYGTLGCVLFFGIFGNYAVYLQITEQFNVISYLNNYGTEATIIEIMHQLPFSTITIILFLISAFLFLATTFDSGSYILAAASQKKVIGEPLRANRLFWAFALCLLPFSLMLVGGERALEVLKTASLLASVPLIVIFTLMMISFLIILGRDRIKLERRADKHKEIERRSLRIVQVKDKPEDDNL

SEQ ID NO: 30538 - protein, 667 aa, Malus pumila
MAGSWRARGSLIVLAIVTFGCLFAFSIAKEEATKLGTVIGIDLGTTYSCVGVYKNGHVEIIANDQGNRITPSWVAFSDSERLIGEAAKNQAAVNPERTVFDVKRLIGRKFEDKEVQKDMKLVPYKIVNRDGKPYIQVRIKDGETKVFSPEEVSAMILTKMKETAEAFLGKKIKDAVVTVPAYFNDAQRQATKDAGVIAGLNVARIINEPTAAAIAYGLDKKGGEKNILVFDLGGGTFDVSILTIDNGVFEVLSTNGDTHLGGEDFDQRIMEYFIKLIKKKHGKDISKDNRALGKLRREAERAKRALSSQHQVRVEIESLFDGVDFSEPLTRARFEELNNDLFRKTMGPVKKAMDDAGLEKRQIDEIVLVGGSTRIPKVQQLLKDYFDGKEPNKGANPDEAVAYGAAVQGSILSGEGGEETKDILLLDVAPLTLGIETVGGVMTKLIPRNTVIPTKKSQVFTTYQDQQTTVSIQVFEGERSLTKDCRNLGKFDLTGIPPAPRGTPQIEVTFEVDANGVLNVRAEDKGTGKAEKITITNDKGRLSQEEIERMVKEAEEFAEEDKKVKERIDARNSLETYVYNMKNQINDKDKLADKLESDEKEKIETATKEALEWLDDNQTAEKEDYDEKLKEVEAVCNPIISAVYQRSGGAPGGAGASEEDDESHDEL

SEQ ID NO: 30539 - protein, 273 aa, Thermococcus kodakarensis KOD1
MLFGIPESKNPNLLLLGIRWDGSSSYRKGARDGPKAIREATSSELYNSYTENLVNLAERWRYRDLGDVEGKSFAEVLERVRKLVGENYSGERFLFLGGDHSITYATFRALREASGKEFGLIYFDAHPDLYPHYEGDPYSHACPVRRLVEEGWVRGENVVQVGIRAPTPEQLDFAEREGILIYSASEVWKGAEVEVPFERAYLSFDLDVLDPAFAPGVGNPEPGGLSTRELIELIKSIDAEVVAFDVVELNPRYDVSNVTAFAAAKIIREVLGR

SEQ ID NO: 30540 - protein, 389 aa, Thermococcus kodakarensis KOD1
MALSDRLDLVNPSEIRKLFDLAAGMQDVISLGIGEPDFDTPEHIKGYAKEALDKGYTHYGPNAGLPMLREAVAKKLKEQNGIEADPKTEVMILTGANQAFLMGLATFLKDGEEVLIPSPMFVSYAPAVILAGGKPVEVPTYEENEFRLSVDDLEKHVTDKTRALIINTPSNPTGSVLTKKDIEEIADFAVEHDLMVISDEVYEHFVYDGVKNHSIASLDGMFERTITVNGFSKTFAMTGWRLGFVAAPAWVIEKMTRFQMYNSTCPVTFAQYAAAKALEDPRSWKAVEEMRKEYDRRRNLVWKRLNEMGLPTVKPKGAFYIFPRIRDTGLTDHQFSELMLKEARVAVVPGSAFGKAGEGYIRISYATAYEKLEEAMDRMEKVLKEKKLV

SEQ ID NO: 30541 - protein, 333 aa, Thermococcus kodakarensis KOD1
MRPRVLVTFKMKSKPVEELKKYADVDFLLYPSVEELAEKIKDYDGLIVSPLNRVPREVIERAERLKVISCHSAGYDHVDVEAATKKGIYVTKVSGVLSEAVAEFAVGLTIALLRKFVYTDKLIRRGEWDSHAKIWSTFKDIETVYGKKVGILGMGAIGKAIARRMKAMGTEILYWSRSRKEDIEAEVGAKYLPLDEVLRESDIVILALPATPETYHIINEERIKLLEGKYLVNIGRGTLVDEKAVVKAIEEGRLKGYATDVFEKEPVTEHPLFKYEWETVLTPHHAGLSKEAMEDMGFQAVMNLLAVLRGEIPKDLVNREVVKVRPPEEVKML

SEQ ID NO: 30542 - protein, 835 aa, Thermococcus kodakarensis KOD1
MIFGKEDEKVDEIKLRVAEALKRDVGRGIVRFDRKYQRKLGVEPGDIVALKGERVTAAIVANAHPDDRGLDIIRMDGYIRRNAGVSIGDYVTVSRAEVQEAKKVVLAPAQKGVFIQIPGEIVKQNLLGRPVVKGDLVVAGGQNEAVYSPFDELLRGFFEAMPIGFGELKFVVVNTVPKGIVQITYNTEVEVLPQAVEVKEESIPEVTYEDIGGLSDAIQKIREMVELPLKHPELFERLGIEPPKGVLLYGPPGTGKTLLAKAVANEANAHFIAINGPEIMSKFYGESEERLREIFKEAEENAPSIIFIDEIDAIAPKREEVVGEVEKRVVSQLLTLMDGLKSRGKVIVIAATNRPDALDPALRRPGRFDREIEVGVPDKQGRKEILQIHTRGMPLEPDYDKEAVLRVLREIREKGNFDAERVDKIIAEVENAKNESEVKEALKKDAEIYSEVRNRLIDKMLDELAEVTHGFVGADLAALAREAAMVVLRRLIKEGKISPEQERIPPEVLQELRVRRDDFYEALKMVEPSALREVLIEVPNVRWEDIGGLEDVKQELREAVEWPLKYPKAFERLGIEPPKGILLYGPPGTGKTLLAKAVANESQANFIAIRGPEVLSKWVGETEKRIREIFRKARQAAPTVVFIDEIDAIAPARGSEGDRVTDRLINQLLTEMDGIQENSGVVVIGATNRPDIIDPALLRPGRFDRLILVPAPDEKARLEIFKVHTRRVPLAGDVDLRELAKKTEGYTGADIAALVREAALIAMRRIMRELPREVVESESEEFLERLKVSKKDFEMAMKKVKPSVTPYMMEYYRSFEENRKKQAGKERGGPDYYTF

SEQ ID NO: 30543 - protein, 333 aa, Thermococcus kodakarensis KOD1
MRPKVFITRAIPENGIEMLKEHFEVEVWPEEREIPREVLLKKVRDVDALVTMLSERIDSEVFDAAPRLRIVANYAVGYDNIDVEEATRRGIYVTNTPDVLTDATADFAWTLLLATARRLIEADHFTRSGEWKRRGIAWHPRWFLGYDVYGKTIGIVGFGRIGQAVARRARGFGMRILYYSRSRKPEAEKELGAEFRSLEDLLRESDFVVLAVPLTKETQYMINEERLRLMKKTAILVNIARGKVVDTKALMKALKEGWIAGAGLDVYEEEPYYNEELFSLKNVVLAPHIGSATYGAREGMAELVARNLIAFKNGEVPPTLVNKEVVKVRKPGF

SEQ ID NO: 30544 - protein, 246 aa, Thermococcus kodakarensis KOD1
MLKVENLHVSVEDKEILRGVDLEVNPGEFHVIMGPNGSGKSTLALTIAGHPKYRVTDGKILFEGEDITELGPDERAKRGILLAFQVPPEVEGVKVIEFLQQVLVELKGMDPAEAYDLVVEKAKELWFKEEDLHRYVNVGFSGGERKRLELLQALLIEPKLLILDEPDSGVDVDSLSIISRKIEELHQRGTAILLITHYGRILGHLDREKLTVHVMKDGRIVKTGSGELVDQIDREGFARIFEEVGA

SEQ ID NO: 30545 - protein, 637 aa, Thermococcus kodakarensis KOD1
MSEYFPYENLRPNQREFIELIGEAVKNGENAIVEAPTGFGKTISVLAGVLPFAKEYGYKVLYLARTHRQMDRVIEELKAIHRKKPVSGVELRSRKELCLHTYLKQFTTDAYNAMVVCKNLKKLGKCPFYENEKKKKAEFEEVIRFFLTEPSHPAEILNYAETLELCPYDLTKRIAEKADVIVASYLYALSPSIRESLISSLGVDYSDLIVIFDEAHNLPDQAISALSDRLSIHTINRAIKEADEYREHEIANFLSILGKGLEKLYSEKLAERDVEEAPVQPELVFTHVIEILGINERWLVKTLNEMVSVGDAIREDRIEKGKPPRSYVGRVGEFLLLWLSLIGRDDYLFLMTREKGMSLELVALDPSRALSFIKDVQSAIFMSGTLTPLEAFRDVMGIENARMKKFPRMVKRENAQVLVAKDVSTRGDERSLQAYRKMVDYIVEAVKLIPKNVGVFTASYEVLQGLLSANLDVKLEETGRAVFIEQQGVSSRENDLMIAQFKAHAKGNGAVLLGVMGGRNSEGQDYSGDEMNGVVLVGIPYARPTPRVQAQIRYFEKKFPGKGRYYGYYLPAHRKLVQAAGRVHRSAEEKGSIVILDYRVLWRSIRKDLPDWMKETMKPVTLPTMRLYLKRFWSNGR

SEQ ID NO: 30546 - protein, 351 aa, Thermococcus kodakarensis KOD1
MERRIHLMQLPREVLLGENLTGEVVSVAKRIGLTGKALVIYGPKTKEIAGRDVEDAIKSAYEVSSLTIRKGATMEEVERTIEKIKDEGIGWVIAVGGGSIIDVAKLSSFKTGVPFISFPTTASHDGIASANASIKDLGSKTSVKAVPPVAVIADVKVIKTAPYRYLAAGVGDTISNLTAVRDWQLAHRIKGEYYSEYAASLSLMSAKMVMRNADIIRLGNEESVRKVIKALISTGVAMSIAGSSRPASGAEHLFSHALDMLLDKPALHGEQTGLGTIIMAYLHGMKWERVRETLKRVGAPTNAYELGIDPEVIIEALTIAHTIRPERYTILGKDGLTREAAEKAAKITGVI

SEQ ID NO: 30547 - protein, 136 aa, Thermococcus kodakarensis KOD1
MGDKTKVQVSKLKPGRYIIIDGEPCRIVNVTVSSPGKHGSAKARIEAVGIFDGKVRSIVKPTSAEVDVPIIDKRVGQIIAITPDTVQLMDMETYETFDVPIEGGVDDEVKGQLTEGITVEYWETLGRIQIKKIRGE

SEQ ID NO: 30548 - protein, 288 aa, Thermococcus kodakarensis KOD1
MEFLYTYETLKLEFPLVEPEKARFILLGVPFDGTTSYKAGARFGPTLIRQATLNLESYILDYDLDIAELPIADIGDIAVVAGDPRKTADRVRETLEELKKANPKAIPILLGGEHSQTLGAVEALKPASYVVFDAHLDLRNSYEDNPYNHACVARRISELGVKEAIFGIRSGTKEEVDFARERDIPWVHARDYSFDAFVDLVEALPEPVYLSIDIDVFDLSMVPSTGTPEAGGLRFWEVVEAIEWLVEKKEIAGFDIMEVAGEKLGDPTALTAAKLLFYSIGAMAKFGR

SEQ ID NO: 30549 - protein, 483 aa, Thermococcus kodakarensis KOD1
MCLIAGGMGGNLREKLIKMAIAGKHRGPESFGVWTDGGVLKSDDFSKLTEIPDGRIGLLQCRLAITGSKSFTQPFINDLALVHNGEIYNHAALREYLERRGVSFESDVDSEVVLRLIEFLREEHLSYPEIVKKLFWMLEGDYAVAFSDGERIYLFRDPLGIRPLYFSRNGLFASEKKVLWAVGEREVEPVQPGELVVLEKNGVRRARLFSLENLKSKAKCERKDPVGGVGKLLRYAVKNRVSKKTGVLFSGGLDSTLVAYLASQYSDVILYTAGTEDSPDIEWARKVADHFGWALRERTFEVEDVRDAVKRVMYAIEEPNPMNLAIGLPLYFASGLASSDGTRVLLSGQGADELFGGYAKYLERPELMEEDIALISERNLARDDKITMLNGVEGRYPFLALPVVSFALKLPLEAKIVDGTRKVILRKLALRLGIPEWIAEREKRAAQYGSRAQKLLEKIAREEGLTLREFAEKLFRETFPNAF

SEQ ID NO: 30550 - protein, 357 aa, Thermococcus kodakarensis KOD1
MQILEEKPKEGKVKVKAETLDDLWHLYHIIDPGDIVYAKTLRKQAQRADSLRAEKVEVIPVFLGVQAEKINFHKFANQVRVTGPIVYASREDVPLGKYHTIAIEQGTVVTIQKPRWKEHHIERLKEAVAASKRARVMIVVIDDGEADMALVREYGVEILNSIRHNLGGKRYNTDRESEEMKFFHDVAKTMEEVMKRENVEKAIVAGPGFVKEDFYKFLKEKYPELAKKVVIEDTSVTGRTGIYEVIKRGVVDRVYQENRVAKEVQLVEKVLENIARNNGLVAYGLKEVEEAVNYGAVETLLVLDELLKGELREKVEELMDAVRYSRGEVVVVSSEHEGGEKLKALGGLAALLRFRVK

SEQ ID NO: 30551 - protein, 399 aa, Thermococcus kodakarensis KOD1
MIKPSERAMGVEYAIRDVVLPARELEKKGIEVIRLNIGDPGKYDFQPPEHMKEAYCRAIKEGHNYYGPSEGLPEMREAVVQREKRKNGVDITPDDVRVTTAVTEALQLLFGALLDPGDNILVPSPSYPPYTGLVKFYGGIPNEYDTIEENGWQPDIDDMRKRINERTKAIAVINPNNPTGALYEKKTVKEILDLAGEYDIPVISDEIYDLMTYEGEHVSPGSLTKDVPVIVMNGLSKVYFATGWRLGYFYYVDPENKLAEVREAVDKLMRIRICPSTPAQFAAIAGLTGPMDYLEEYMKKLKERRDYIYKRLTEIPGVSTQKPQGAFYIFPRIDERSKWKSDKEFVLDVLHEAHVLFVHGSGFGRAGNWHFRIVFLPPVEILEKAMDRFEEFMRKRLAE

SEQ ID NO: 30552 - protein, 368 aa, Thermococcus kodakarensis KOD1
MQRSHEILISKYERAYWDAVERGEFSRARVLAIKCAGLFRELASLNLEFSDYYLEMAKQWEKRAGELENGHRYSQRKSVNLPNVVQTSRVAWDDVGGLWEAKKVLSRTIGLHLARVPGKFEPWKGILLFGPPGTGKSLLASAVAGSLGATFLNVKVSDVLSKYFGESSKLVASIYHLAREKSPSIVFIDEFDALAMKRSSLEDAARRVLSTFLVEIDGFKRSDTNERVVTLAATNRPWDLDDAILSRFPLRVYVPLPDESSAVEILRIHLSGFRVKANLRAVAKEAVRRRYSGRDLANLARLAITKMLSDMNPELSEPQLIPSLVGKELTVRPIEMEDFRYGLRRIKSPITPALIKKYEMWAREYGSY

SEQ ID NO: 30553 - protein, 796 aa, Thermococcus kodakarensis KOD1
MSERREVKLKVASAYQRDVGRGIVRIDRKAMRELGVQSGDIVEIIGTKNTAAVVWPAYPEDEGLGIIRMDGTIRKNAGVGLGDEVTVRKADVKEAKKVIVAPTEPIRFGADFVEWLHSRLVGRPVVRGDYIKIGILGQELTFVVTATTPAGIVQITEFTDFQVSEKPVKEVSKATALGVTYEDIGGLKDVIQKVREMIELPLKHPELFEKLGIEPPKGVLLYGPPGTGKTLLAKAVANEANAHFIAINGPEIMSKYYGESEERLREVFKEAEENAPAIIFIDEIDSIAPKREETHGEVEKRVVSQLLTLMDGLKSRGKVIVIGATNRPDAIDPALRRPGRFDREIEVGVPDKQGRKEILQIHTRGMPIEPEFRRDKVIEILEELEKNDTYREAAERAIMKVKKAKDEEEIRRILRETDEKLYEEVRAKLIDALLDELAEVTHGFVGADLAALAREAAMAALRRLINEGKIDFEAEYIPKEVLDELKVTRRDFYEALKMVEPSALREVLLEVPNVRWDDIGGLEDVKQELREAVEWPLKYPEAFMGLGITPPKGILLYGPPGTGKTLLAKAVANESEANFIAIKGPEVLSKWVGESEKNIREIFRKARQAAPTVIFIDEIDAIAPRRGTDVNRVTDRLINQLLTEMDGIQENSGVVVIGATNRPDIIDPALLRPGRFDRLILVPAPDEKARLEIFKVHTRRVPLAGDVDLRELAKKTEGYTGADIAAVVREAAMLAMRRALQEGIIRPGMKADEIRGKVKVTMKDFEEALKKIGPSVSKETMEYYRKIQEQFKQARG

SEQ ID NO: 30554 - protein, 573 aa, Thermococcus kodakarensis KOD1
MEEIRELVLKYALINAYTHRGKANPKAVIGKVLGENPELRKRAKEIIPLVNEVVNEVNSLSLEEQEAKLREIYPEFFEEKNEKKEEKKGLPPLPKAERGKVVTRFAPNPDGAFHLGNARAAILSHEYARMYDGKFILRFDDTDPKVKRPEPIFYEWIKEDLEWLGFRIDEIHIASDRLEIYYDYAEKLIKMGKAYVCTCPPEKFRELRDKGIACPHREEPVEVQLERWRKMLNGEYREGEAVVRIKTDLNHPNPAVRDWPALRIIDNPNHPRTGNKYRVWPLYNFASAIDDHELGVTHIFRGQEHAENETRQRYVYEYFGWEYPVTVHHGRLSIEGVILSKSKTRKGIEEGKYLGWDDPRLGTIRALRRRGIKPEAIRELIIEVGLKRSDTTISWDNLAAINRKIIEPIANRYFFVADPIPMYVEGAQEFTAEIPLHPDYPERGVRRLKFEPDKPVYVSKDDMELFKPGNFVRLKDLFNVEIMEVNENGIRARFHSFEYEVARENRWRMVHWVTEGKACEVWVPEGDELIIREGLLESDADVKVDDIVQFERFGFVRIDDVRPEKVVAIFAHK

SEQ ID NO: 30555 - protein, 366 aa, Thermococcus kodakarensis KOD1
MLYSGGRLVVKFGGTSVRDDFREAVTFVSRLWDENEVALVVSAIKGVTDALLKFSRTGEGFEWIEKVHRDFAKKYGIPFETLAAPLRELKKLSREDFPSFEAYRDHVLSYGEWLSGLAFAEALRREGIQVELFEPWEILETDGNFGNARVDIAKTSRNLKVVEEALERGRVAVVPGFVGSYNGLRTTLGREGSDYTAAVLGKGLKARAVLIMSGVDGIYTADPRRVVSARLIPFVSYDELYVASKAGMKAIHHGAIDVVRGIPIIFGRTRDWSIGTIAGYESSSLPILVHRVAGEEAVITAVGVAEVPGFDGENGSELGIPLVRLTVPSARLGSTLNLIHLRLIADRISPPRALSIIRGGVSAGNV

SEQ ID NO: 30556 - protein, 334 aa, Thermococcus kodakarensis KOD1
MREIRVSLIGFGNVGRATAGVLLEKSRLFEERYGVRISVVSISDTSGTVWLPEGIDLREALLVKENFGRLSAWTNDYEVYELTPEEIVGEVDSEIVVDVTNDKEAWTWHLRALKEGKGIVTSNKPPLAYHYREILNEAEKRELPYLFEATVMAGTPIVGLLRENLLGDDVQRIEAVLNATTTFILTQMEMGLSFEEALAKAQRLGIAERDPSGDILGIDAGYKATILHCLAFHPITYNEIEVRGIAEVTEGDIERAKAKGKTIRLVARIEKGNVAVEPAEIPKESPLAVESHENAAVIKTDLLGELLIKGAGAGLKETASGVISDVIKAALRLV

SEQ ID NO: 30557 - protein, 325 aa, Thermococcus kodakarensis KOD1
MTAILDVRNLKVYYRTPMGFVKAVDGVSFDVRKGEVFGIAGESGCGKSTLVHSLILRKPPMIHMGGEAIFKGRDLMKLSKEEERKIKYTELSIIPQYAMNALNPTKKIKDIVWDLAREHGAEDREEVEKLLRERLRMVKLSDKVADMYPVELSGGMRQRATMVVSTLMNPDLLIADEITSALDVTTQRVVLELLHYFMKEGIVKSIIFVTHDLALLDKIADRVMVLYAGKVAEIGPTEEIIDSPAHPYTSLLIESLPKIGVHYKRAKLKGIPGTPISLLNPPKGCRFYPRCPYAMEVCQRVEPGVFSVGDDHIVACHLYGGEKNE

SEQ ID NO: 30558 - protein, 304 aa, Thermococcus kodakarensis KOD1
MKVLVAAPLHEKAIEVLKNAGFEVVYEEYPDEDRLVELVKDVDAIIVRSKPKVTRKVIEAAPKLKVIGRAGVGLDNIDLKAAEERGIKVVNSPGASSRSVAELAIGLIFAVARKIAFADRKMREGVWAKKQCMGIELEGKTIGVVGFGRIGYQVAKIANALGMKVLFYDPYPNEERAKEVGGKFADLETLLKESDVVTLHVPLVDATYHLINEERLKLMKPTAILINAARGAVVDTDALVKALQEGWIAGAGLDVFEEEPLPADHPLTKLDNVVLTPHIGASTVEAQMRAGVEVAEKIVEALKG

SEQ ID NO: 30559 - protein, 342 aa, Thermococcus kodakarensis KOD1
MVDPKEQILYGVDTTFEGIAKKATPKFRTTPGRLLFAGFMAGAFIAFGFLLAVVAASGYSPKLFPDKGNISAFKLLLGAVFPVGLIGVVIGGADLWTGNVQFLSSAKVKGYADFKCVLYNWFGSYGGNFIGSIFLALLATTLTGLFGHVGDPNTFGKVTVSIATGKVSKDMLALFFLGIGCNWLVNLAIWQSARVQDGAGKILAIWFPIFAFVAIGFEHAIANMWAIPTGILLSNYTITWTKFFHNLIPVTFGNAVGGFLFVAFYYWYLSHPELTAERLIKEIVDFLVVFIAFWIVATLVPAGIAMALDSALGSGAMYAVPLALSIYYIAGTFFLAKIAKPA

SEQ ID NO: 30560 - protein, 397 aa, Thermococcus kodakarensis KOD1
MSIENTDVHPEGYDDYVTFLKRRIRQLELQVRTLEADKERLERELSRLRMEMSRLRQPPAFAGNVIEVLDDERAIVQNYNGPRFVVRIAPWIERDKLKPGARVALDQRTMAIVELLPSEKDPSVLGFEVIERPKVTYNDIGGLEKQLQELREAIELPLKHPELFEQVGIEPPKGVLLYGPPGCGKTLMAKAVANHVNATFIRVVGSELVRKFIGEGARLVHELFELAKEKAPTIIFIDEIDAIGAKRMDETTGGEREVNRTLMQLLAEMDGFDPRGNVKVIAATNRPDILDPALLRPGRFDRLIEVPLPDYQGRLEILKVHTRKMNLKGVDLRVIAEITEGASGADLKAIATEAGMFAIRDRRTYVTQDDFLKAVDKVIGSEKRLAQQIAMHEVMYG

SEQ ID NO: 30561 - protein, 392 aa, Thermococcus kodakarensis KOD1
MRYKKRKYFMAGRINILQRSKIRELFEKASKMENVISLGIGEPDFDTPEVIKEAAKRAIDEGYTHYTPNAGIPEFREAIAEYYKEFYNVDVDMNNIIVTAGAYEATYLAFESILEQGDDVIIPDPAFVCYVEDAKIAEAGIIRIPLREENKFRIDPDELLEAITKRTRMIVMNYPNNPTGAIMKKDVAKAIADIAQDYNIYILSDEPYEHFLYEGARHHPMIKYAPDNTILANSFSKTFAMTGWRLGFAIAPEQVIRDMIKLHAYVIGNVTSFIQIAGITALRDKRSWEAVERMRQVYDERRKLVLKYLNDMPHITPFRPKGAFYIWAKIDPELDMTSEDFAEWLLENAGVVVIPGTAFGRQGEGWIRISYATEKEKLIEAMERMKEALSKL

SEQ ID NO: 30562 - protein, 321 aa, Staphylococcus aureus subsp. aureus COL
MLNNEYKNSSLKIFSLKGNEALAQEVADQVGIELGKCSVKRFSDGEIQINIEESIRGCDVFIIQPTSYPVNLHLMELLIMIDACKRASAATINIVVPYYGYARQDRKARSRKPITAKLVANLIETAGATRMIALDLHAPQIQGFFDIPIDHLMGVPILAKHFKDDPNINPEECVVVSPDHGGVTRARKLADILKTPIAIIDKRRPRPNVAEVMNIVGEIEGRTAIIIDDIIDTAGTITLAAQALKDKGAKEVYACCTHPVLSGPAKERIENSAIKELIVTNSIHLDEDRKPSNTKELSVAGLIAQAIIRVYERESVSVLFD

SEQ ID NO: 30563 - protein, 384 aa, Staphylococcus aureus subsp. aureus COL
MKLSLNSNSKYLRAPSIRQFSNRMNNLDDCVNLTIGQPDFPMPDVVKKAYIDAINNDKTSYSHNKGLLETREAISQYFKNRYHFSYDPEEIIVTNGASEAIDTTLRSIIEPGDEIIIPGPIYAGYIPLIEVLGGKPIYIDTTATQFKITPDALESHISPKTKAVLLNYPTNPTGVVLKRNEVLNIVNVLKKYPLFIISDEIYAENTFSGKHVSFAEFEDIRDQLILIGGLSKSHSATGIRIGFLLGPQYLIDKLTFMHAYNCICANVPAQIACITALNEGLEAPKYMNEAYVERRNYLVSELTKLGFEITAQPEGAFYIFPSIKHITDDDFEFCVDLLESTHLAIVPGSSFTEFGKGFVRISYAYEMDVLKEGMKRLAKYLNTK

SEQ ID NO: 30564 - protein, 440 aa, Staphylococcus aureus subsp. aureus COL
MSNGKELQKNIGFFSAFAIVMGTVIGSGVFFKISNVTEVTGTAGMALFVWFLGGIITICAGLTAAELAAAIPETGGLTKYIEYTYGDFWGFLSGWAQSFIYFPANVAALSIVFATQLINLFHLSIGSLIPIAIASALSIVLINFLGSKAGGILQSVTLVIKLIPIIVIVIFGIFQSGDITFSLIPTTGNSGNGFFTAIGSGLLATMFAYDGWIHVGNVAGELKNPKRDLPLAISVGIGCIMAVYLLINATFLLTLPIELLAGNLNAASDTSKILFGENGGKIITIGILISVYGTINGYTMTGMRVPYAMAERKLLPFSHLFAKLTKSGAPWFGAIIQLIIAIIMMSMGAFDTITNMLIFVIWLFYCMSFVAVIILRKREPNMERPYKVPLYPIIPLIAILAGSFVLINTLFTQFILAIIGILITALGIPVYYYKKKQKAS

SEQ ID NO: 30565 - protein, 430 aa, Staphylococcus aureus subsp. aureus COL
MFVDQVKISLKAGDGGNGITAYRREKYVPFGGPAGGDGGKGASVVFEVDEGLRTLLDFRYQRHFKASKGENGQSSNMHGKNAEDLVLKVPPGTIIKNVETDEVLADLVEDGQRAVVAKGGRGGRGNSRFATPRNPAPDFSEKGEPGEELDVSLELKLLADVGLVGFPSVGKSTLLSIVSKAKPKIGAYHFTTIKPNLGVVSTPDQRSFVMADLPGLIEGASDGVGLGHQFLRHVERTKVIVHMIDMSGSEGREPIEDYKVINQELAAYEQRLEDRPQIVVANKMDLPESQDNLNLFKEEIGEDVPVIPVSTITRDNIDQLLYAIADKLEEYKDVDITVEEEESVGINRVLYKHTPSQDKFTISRDDDGAYVVSGNAIERMFKMTDFNSDPAVRRFARQMRSMGIDDALRERGCKNGDIVRILGGEFEFVE

SEQ ID NO: 30566 - protein, 546 aa, Staphylococcus aureus subsp. aureus COL
MKQRIGAYLIDAIHRAGVDKIFGVPGDFNLAFLDDIISNPNVDWVGNTNELNASYAADGYARLNGLAALVTTFGVGELSAVNGIAGSYAERIPVIAITGAPTRAVEQGGKYVHHSLGEGTFDDYRKMFAHITVAQGYITPENATTEIPRLINTAIAERRPVHLHLPIDVAISEIEIPTPFEVTATKYTDASTYIELLATKLHQAKQPIIITGHEINSFHLHQELEDFVNQTQIPVAQLSLGKGAFNEENPYYMGIYDGKIAEDKIRDYVDNSDLILNIGAKLTDSATAGFSYQFNIDDVVMLNHHNIKIDDVTNDEISLPSLLKQLSNISYTNNATFPAYHRPTSPDYTVGTEPLTQQTYFKMMQNFLKPNDVIIADQGTSFFGAYDLALYKNNTFIGQPLWGSIGYTLPATLGSQLADKDRRNLLLIGDGSLQLTVQAISTMIRQHIKPVLFVINNDGYTVERLIHGMYEPYNEIHMWDYKALPAVFGGKNVEIHDVESSKDLQDTFNAINGHPDVMHFVEVKMAVEDAPKKLIDIAKAFSQQNK

SEQ ID NO: 30567 - protein, 1499 aa, Staphylococcus aureus subsp. aureus COL
MHNEKLIKGLYDYREEHDACGIGFYANMDNKRSHDIIDKSLEMLRRLDHRGGVGADGITGDGAGIMTEIPFAFFKQHVTDFDIPGEGEYAVGLFFSKERILGSEHEVVFKKYFEGEGLSILGYRNVPVNKDAIAKHVADTMPVIQQVFIDIRDIEDVEKRLFLARKQLEFYSTQCDLELYFTSLSRKTIVYKGWLRSDQIKKVYTDLSDDLYQSKLGLVHSRFSTNTFPSWKRAHPNRMLMHNGEINTIKGNVNWMRARQHKLIETLFGEDQHKVFQIVDEDGSDSAIVDNALEFLSLAMEPEKAAMLLIPEPWLYNEANDANVRAFYEFYSYLMEPWDGPTMISFCNGDKLGALTDRNGLRPGRYTITKDNFIVFSSEVGVVDVPESNVAFKGQLNPGKLLLVDFKQNKVIENNDLKGAIAGELPYKAWIDNHKVDFDFENIQYQDSQWKDETLFKLQRQFAYTKEEIHKYIQELVEGKKDPIGAMGYDAPIAVLNERPESLFNYFKQLFAQVTNPPIDAYREKIVTSELSYLGGEGNLLAPDETVLDRIQLKRPVLNESHLAAIDQEHFKLTYLSTVYEGDLEDALEALGREAVNAVKQGAQILVLDDSGLVDSNGFAMPMLLAISHVHQLLIKADLRMSTSLVAKSGETREVHHVACLLAYGANAIVPYLAQRTVEQLTLTEGLQGTVVDNVKTYTDVLSEGVIKVMAKMGISTVQSYQGAQIFEAIGLSHDVIDRYFTGTQSKLSGISIDQIDAENKARQQSDDNYLASGSTFQWRQQGQHHAFNPESIFLLQHACKENDYAQFKAYSEAVNKNRTDHIRHLLEFKACTPIDIDQVEPVSDIVKRFNTGAMSYGSISAEAHETLAQAMNQLGGKSNSGEGGEDAKRYEVQVDGSNKVSAIKQVASGRFGVTSDYLQHAKEIQIKVAQGAKPGEGGQLPGTKVYPWIAKTRGSTPGIGLISPPPHHDIYSIEDLAQLIHDLKNANKDADIAVKLVSKTGVGTIASGVAKAFADKIVISGYDGGTGASPKTSIQHAGVPWEIGLAETHQTLKLNDLRSRVKLETDGKLLTGKDVAYACALGAEEFGFATAPLVVLGCIMMRVCHKDTCPVGVATQNKDLRALYRGKAHHVVNFMHFIAQELREILASLGLKRVEDLVGRTDLLQRSSTLKANSKAASIDVEKLLCPFDGPNTKEIQQNHNLEHGFDLTNLYEVTKPYIAEGRRYTGSFTVNNEQRDVGVITGSEISKQYGEAGLPENTINVYTNGHAGQSLAAYAPKGLMIHHTGDANDYVGKGLSGGTVIVKAPFEERQNEIIAGNVSFYGATSGKAFINGSAGERFCIRNSGVDVVVEGIGDHGLEYMTGGHVINLGDVGKNFGQGMSGGIAYVIPSDVEAFVENNQLDTLSFTKIKHQEEKAFIKQMLEEHVSHTNSTRAIHVLKHFDRIEDVVVKVIPKDYQLMMQKIHLHKSLHDNEDEAMLAAFYDDSKTIDAKHKPAVVY

SEQ ID NO: 30568 - protein, 445 aa, Staphylococcus aureus subsp. aureus COL
MKQPILNKLESLNQEEAISLHVPGHKNMTIGHLSQLSMTMDKTEIPGLDDLHHPEEVILESMKQVEKHSDYDAYFLVNGTTSGILSVIQSFSQKKGDILMARNVHKSVLHALDISQQEGHFIETHQSPLTNHYNKVNLSRLNNDGHKLAVLTYPNYYGETFNVEEVIKSLHQLNIPVLIDEAHGAHFGLQGFPDSTLNYQADYVVQSFHKTLPALTMGSVLYIHKNAPYRETIIEYLSYFQTSSPSYLIMASLESAAEFYKTYDSTVFFDKRAQLIECLEKKGFEMLQVDDPLKLLIKYEGFTGHDIQNWFMNAHIYLELADDYQALAILPLWHHDDTYLFDSLLRKIEDMILPKKSVSKVKQTQLLTTEGNYKPKRFEYVTWCDLKKAKGKVLARHIVPYPPGIPIIFKGETITENMIELVNEYLETGMIVEGIKNNKILVEDE

SEQ ID NO: 30569 - protein, 697 aa, Staphylococcus aureus subsp. aureus COL
MQKAFRNVLVIVIIGVIIFGLFSYLNGNGNMPKQLTYNQFTEKLEKGDLKTLEIQPQQNVYMVSGKTKNDEDYSSTILYNNEKELQKITDAAKKQNGVKLTIKEEEKQSVFVSILSTLIPVVVIALLFIFFLSQAQGGGSGGRMMNFGKSKAKMYDNNKRRVRFSDVAGADEEKQELIEIVDFLKDNKKFKEMGSRIPKGVLLVGPPGTGKTLLARAVAGEAGAPFFSISGSDFVEMFVGVGASRVRDLFDNAKKNAPCIIFIDEIDAVGRQRGAGVGGGHDEREQTLNQLLVEMDGFGENEGIIMIAATNRPDILDPALLRPGRFDRQIQVGRPDVKGREAILHVHAKNKPLDETVDLKAISQRTPGFSGADLENLLNEASLIAVREGKKKIDMRDIEEATDRVIAGPAKKSRVISKKERNIVAHHEAGHTIIGMVLDEAEVVHKVTIVPRGQAGGYAMMLPKQDRFLMTEQELLDKICGLLGGRVSEDINFNEVSTGASNDFERATQIARSMVTQYGMSKKLGPLQFGHSNGQVFLGKDMQGEPNYSSQIAYEIDKEVQRIVKEQYERCKQILLEHKEQLILIAETLLTEETLVAEQIQSLFYEGKLPEIDYDAAKVVKDEDSEFNDGKFGKSYEEIRKEQLEDGQRDESEDRKEEKDIAEDKKEADKSDEKDEPAHQQAPNIEKPYDPNHPDNK

SEQ ID NO: 30570 - protein, 494 aa, Staphylococcus aureus subsp. aureus COL
MEKKNKQIDRGDLKQNLSEKFVWAIAYGSCIGWGAFIIPGDWIKQSGPIAASIGIVIGALLMILIAVSYGALVERFPVSGGAFAFSFLSFGRYVSFFSSWFLTFGYVCVVALNATAFSLLVKFLLPDVLNNGKLYTIAGWDVYITEIIIATVLLLVFMLVTIRGASVSGSLQYYFCVAMVIVVLLMFFGSFFGNNFALENLQPLAEPSKGWLVSIVVIVSVAPWAYVGFDNIPQTAEEFNFAPNKTFKLIVYSLLAASLTYVVMILYTGWLSTSHQSLNGQLWLTGAVTQTAFGYIGLGVLAIAIMMGIFTGLNGFLMSSSRLLFSMGRSGIMPTMFSKLHSKYKTPYVAIIFLVGVSLIAPWLGRTALTWIVDMSSTGVSIAYFITCLSAAKLFSYNKQSNTYAPVYKTFAIIGSFVSFIFLALLLVPGSPAALTAPSYIALLGWLIIGLIFFVIRYPKLKNMDNDELSRLILNRSENEVDDMIEEPEKEKTK

SEQ ID NO: 30571 - protein, 401 aa, Staphylococcus aureus subsp. aureus COL
MVTRSVLKFGGSSVSDFTKLKRIAEMLKERVNQDEQLIVVVSAMGNTTDQLMTNVSTLTKAPKQQELALLLTTGEQQTVSYLSMVLNDIGMNAKAMTGYQAGIKTIGHHLKSKIAQINPQTFEQAFQENDILVVAGFQGINEHQELTTLGRGGSDTTAVALAVSNQIPCEIYTDVDGVYATDPRLLPKAKRLDIVSYEEMMEMSALGAGVLETRSVELAKNYNIPLYLGKTLSNVKGTWIMSNEEILEKKAVTGVALDKHMMHVTISYPLPDNQLLTQLFTELEEGAVNVDMISQIVNLDGLQLSFTIKDSDFHQISMILETLKNQYEALAYKINEHYVKISLIGSGMRDMSGVASKAFLTLIENNIPFYQTTTSEISISYVIDDFNGQQAVEKLYDAFNI

SEQ ID NO: 30572 - protein, 379 aa, Staphylococcus aureus subsp. aureus COL
MIYLDNAATTKAFEEVLDTYLKVNQSMYYNPNSPHKAGLQANQLLQQAKTQINAMINSKTNYDVVFTSGATESNNLALKGIAYRKFDTAKEIITSVLEHPSVLEVVRYLEAHEGFKVKYVDVKKDGSINLEHFKELMSDKVGLVTCMYVNNVTGQIQPIPQMAKVIKNYPKAHFHVDAVQAFGKISMDLNNIDSISLSGHKFNGLKGQGVLLVNHIQNVEPTVHGGGQEYGVRSGTVNLPNDIAMVKAMKIANENFEALNAFVTELNNDVRQFLNKYHGVYINSSTSGSPFVLNISFPGVKGEVLVNAFSKYDIMISTTSACSSKRNKLNEVLAAMGLSDKSIEGSIRLSFGATTTKEDIARFKEIFIIIYEEIKELLK

SEQ ID NO: 30573 - protein, 534 aa, Staphylococcus aureus subsp. aureus COL
MKQFNVLVADPISKDGIKALLDHEQFNVDIQTGLSEEALIKIIPSYHALIVRSQTTVTENIINAADSLKVIARAGVGVDNINIDAATLKGILVINAPDGNTISATEHTLAMLLSMARNIPQAHQSLTNKEWNRNAFKGTELYHKTLGVIGAGRIGLGVAKRAQSFGMKILAFDPYLTDEKAKSLSITKATVDEIAQHSDFVTLHTPLTPKTKGLINAVFFAKAKPSLQIINVARGGIIDEKALIKALDEGQISRAAIDVFEHEPATDSPLVAHDKIIVTPHLGASTVEAQEKVAISVSNEIIEILIDGTVTHAVNAPKMDLSNIDDTVKSFINLSQTVGELAIQLMYNAPSSIKITYGGDLASIDSSLLTRTIITHILKDDLGPEVNIINALMLLNQQQVTLNIENNKAETGFSNYLEVELSNDSDSVKVGASVFTGFGPRIVRINNFSVDLKPNQYQIVSYHNDTPGMVGKTGALLGKYNINIASMTLGRTEAGGDALMILSVDQPVSNNIIDELKQVGEYNQIFTTELTVQS

SEQ ID NO: 30574 - protein, 520 aa, Staphylococcus aureus subsp. aureus COL
MKNKSVSLVFWVSLVICTIFVAFGAIFPKQLEKLTQNITTFIALHFSWYYLLLVLVILFVCVYILFSRYANITLGEEGEDPEFSLPSWFAMLFSAGMGIGLVFWTTAEPISHAFKLTPIHKAGTQSAINDAMQFSFFHWGIHAWAVYGIVALVFAYFSFHKGYPGLVSATLTPLLGEKAMRGPLGGAIDVLAVIATVTGVAATLGFGALQINEGLHFLFNVPSNFTMQVILIVIATILFTWSAWSGIDKGIKTLSNINMLLAFVVLIGLFIVGPTLYILNTFTNGLGNYIANFFSMSLRIPTGGQKFQWLQNWTIFYWAWWISWAPFVGIFIARVSKGRTIKEFILGVLFVPALVCFIFFAVFGASAIYLQDNHIADIAKAATETATFATLQHYPLGFVLSLITLLVIMIFFVTSADSATYVLGMLSSSGDINPKSFVKVSWGIIMALFAIIMIYTGGTQAIQNLLIIAALPFSVVIIAMIWSLIKSLSEEKPRNSNKVLIKHRDPDILEYRSSKHIDEN

SEQ ID NO: 30575 - protein, 374 aa, Staphylococcus aureus subsp. aureus COL
MKIAIIGAGIGGLTAAALLQEQGHTIKVFEKNESVKEIGAGIGIGDNVLKKLGNHDLAKGIKNAGQILSTMTVLDDKDRLLTTVKLKSNTLNVTLPRQTLIDIIKSYVKDDAIFTNHEVTHIDNETDKVTIHFAEQESEAFDLCIGADGIHSKVRQSVNADSKVLYQGYTCFRGLIDDIDLKHPDCAKEYWGRKGRVGIVPLLNNQAYWFITINSKENNHKYSSFGKPHLQAYFNHYPNEVREILDKQSETGILLHNIYDLKPLKSFVYGRTILLGDAAHATTPNMGQGAGQAMEDAIVLVNCFNAYDFEKALQRYDKIRVKHTAKVIKRSRKIGKIAQYRSRLFVAVRNRIMKMMPNALAAGQTKFLYKSKEK

SEQ ID NO: 30576 - protein, 545 aa, Staphylococcus aureus subsp. aureus COL
MNKDKQLHNDKINLSQLVLLGLGSLIGSGWLFGAWEASSIAGPAAIISWVLGFLVIGTIAYNYIEIGTMFPQSGGMSNYAQYTHGSLLGFIAAWANWVSLVTIIPIEAVSAVQYMSSWPWHWAKPMRYLMENGSISTYGLLAVYLIIVIFSLLNYWSVKLLTSFTSLISVFKLGVPMLTIIMLMLSGFDTSNYGHSASTFMPYGSAPIFAATTASGIIFSFNSFQTIINMGSEIKNPEKNIARGIAISLSISAVLYIILQSTFITSMPQSMLQHSGWNGINFNSPFADLAILLGINWLAILLYIEAFVSPFGTGVSFVAVTGRVLRAMEKNGHIPKFLGKMNEKYHIPRVAIIFNAIISMIMVTLFRDWGTLAAVISTATLVAYLTGPTTVIALRKMGPTMTRPFRAKILKVMAPLSFVLASLAIYWAMWPTTAEVILIIILGLPIYFFYEYRMNWRNTKKQIGGSLWIIVYLIVLSILSFIGSKEFKGLNMIHYPFDFIVIIIVALIFYYIGTTSSFESVYFRRATRINTKMRESLNNESKSSH

SEQ ID NO: 30577 - protein, 525 aa, Staphylococcus aureus subsp. aureus COL
MTFLTVMQFIVNIIVVGFMLTVIVIGLIWLIKDKRQSQHSVLRNYPLLARIRYISEKMGPELRQYLFSGDNEGKPFSRNDYKNIVLAGKYNSRMTSFGTTKDYQDGFYIQNTMFPMQRNEISVDNTTLLSTFIYKIANERLFSREEYRVPTKIDPYYLSDDHAIKLGEHLKHPFILKRIVGQSGMSYGALGKNAITALSKGLAKAGTWMNTGEGGLSEYHLKGNGDIIFQIGPGLFGVRDKEGNFSEGLFKEVAQLSNVRAFELKLAQGAKTRGGHMEAEKVNEEIAKIRNVEPYKTINSPNRYEFIHNAEDLIRFVDQLQQLGQKPVGFKIVVSKVSEIETLVRTMVELDKYPSFITIDGGEGGTGATFQELQDGVGLPLFTALPIVSGMLEKYGIRDKVKLAASGKLVTPDKIAIALGLGADFVNIARGMMISVGCIMSQQCHMNTCPVGVATTDAKKEKALIVGEKQYRVTNYVTSLHEGLFNIAAAVGVSSPTEITADHIVYRKVDGELQTIHDYKLKLIS

SEQ ID NO: 30578 - protein, 394 aa, Staphylococcus aureus subsp. aureus COL
MQEAYIVAYGRSAAAKAKQGALFHERPDDVAAKVLQGVLKRIDGKFNKNMIEDVIVGTAFPEGLQGQNIARTIALRAGLSDTVPGQTVNRYCSSGLQTIAIAANQIMAGQGDILVAGGVELMSAVPMGGNEPTNNPTLQYDDIGASYPMGLTAENVASQFDVSREDQDAYAVRSHQRAYDAQRDGRFKDEIIPIQVNSVEYTNAGPKVHTNIFDQDEFIRPDTTMEALAKLRTVFKADGTVTAGTSAPLSDGAGFVVLMSGDKVKELGVTPIARFVGFKAVGVDPKIMGIGPAYAIPEVLSLSNLSVEDIDLIELNEAFASQTIASIKEVGLDISRTNVNGGAIALGHPLGATGAMLTARLLNEMGRRPDSRYGMVTMCIGVGMGAAAIFEYVR

SEQ ID NO: 30579 - protein, 381 aa, Staphylococcus aureus subsp. aureus COL
MLTEQEKDIIKQTVPLLKEKGTEITSIFYPKMFKAHPELLNMFNQTNQKRGMQSSALAQAVMAAAVNIDNLSVIKPVIMPVAYKHCALQVYAEHYPIVGKNLLKAIQDVTGLEENDPVIQAWAKAYGVIADVFIQIEKEIYDQMMWIGFKPFKITNIKQESEDIKSFTVETEEYDFSEFTPGQYITVDVSSDKLPYRAKRHYSIVSGEKNHLTFGVKRDVTTEHEGEVSTILHDEIKEGDMINLAAPVGGFVLENTTEPQLFLGSGIGVTPLVAMYEAASAKGLDTQMVQVAENEQHLPFKDNFNSIASHHDNAKLYTHLKDKQGYIGAEELQVFLANKPEIYICGGTKFLQSMIEALKSLNYDMDRVHYETFIPRLSVAV

SEQ ID NO: 30580 - protein, 393 aa, Staphylococcus aureus subsp. aureus COL
MTRVVLAAAYRTPIGVFGGAFKDVPAYDLGATLIEHIIKETGLNPSEIDEVIIGNVLQAGQGQNPARIAAMKGGLPETVPAFTVNKVCGSGLKSIQLAYQSIVTGENDIVLAGGMENMSQSPMLVNNSRFGFKMGHQSMVDSMVYDGLTDVFNQYHMGITAENLAEQYGISREEQDTFAVNSQQKAVRAQQNGEFDSEIVPVSIPQRKGEPIVVTKDEGVRENVSVEKLSRLRPAFKKDGTVTAGNASGINDGAAMMLVMSEDKAKELNIEPLAVLDGFGSHGVDPSIMGIAPVGAVEKALKRSKKELSDIDVFELNEAFAAQSLAVDRELKLPPEKVNVKGGAIALGHPIGASGARVLVTLLHQLNDEVETGLTSLCIGGGQAIAAVVSKYK

SEQ ID NO: 30581 - protein, 392 aa, Acinetobacter sp.
MKDVVIVAAKRTAIGSFLGSLASLSAPQLGQTAIRAVLDSANVKPEQVDQVIMGNVLTTGVGQNPARQAAIAAGIPVQVPASTLNVVCGSGLRAVHLAAQAIQCDEADIVVAGGQESMSQSAHYMQLRNGQKMGNAQLVDSMVADGLTDAYNQYQMGITAENIVEKLGLNREEQDQLALTSQQRAAAAQAAGKFKDEIAVVSIPQRKGEPVVFAEDEYIKANTSLESLTKLRPAFKKDGSVTAGNASGINDGAAAVLMMSADKAAELGLKPLARIKGYAMSGIEPEIMGLGPVDAVKKTLNKAGWSLDQVDLIEANEAFAAQALGVAKELGLDLDKVNVNGGAIALGHPIGASGCRILVTLLHEMQRRDAKKGIATLCVGGGMGVALAVERD

SEQ ID NO: 30582 - protein, 1111 aa, Arabidopsis thaliana
MSSNTSRSYSTRSRQNSRVSSQVLVDAKLHGNFEESERLFDYSASINLNMPSSSCEIPSSAVSTYLQKIQRGMLIQPFGCLIVVDEKNLKVIAFSENTQEMLGLIPHTVPSMEQREALTIGTDVKSLFLSPGCSALQKAVDFGEISILNPITLHCRSSSKPFYAILHRIEEGLVIDLEPVSPDEVPVTAAGALRSYKLAAKSISRLQALPSGNMLLLCDALVKEVSELTSYDRVMVYKFHEDGHGEVIAECCREDMEPYLGLHYSATDIPQASRFLFMRNKVRMICDCSAVPVKVVQDKSLSQPISLSGSTLRAPHGCHAQYMSNMGSVASLVMSVTINGSDSDEMNRDLQTGRHLWGLVVCHHASPRFVPFPLRYACEFLTQVFGVQINKEAESAVLLKEKRILQTQSVLCDMLFRNAPIGIVTQSPNIMDLVKCDGAALYYRDKLWSLGVTPTETQIRDLIDWVLKSHGGNTGFTTESLMESGYPDASVLGESICGMAAVYITEKDFLFWFRSSTAKQIKWGGARHDPNDRDGKRMHPRSSFKAFMEIVRWKSVPWDDMEMDAINSLQLIIKGSLQEEHSKTVVDVPLVDNRVQKVDELCVIVNEMVRLIDTAAVPIFAVDASGVINGWNSKAAEVTGLAVEQAIGKPVSDLVEDDSVETVKNMLALALEGSEERGAEIRIRAFGPKRKSSPVELVVNTCCSRDMTNNVLGVCFIGQDVTGQKKLTENYSRVQGDYARIMWSPSTLIPPIFMTNENGVCSEWNNAMQKLSGIKREEVVNKILLGEVFTTDDYGCCLKDHDTLTKLRIGFNAVISGQKNIKKLLFGFYHRDGSFIEALLSANKRTDIEGKVTGVLCFLQVPSPELQYALQVQQISEHAIACALNKLAYLRHEVKDPEKAISFLQDLLHSSGLSEDQKRLLRTSVLCREQLAKVISDSDIEGIEEGYVELDCSEFGLQESLEAVVKQVMELSIERKVQISCDYPQEVSSMRLYGDNLRLQQILSETLLSSIRFTPAWKGLCVSFKVIARIEAIGKRMKRVELEFRIIHPAPGLPEDLVREMFQPLRKGTSREGLGLHITQKLVKLMERGTLRYLRESEMSAFVILTEFPLI

SEQ ID NO: 30583 - protein, 320 aa, Stylosanthes humilis
MALIVPISKVCFIIFMCLNIGLGSGQLSSNFYATKCPNALSTIKSAVNSAVSKEARLGASLLRLHFHDCFVQGCDASVLLDDTSTFTGEKTAFPNVNSARGFDVIDTIKSQVESLCPGVVSCADILALAARDSVVALGGPSWNVQLGRRDSTTASLNSANSDLPGPSFNLSGLISAFSKKGFTAKELVTLSGAHTIGQARCTTFRTRIYNESNIDPSYAKSLQGNCPSVGGDSNLSPFDVTTPNKFDNAYYINLKNKKGLLHADQQLFNGGGSTDSQVTAYSNNAATFNTDFGNAMIKMGNLSPLTGTSGQIRTNCRKTN

SEQ ID NO: 30584 - protein, 248 aa, Malus x domestica
MGRGRVELKRIENKINRQVTFAKRRNGLLKKAYELSVLCDAEVALIIFSSRGKLYEFCSSFSMMKTLEKYQSCSYGSLEANLPANETQNSYQDYLMLKARVEVLQQSQRNLLGEDLSHLNTKELEHLEHQLETSLKQIRSRKTQFILDQLSDLQNREQMLVEANKALKRKLEETSVQAPEGMAWEAAGHGPNNIQQTRLPSHSEAFFHPLEGNNSSSQIGYTHMGSDNEMNVGNPGQYVNGYIPGWML

SEQ ID NO: 30585 - protein, 1162 aa, Arabidopsis thaliana
GVGGRGGGRGGGRGGEEEPSSSHTPNNRRGGEQAQSSGTKSLRPRSNTESMSKAIQQYTVDARLHAVFEQSGESGKSFDYSQSLKTTTYGSSVPEQQITAYLSRIQRGGYIQPFGCMIAVDESSFRIIGYSENAREMLGIMPQSVPTLEKPEILAMGTDVRSLFTSSSSILLERAFVAREITLLNPVWIHSKNTGKPFYAILHRIDVGVVIDLEPARTEDPALSIAGAVQSQKLAVRAISQLQALPGGDIKLLCDTVVESVRDLTGYDRVMVYKFHEDEHGEVVAESKRDDLEPYIGLHYPATDIPQASRFLFKQNRVRMIVDCNATPVLVVQDDRLTQSMCLVGSTLRAPHGCHSQYMANMGSIASLAMAVIINGNEDDGSNVASGRSSMRLWGLVVCHHTSSRCIPFPLRYACEFLMQAFGLQLNMELQLALQMSEKRVLRTQTLLCDMLLRDSPAGIVTQSPSIMDLVKCDGAAFLYHGKYYPLGVAPSEVQIKDVVEWLLANHADSTGLSTDSLGDAGYPGAAALGDAVCGMAVAYITKRDFLFWFRSHTAKEIKWGGAKHHPEDKDDGQRMHPRSSFQAFLEVVKSRSQPWETAEMDAIHSLQLILRDSFKESEAAMNSKVVDGVVQPCRDMAGEQGIDELGAVAREMVRLIETATVPIFAVDAGGCINGWNAKIAELTGLSVEEAMGKSLVSDLIYKENEATVNKLLSRALRGDEEKNVEVKLKTFSPELQGKAVFVVVNACSSKDYLNNIVGVCFVGQDVTSQKIVMDKFINIQGDYKAIVHSPNPLIPPIFAADENTCCLEWNMAMEKLTGWSRSEVIGKMIVGEVFGSCCMLKGPDALTKFMIVLHNAIGGQDTDKFPFPFFDRNGKFVQALLTANKRVILEGKVIGAFCFLQIPSPELQQALAVQRRQDTECFTKAKELAYICQVIKNPLSGMRFANSLLEATDLNEDQKQLLETSVSCEKQISRIVGDMDLESIEDGSFVLKREEFFLGSVINAIVSQAMFLLRDRGLQLIRDIPEEIKSIEVFGDQIRIQQLLAEFLLSIIRYAPSQEWVEIHLSQLSKQMADGFAAIRTEFRMACPGEGLPPELVRDMFHSSRWTSPEGLGLSVCRKILKLMNGEVQYIRESERSYFLIILELPVPRKRPLSTASGSGD

SEQ ID NO: 30586 - protein, 1158 aa, Arabidopsis thaliana
GVGGSGGGRGGEEEPSSSHTPNNRRGGEQAQSSGTKSLRPRSNTESMSKAIQQYTVDARLHAVFEQSGESGKSFDYSQSLKTTTYGSSVPEQQITAYLSRIQRGGYIQPFGCMIAVDESSFRIIGYSENAREMLGIMPQSVPTLEKPEILAMGTDVRSLFTSSSSILLERAFVAREITLLNPVWIHSKNTGKPFYAILHRIDVGVVIDLEPARTEDPALSIAGAVQSQKLAVRAISQLQALPGGDIKLLCDTVVESVRDLTGYDRVMVYKFHEDEHGEVVAESKRDDLEPYIGLHYPATDIPQASRFLFKQNRVRMIVDCNATPVLVVQDDRLTQSMCLVGSTLRAPHGCHSQYMANMGSIASLAMAVIINGNEDDGSNVASGRSSMRLWGLVVCHHTSSRCIPFPLRYACEFLMQAFGLQLNMELQLALQMSEKRVLRTQTLLCDMLLRDSPAGIVTQSPSIMDLVKCDGAAFLYHGKYYPLGVAPSEVQIKDVVEWLLANHADSTGLSTDSLGDAGYPGAAALGDAVCGMAVAYITKRDFLFWFRSHTAKEIKWGGAKHHPEDKDDGQRMHPRSSFQAFLEVVKSRSQPWETAEMDAIHSLQLILRDSFKESEAAMNSKVVDGVVQPCRDMAGEQGIDELGAVAREMVRLIETATVPIFAVDAGGCINGWNAKIAELTGLSVEEAMGKSLVSDLIYKENEATVNKLLSRALRGDEEKNVEVKLKTFSPELQGKAVFVVVNACSSKDYLNNIVGVCFVGQDVTSQKIVMDKFINIQGDYKAIVHSPNPLIPPIFAADENTCCLEWNMAMEKLTGWSRSEVIGKMIVGEVFGSCCMLKGPDALTKFMIVLHNAIGGQDTDKFPFPFFDRNGKFVQALLTANKRVSLEGKVIGAFCFLQIPSPELQQALAVQRRQDTECFTKAKELAYICQVIKNPLSGMRFANSLLEATDLNEDQKQLLETSVSCEKQISRIVGDMDLESIEDGSFVLKREEFFLGSVINAIVSQAMFLLRDRGLQLIRDIPEEIKSIEVFGDQIRIQQLLAEFLLSIIRYAPSQEWVEIHLSQLSKQMADGFAAIRTEFRMACPGEGLPPELVRDMFHSSRWTSPEGLGLSVCRKILKLMNGEVQYIRESERSYFLIILELPVPRKRPLSTASGSGD

SEQ ID NO: 30587 - protein, 1162 aa, Arabidopsis thaliana
GVGGSGGGRGGGRGGEEEPSSSHTPNNRRGGEQAQSSGTKSLRPRSNTESMSKAIQQYTVDARLHAVFEQSGESGKSFDYSQSLKTTTYGSSVPEQQITAYLSRIQRGGYIQPFGCMIAVDESSFRIIGYSENAREMLGIMPQSVPTLEKPEILAMGTDVRSLFTSSSSILLERAFVAREITLLNPVWIHSKNTGKPFYAILHRIDVGVVIDLEPARTEDPALSIAGAVQSQKLAVRAISQLQALPGGDIKLLCDTVVESVRDLTGYDRVMVYKFHEDEHGEVVAESKRDDLEPYIGLHYPATDIPQASRFLFKQNRVRMIVDCNATPVLVVQDDRLTQSMCLVGSTLRAPHGCHSQYMANMGSIASLAMAVIINGNEDDGSNVASGRSSMRLWGLVVCHHTSSRCIPFPLRYACEFLMQAFGLQLNMELQLALQMSEKRVLRTQTLLCDMLLRDSPAGIVTQSPSIMDLVKCDGAAFLYHGKYYPLGVAPSEVQIKDVVEWLLANHADSTGLSTDSLGDAGYPGAAALGDAVCGMAVAYITKRDFLFWFRSHTAKEIKWGGAKHHPEDKDDGQRMHPRSSFQAFLEVVKSRSQPWETAEMDAIHSLQLILRDSFKESEAAMNSKVVDGVVQPCRDMAGEQGIDELGAVAREMVRLIETATVPIFAVDAGGCINGWNAKIAELTGLSVEEAMGKSLVSDLIYKENEATVNKLLSRALRGDEEKNVEVKLKTFSPELQGKAVFVVVNACSSKDYLNNIVGVCFVGQDVTSQKIVMDKFINIQGDYKAIVHSPNPLIPPIFAADENTCCLEWNMAMEKLTGWSRSEVIGKMIVGEVFGSCCMLKGPDALTKFMIVLHNAIGGQDTDKFPFPFFDRNGKFVQALLTANKRVSLEGKVIGAFCFLQIPSPELQQALAVQRRQDTECFTKAKELAYICQVIKNPLSGMRFANSLLEATDLNEDQKQLLETSVSCEKQISRIVGDMDLESIEDGSFVLKREEFFLGSVINAIVSQAMFLLRDRGLQLIRDIPEEIKSIEVFGDQIRIQQLLAEFLLSIIRYAPSQEWVEIHLSQLSKQMADGFAAIRTEFRMACPGEGLPPELVRDMFHSSRWTSPEGLGLSVCRKILKLMNGEVQYIRESERSYFLIILELPVPRKRPLSTASGSGD

SEQ ID NO: 30588 - protein, 1168 aa, Arabidopsis thaliana
MVSGVGGSGGGRGGEEEPSSSHTPNNRRGGEQAQSSGTKSLRPRSNTESMSKAIQQYTVDARLHAVFEQSGESGKSFDYSQSLKTTTYGSSVPEQQITAYLSRIQRGGYIQPFGCMIAVDESSFRIIGYSENAREMLGIMPQSVPTLEKPEILAMGTDVRSLFTSSSSILLERAFVAREITLLNPVWIHSKNTGKPFYAILHRIDVGVVIDLEPARTEDPALSIAGAVQSQKLAVRAISQLQALPGGDIKLLCDTVVESVRDLTGYDRVMVYKFHEDEHGEVVAESKRDDLEPYIGLHYPATDIPQASRFLFKQNRVRMIVDCNATPVLVVQDDRLTQSMCLVGSTLRAPHGCHSQYMANMGSIASLAMAVIINGNEDDGSNVASGRSSMRLWGLVVCHHTSSRCIPFPLRYACEFLMQAFGLQLNMELQLALQMSEKRVLRTQTLLCDMLLRDSPAGIVTQSPSIMDLVKCDGAAFLYHGKYYPLGVAPSEVQIKDVVEWLLANHADSTGLSTDSLGDAGYPGAAALGDAVCGMAVAYITKRDFLFWFRSHTAKEIKWGGAKHHPEDKDDGQRMHPRSSFQAFLEVVKSRSQPWETAEMDAIHSLQLILRDSFKESEAAMNSKVVDGVVQPCRDMAGEQGIDELGAVAREMVRLIETATVPIFAVDAGGCINGWNAKIAELTGLSVEEAMGKSLVSDLIYKENEATVNKLLSRALRGDEEKNVEVKLKTFSPELQGKAVFVVVNACSSKDYLNNIVGVCFVGQDVTSQKIVMDKFINIQGDYKAIVHSPNPLIPPIFAADENTCCLEWNMAMEKLTGWSRSEVIGKMIVGEVFGSCCMLKGPDALTKFMIVLHNAIGGQDTDKFPFPFFDRNGKFVQALLTANKRVSLEGKVIGAFCFLQIPSPELQQALAVQRRQDTECFTKAKELAYICQVIKNPLSGMRFANSLLEATDLNEDQKQLLETSVSCEKQISRIVGDMDLESIEDGSFVLKREEFFLGSVINAIVSQAMFLLRDRGLQLIRDIPEEIKSIEVFGDQIRIQQLLAEFLLSIIRYAPSQEWVEIHLSQLSKQMADGFAAIRTEFRMACPGEGLPPELVRDMFHSSRWTSPEGLGLSVCRKILKLMNGEVQYIRESERSYFLIILELPVPRKRPLSTASGSGDMMLMMPY

SEQ ID NO: 30589 - protein, 1168 aa, Arabidopsis thaliana
MVSGVGGSGGGRGGEEEPSSSHTPNNRRGGEQAQSSGTKSLRPRSNTESMSKAIQQYTVDARLHAVFEQSGESGKSFDYSQSLKTTTYGSSVPEQQITAYLSRIQRGGYIQPFGCMIAVDESSFRIIGYSENAREMLGLMPQSVPTLEKPEILAMGTDVRSLFTSSSSILLERAFVAREITLLNPVWIHSKNTGKPFYAILHRIDVGVVIDLEPARTEDPALSIAGAVQSQKLAVRAISQLQALPGGDIKLLCDTVVESVRDLTGYDRVMVYKFHEDEHGEVVAESKRDDLEPYIGLHYPATDIPQASRFLFKQNRVRMIVDCNATPVLVVQDDRLTQSMCLVGSTLRAPHGCHSQYMANMGSIASLAMAVIINGNEDDGSNVASGRSSMRLWGLVVCHHTSSRCIPFPLRYACEFLMQAFGLQLNMELQLALQMSEKRVLRTQTLLCDMLLRDSPAGIVTQSPSIMDLVKCDGAAFLYHGKYYPLGVAPSEVQIKDVVEWLLANHADSTGLSTDSLGDAGYPGAAALGDAVCGMAVAYITKRDFLFWFRSHTAKEIKWGGAKHHPEDKDDGQRMHPRSSFQAFLEVVKSRSQPWETAEMDAIHSLQLILRDSFKESEAAMNSKVVDGVVQPCRDMAGEQGIDELGAVAREMVRLIETATVPIFAVDAGGCINGWNAKIAELTGLSVEEAMGKSLVSDLIYKENEATVNKLLSRALRGDEEKNVEVKLKTFSPELQGKAVFVVVNACSSKDYLNNIVGVCFVGQDVTSQKIVMDKFINIQGDYKAIVHSPNPLIPPIFAADENTCCLEWNMAMEKLTGWSRSEVIGKMIVGEVFGSCCMLKGPDALTKFMIVLHNAIGGQDTDKFPFPFFDRNGKFVQALLTANKRVSLEGKVIGAFCFLQIPSPELQQALAVQRRQDTECFTKAKELAYICQVIKNPLSGMRFANSLLEATDLNEDQKQLLETSVSCEKQISRIVGDMDLESIEDGSFVLKREEFFLGSVINAIVSQAMFLLRDRGLQLIRDIPEEIKSIEVFGDQIRIQQLLAEFLLSIIRYAPSQEWVEIHLSQVSKQMADGFAAIRTEFRMACPGEGLPPELVRDMFHSSRWTSPEGLGLSVCRKILKLMNGEVQYIRESERSYFLIILELPVPRKRPLSTASGSGDMMLMMPY

SEQ ID NO: 30590 - protein, 1168 aa, Arabidopsis thaliana
MVSGVGGSGGGRGGEEEPSSSHTPNNRRGGEQAQSSGTKSLRPRSNTESMSKAIQQYTVDARLHAVFEQSGESGKSFDYSQSLKTTTYGSSVPEQQITAYLSRIQRGGYIQPFGCMIAVDESSFRIIGYSENAREMLGLMPQSVPTLEKPEILAMGTDVRSLFTSSSSILLERAFVAREITLLNPVWIHSKNTGKPFYAILHRIDVGVVIDLEPARTEDPALSIAGAVQSQKLAVRAISQLQALPGGDIKLLCDTVVESVRDLTGYDRVMVYKFHEDEHGEVVAESKRDDLEPYIGLHYPATDIPQASRFLFKQNRVRMIVDCNATPVLVVQDDRLTQSMCLVGSTLRAPHGCHSQYMANMGSIASLAMAVIINGNEDDGSNVASGRSSMRLWGLVVCHHTSSRCIPFPLRYACEFLMQAFGLQLNMELQLALQMSEKRVLRTQTLLCDMLLRDSPAGIVTQSPSIMDLVKCDGAAFLYHGKYYPLGVAPSEVQIKDVVEWLLANHADSTGLSTDSLGDAGYPGAAALGDAVCGMAVAYITKRDFLFWFRSHTAKEIKWGGAKHHPEDKDDGQRMHPRSSFQAFLEVVKSRSQPWETAEMDAIHSLQLILRDSFKESEAAMNSKVVDGVVQPCRDMAGEQGIDELGAVAREMVRLIETATVPIFAVDAGGCINGWNAKIAELTGLSVEEAMGKSLVSDLIYKENEATVNKLLSRALRGDEEKNVEVKLKTFSPELQGKAVFVVVNACSSKDYLNNIVGVCFVGQDVTSQKIVMDKFINIQGDYKAIVHSPNPLIPPIFAADENTCCLEWNMAMEKLTGWSRSEVIGKMIVGEVFGSCCMLKGPDALTKFMIVLHNAIGGQDTDKFPFPFFDRNGKFVQALLTANKRVSLEGKVIGAFCFLQIPSPELQQALAVQRRQDTECFTKAKELAYICQVIKNPLSGMRFANSLLEATDLNEDQKQLLETSVSCEKQISRIVGDMDLESIEDGSFVLKREEFFLGSVINAIVSQAMFLLRDRGLQLIRDIPEEIKSIEVFGDQIRIQQLLAEFLLSIIRYAPSQEWVEIHLSQVSKLMADGFAAIRTEFRMACPGEGLPPELVRDMFHSSRWTSPEGLGLSVCRKILKLMNGEVQYIRESERSYFLIILELPVPRKRPLSTASGSGDMMLMMPY

SEQ ID NO: 30591 - protein, 1158 aa, Arabidopsis thaliana
GVGGSGGGRGGEEEPSSSHTPNNRRGGEQAQSSGTKSLRPRSNTESMSKAIQQYTVDARLHAVFEQSGESGKSFDYSQSLKTTTYGSSVPEQQITAYLSRIQRGGYIQPFGCMIAVDESSFRIIGYSENAREMLGLMPQSVPTLEKPEILAMGTDVRSLFTSSSSILLERAFVAREITLLNPVWIHSKNTGKPFYAILHRIDVGVVIDLEPARTEDPALSIAGAVQSQKLAVRAISQLQALPGGDIKLLCDTVVESVRDLTGYDRVMVYKFHEDEHGEVVAESKRDDLEPYIGLHYPATDIPQASRFLFKQNRVRMIVDCNATPVLVVQDDRLTQSMCLVGSTLRAPHGCHSQYMANMGSIASLAMAVIINGNEDDGSNVASGRSSMRLWGLVVCHHTSSRCIPFPLRYACEFLMQAFGLQLNMELQLALQMSEKRVLRTQTLLCDMLLRDSPAGIVTQSPSIMDLVKCDGAAFLYHGKYYPLGVAPSEVQIKDVVEWLLANHADSTGLSTDSLGDAGYPGAAALGDAVCGMAVAYITKRDFLFWFRSHTAKEIKWGGAKHHPEDKDDGQRMHPRSSFQAFLEVVKSRSQPWETAEMDAIHSLQLILRDSFKESEAAMNSKVVDGVVQPCRDMAGEQGIDELGAVAREMVRLIETATVPIFAVDAGGCINGWNAKIAELTGLSVEEAMGKSLVSDLIYKENEATVNKLLSRALRGDEEKNVEVKLKTFSPELQGKAVFVVVNACSSKDYLNNIVGVCFVGQDVTSQKIVMDKFINIQGDYKAIVHSPNPLIPPIFAADENTCCLEWNMAMEKLTGWSRSEVIGKMIVGEVFGSCCMLKGPDALTKFMIVLHNAIGGQDTDKFPFPFFDRNGKFVQALLTANKRVSLEGKVIGAFCFLQIPSPELQQALAVQRRQDTECFTKAKELAYICQVIKNPLSGMRLANSLLEATDLNEDQKQLLETSVSCEKQISRIVGDMDLESIEDGSFVLKREEFFLGSVINAIVSQAMFLLRDRGLQLIRDIPEEIKSIEVFGDQIRIQQLLAEFLLSIIRYAPSQEWVEIHLSQVSKQMADGFAAIRTEFRMACPGEGLPPELVRDMFHSSRWTSPEGLGLSVCRKILKLMNGEVQYIRESERSYFLIILELPVPRKRPLSTASGSGD

SEQ ID NO: 30592 - protein, 1161 aa, Arabidopsis thaliana
VSGVGGSGGGRGGEEEPSSSHTPNNRRGGEQAQSSGTKSLRPRSNTESMSKAIQQYTVDARLHAVFEQSGESGKSFDYSQSLKTTTYGSSVPEQQITAYLSRIQRGGYIQPFGCMIAVDESSFRIIGYSENAREMLGLMPQSVPTLEKPEILAMGTDVRSLFTSSSSILLERAFVAREITLLNPVWIHSKNTGKPFYAILHRIDVGVVIDLEPARTEDPALSIAGAVQSQKLAVRAISQLQALPGGDIKLLCDTVVESVRDLTGYDRVMVYKFHEDEHGEVVAESKRDDLEPYIGLHYPATDIPQASRFLFKQNRVRMIVDCNATPVLVVQDDRLTQSMCLVGSTLRAPHGCHSQYMANMGSIASLAMAVIINGNEDDGSNVASGRSSMRLWGLVVCHHTSSRCIPFPLRYACEFLMQAFGLQLNMELQLALQMSEKRVLRTQTLLCDMLLRDSPAGIVTQSPSIMDLVKCDGAAFLYHGKYYPLGVAPSEVQIKDVVEWLLANHADSTGLSTDSLGDAGYPGAAALGDAVCGMAVAYITKRDFLFWFRSHTAKEIKWGGAKHHPEDKDDGQRMHPRSSFQAFLEVVKSRSQPWETAEMDAIHSLQLILRDSFKESEAAMNSKVVDGVVQPCRDMAGEQGIDELGAVAREMVRLIETATVPIFAVDAGGCINGWNAKIAELTGLSVEEAMGKSLVSDLIYKENEATVNKLLSRALRGDEEKNVEVKLKTFSPELQGKAVFVVVNACSSKDYLNNIVGVCFVGQDVTSQKIVMDKFINIQGDYKAIVHSPNPLIPPIFAADENTCCLEWNMAMEKLTGWSRSEVIEKMIVGEVFGSCCMLKGPDALTKFMIVLHNAIGGQDTDKFPFPFFDRNGKFVQALLTANKRVSLEGKVIGAFCFLQIPSPELQQALAVQRRQDTECFTKAKELAYICQVIKNPLSGMRFANSLLEATDLNEDQKQLLETSVSCEKQISRIVGDMDLESIEDGSFVLKREEFFLGSVINAIVSQAMFLLRDRGLQLIRDIPEEIKSIEVFGDQIRIQQLLAEFLLSIIRYAPSQEWVEIHLSQVSKQMADGFAAIRTEFRMACPGEGLPPELVRDMFHSSRWTSPEGLGLSVCRKILKLMNGEVQYIRESERSYFLIILELPVPRKRPLSTASGSGDM

SEQ ID NO: 30593 - protein, 1158 aa, Arabidopsis thaliana
GVGGSGGGRGGKEEPSSSHTPNNRRGGEQAQSSGTKSLRPRSNTESMSKAIQQYTVDARLHAVFEQSGESGKSFDYSQSLKTTTYGSSVPEQQITAYLSRIQRGGYIQPFGCMIAVDESSFRIIGYSENAREMLGLMPQSVPTLEKPEILAMGTDVRSLFTSSSSILLERAFVAREITLLNPVWIHSKNTGKPFYAILHRIDVGVVIDLEPARTEDPALSIAGAVQSQKLAVRAISQLQALPGGDIKLLCDTVVESVRDLTGYDRVMVYKFHEDEHGEVVAESKRDDLEPYIGLHYPATDIPQASRFLFKQNRVRMIVDCNATPVLVVQDDRLTQSMCLVGSTLRAPHGCHSQYMANMGSIASLAMAVIINGNEDDGSNVASGRSSMRLWGLVVCHHTSSRCIPFPLRYACEFLMQAFGLQLNMELQLALQMSEKRVLRTQTLLCDMLLRDSPAGIVTQSPSIMDLVKCDGAAFLYHGKYYPLGVAPSEVQIKDVVEWLLANHADSTGLSTDSLGDAGYPGAAALGDAVCGMAVAYITKRDFLFWFRSHTAKEIKWGGAKHHPEDKDDGQRMHPRSSFQAFLEVVKSRSQPWETAEMDAIHSLQLILRDSFKESEAAMNSKVVDGVVQPCRDMAGEQGIDELGAVAREMVRLIETATVPIFAVDAGGCINGWNAKIAELTGLSVEEAMGKSLVSDLIYKENEATVNKLLSRALRGDEEKNVEVKLKTFSPELQGKAVFVVVNACSSKDYLNNIVGVCFVGQDVTSQKIVMDKFINIQGDYKAIVHSPNPLIPPIFAADENTCCLEWNMAMEKLTGWSRSEVIGKMIVGEVFGSCCMLKGPDALTKFMIVLHNAIGGQDTDKFPFPFFDRNGKFVQALLTANKRVSLEGKVIGAFCFLQIPSPELQQALAVQRRQDTECFTKAKELAYICQVIKNPLSGMRFANSLLEATDLNEDQKQLLETSVSCEKQISRIIGDMDLESIEDGSFVLKREEFFLGSVINAIVSQAMFLLRDRGLQLIRDIPEEIKSIEVFGDQIRIQQLLAEFLLSIIRYAPSQEWVEIHLSQVSKQMADGFAAIRTEFRMACPGEGLPPELVRDMFHSSRWTSPEGLGLSVCRKILKLMNGEVQYIRESERSYFLIILELPVPRKRPLSTASGSGD

SEQ ID NO: 30594 - protein, 1168 aa, Arabidopsis thaliana
MVSGVGGSGGGRGGKEEPSSSHTPNNRRGGEQAQSSGTKSLRPRSNTESMSKAIQQYTVDARLHAVFEQSGESGKSFDYSQSLKTTTYGSSVPEQQITAYLSRIQRGGYIQPFGCMIAVDESSFRIIGYSENAREMLGLMPQSVPTLEKPEILAMGTDVRSLFTSSSSILLERAFVAREITLLNPVWIHSKNTGKPFYAILHRIDVGVVIDLEPARTEDPALSIAGAVQSQKLAVRAISQLQALPGGDIKLLCDTVVESVRDLTGYDRVMVYKFHEDEHGEVVAESKRDDLEPYIGLHYPATDIPQASRFLFKQNRVRMIVDCNATPVLVVQDDRLTQSMCLVGSTLRAPHGCHSQYMANMGSIASLAMAVIINGNEDDGSNVASGRSSMRLWGLVVCHHTSSRCIPFPLRYACEFLMQAFGLQLNMELQLALQMSEKRVLRTQTLLCDMLLRDSPAGIVTQSPSIMDLVKCDGAAFLYHGKYYPLGVAPSEVQIKDVVEWLLANHADSTGLSTDSLGDAGYPGAAALGDAVCGMAVAYITKRDFLFWFRSHTAKEIKWGGAKHHPEDKDDGQRMHPRSSFQAFLEVVKSRSQPWETAEMDAIHSLQLILRDSFKESEAAMNSKVVDGVVQPCRDMAGEQGIDELGAVAREMVRLIETATVPIFAVDAGGCINGWNAKIAELTGLSVEEAMGKSLVSDLIYKENEATVNKLLSRALRGDEEKNVEVKLKTFSPELQGKAVFVVVNACSSKDYLNNIVGVCFVGQDVTSQKIVMDKFINIQGDYKAIVHSPNPLIPPIFAADENTCCLEWNMAMEKLTGWSRSEVIGKMIVGEVFGSCCMLKGPDALTKFMIVLHNAIGGQDTDKFPFPFFDRNGKFVQALLTANKRVSLEGKVIGAFCFLQIPSPELQQALAVQRRQDTECFTKAKELAYICQVIKNPLSGMRFANSLLEATDLNEDQKQLLETSVSCEKQISRIIGDMDLESIEDGSFVLKREEFFLGSVINAIVSQAMFLLRDRGLQLIRDIPEEIKSIEVFGDQIRIQQLLAEFLLSIIRYAPSQEWVEIHLSQVSKQMADGFAAIRTEFRMACPGEGLPPELVRDMFHSSRWTSPEGLGLSVCRKILKLMNGEVQYIRESERSYFLIILELPVPRKRPLSTATGSGDMMLMMPY

SEQ ID NO: 30595 - protein, 1160 aa, Arabidopsis lyrata
GVGGSGRGGEAEPSSSHTTNNRRGGEQAQSSGTKSLRPRESMSKAIQQYTVDARLHAVFEQSGESGKSFDYSQSLKTTTYGSSVPEQQITAYLSRIQRGGYIQPFGCMIAVDESSFRIIGYSENAREMLGLMPQSVPTLEKPEILAMGTDVRSLFTSSSSILLERAFVAREITLLNPVWIHSKNTGKPFYAILHRIDVGVVIDLEPARTEDPALSIAGAVQSQKLAVRAISQLQSLPGGDIKLLCDTVVESVRDLTGYDRVMVYKFHEDEHGEVVAESKRDDLEPYIGLHYPATDIPQASRFLFKQNRVRMIVDCNAKPVLVVQDDRLTQSMCLVGSTLRAPHGCHSQYMANMGSIASLAMAVIINGNEEDGSNVASGRSSMRLWGLVVCHHTSSRCIPFPLRYACEFLMQAFGLQLNMELQLALQMSEKRVLRTQTLLCDMLLRDSPAGIVTQSPSIMDLVKCDGAAFLYHGKYYPLGVAPSEVQIKDVVEWLLANHADSTGLSTDSLGDAGYPDAAALGDAVCGMAVAYITKRDFLFWFRSHTAKEIKWGGAKHHPEDKDDGQRMHPRLSFQAFLEVVKSRSQPWETAEMDAIHSLQLILRDSFKESEAAMNSKAVDGAVQPCRDMAGEQGIDELGAVAREMVRLIETATVPIFAVDAGGCINGWNAKIAELTGLSVEEAMGKSLVSDLIYKENEETVNKLLSRALRGDEEKNVEVKLKTFSPELQGKAVFVVVNACFSKDYLNNIVGVCFVGQDVTGQKLVMDKFINIQGDYKAIVHSPNPLIPPIFAADENTCCLEWNMAMEKLTGWSRSEVIGKMLVGEVFGSCCMLKGPDALTKFMIVLHNAIGGQETDKFPFPFFDRNGKFVQALLTANKRVSLDGKVIGAFCFLQIPSPELQQALAVQRRQDTECFTKAKELAYICQVIKNPLSGMRFANSLLEATDLNEDQKQLLETSVSCEKQISRIVGDMDLESIEDGSFELKMAEFFLGSVINAIVSQAMFLLRDRGLQLIRDIPEEIKSIVVFGDQIRIQQLLAEFLLSIIRYAPSQEWVEIHLSQVSKQAADGFTAIRTEFRMACPGEGLPPELVRDMFHSSRWTSPEGLGLSVCRKILKLMNGEVQYIRESERSYFFIILELPVPRKRPLSTASGNSNMMLMMPY

SEQ ID NO: 30596 - protein, 1165 aa, Arabidopsis halleri
  misc_feature (585)..(585): Xaa can be any naturally occurring amino acid
  unsure (1)..(1165): unsure at all Xaa locations
MVSGGGSKTSGAEAASSGHRVNRSRHTSAEQAQSSASKAQRSQNQQPQNHGAGTESTSKAIQQYTVDARLHAVFEQSGESGKSFDYSQSLKTAPYDPSVPEQQITAYLSRIQRGGYTQPFGCLIAVEESTFTIIGYSENAREMLGLMSQSVPSIEEISEVLTIGTDLRSLFKSSSIVLLERAFVAREITLLNPIWIHSKNTGKPFYAILHRVDVGILIDLEPARTEDPALSIAGAVQSQKLAVRAISHLQSLPGGDIKLLCDTVVDSVRDLTGYDRVMVYKFHEDEHGEVVAESKRDDLEPYIGLHYPATDIPQASRFLFKQNRVRMIVDCYASPVRVVQDDRLTQSICLVGSTLRAPHGCHAQYMTNMGSIASLAMAIIINGNEEDGNGVNTGGRNSMRLWGLVVCHHTSARCIPFPLRCACEFLMQAFGLQLNMELQLALQVSEKRVLRMQTLLCDMLLRDSPTGIVTQRPSIMDLVKCNGAAFLYQGKYYSLGVAPTEAQINDIVEWLLANHSDSTGLSTDSLGDAGYPRAAALGDAVCGMAVACITKRDFLFWFRSHTEKEIKWGGAKHHPEDKDDGQRMXPRASFQAFLEVVKSRCQPWETAEMDAIHSLQLILRDSFKESEAMDSKASAPGGVQPHGDDMAEQGLQEIGTVAREMIRLIETATVPIFAVDIDGCINGWNAKIAELTGLSVEEAMGKSLVRDLIYKEYEETADRLLSCALKGDEGKNVEVKLKTFAPELQGKAVFVVVNACSSKDYLNNIVGVCFVGQDVTGHKIVMDKFINIQGDYKAIIHSPNPLIPPIFAADENTCCIEWNTAMEKLTGWPRSEVIGKLLVREVFGSCCRLKGPDALTKFMIVLHNAIGGQETDKFPFPFFDREGKFIQALLTLNKRVSVDGKIIGAFCFLQIPSPELQQALEVQRRQESEYFSRRKELAYIFQFIKNPLSGLRFTNSLLEATDLNEDQKQLLETSVSCEKQISKIVGEMDVISIGDGSFLLERTEFFIGSVINAVVSQVIFVVRERNIQLIRNIPAEIKSMAVYGDQIRLQQVLAEFLLSIVRYAPLEGSVELHLCPVLKQMADGFSAIRLEFRMACAGEGVPPEKVQDMFHSSRWTSPEGLGLSVCRKILKLMNGGVQYIREFERSYFLIVIELPVPLMMMMPSS

SEQ ID NO: 30597 - protein, 1045 aa, Cleome hassleriana
GESGKSFDYSRSLKTTTYGSSVPEKQITAYLSKIQRGGYIQPFGCMIAVDESTFKIISYSENAREMLGLMPQSVPSIEKPEILAIGTDVRSLFTPSSTVLLERAFVAREITLLNPVWIHSKNTGKPFYAILHRIDVGIVIDLEPARTEDPALSIAGAVQSQKLAVRAISQLQSLPGGDIKLLCDTVVESVRDLTGYDRVMVYKFHEDEHGEVVAESKRADLEPYIGLHYPATDIPQASRFLFKQNRVRMIVDCHATPVCVIQDERLTQPLCLVGSTLRAPHGCHAQYMANMGSLASLAMAVIINGNEEEAGSVAGGRNSMRLWGLVVCHHTSARCIPFPLRYACEFLMQAFGLQLNMELQLALQMSEKRVLRTQTLLCDMLLRDSPTGIVTQKPSIMDLVKCDGAAFLYQGRYYPLGVAPSEAQIKDIVEWLLANHGDSTGLSTDSLADAGYPGAATLGDAVCGMAVAYITRKDFLFWFRSHTAKEIKWGGAKHHPEDKDDSQRMHPRSSFKAFLEVVKSRSLPWENAEMDAIHSLQLILRDSFKESETVNTRVAVRADQPGGDMAVQGLDELSAVAREMVRLIETATVPILAVDVEGRINGWNGKIAELTGLSVEEAMGKSLVRDLIYKEYEETVEKLLSHALRGEEDKNVEIKMKTFSRELEGQAVFVVVNACSSKDYLNNIVGVCFVGQDVTGQKIVMDKFIHIQGDYKAIVHSPNPLIPPIFAADENTCCLEWNTAMEKLTGWSRAEVIGKMLVGEVFGSCCRLKGPDTLTKFMIVLHNAIGGEETDKFSFPFFDRNGKFVQALLTANKRVSIDGKITGAFCFMQIPSPELQQALAVQRQQETECISRAKELAYICQVIKNPLSGLRFTNLLLEATGLSEDQKQLLETSVSCEKQISRIIGDMNLETIEDGLVEVEKEEFIMGSVINAVVSQVMMLVRERGLQLIRDIPEEIKTMAVYGDQMRIQQVLAEFLLSIIKYAPSQGWVEIHLNPILKHLPDGSSSLRSEFRMACGGEGLPPELVRDMFHGSRWTTPEGLGLSVC

SEQ ID NO: 30598 - protein, 583 aa, Lactobacillus paracollinoides
MQAQSKNNTKFNFKTFMGLINRIHPRYWQLLFGFFLGVVATAMQLMVPGIAKGIINSIGHSMDVGLIVAVILLFVFSTIIGAFSGSILGLFGEDVVYKLRTTLWDKILTLPVGYFDQTKSGEITSRLVNDSTQVKELLANSVPKTATSILQLVGALVLMLIMDWRMTIIMFIAVPLVLICLLPIVRQSHKVARARQDALADLNGKAGEMLGEVRLVKSSTAENLERTAGDKRMYRLYRIGLKEAIYDSIAGPVMGMVMMAMVLGILGYGAIRVREGAIDIGTLFSFLMYLVQMISPFAVLGQFMSDVAKASGSTTRIQALLQTHEEDRLTGTDLDIGDQTLQMNHVSFSYDQHHPILSDVSFTAEPNSVIAFAGPSGGGKSTIFSLIERFYEPNEGSITIGNTNITDIQLADWRQQIGLVGQDAAIMSGTIRYNLTYGLPGHFSDEQLWHVLEMAYATQFVQKMPRGLDTEVGERGVKVSGGQRQRLAIARAFLRNPKILMLDEATASLDSESEMMVQKALDQLMANRTTLVIAHRLSTITNADEIYFIENGRVTGQGTHQQLVKTTPLYREYVKNQSATSNG

SEQ ID NO: 30599 - protein, 458 aa, Staphylococcus epidermidis RP62A
MAKQLQRELNNRHIQLIAIGGAIGTGLFLGSGQTISLTGPSLLFTYMLIGIVLFAFMRALGELLLSNSKFNSFVDIANEYLGPFGGFVIGWTYWVCWIVSSMSDLTAMGQYFAYWYPQVPHWLTVLFIVLLLISFNLLGARLFGELEFWFSIIKVVTIITMVIVGLVLIFLSFKTEYGHASFGNLIHHGGMFPHGAAGFLMSFQIAVYSFIGIELIGVTAGETKNPEKTIPKAINNVPIRILLFYIGGLLVIMSVIPWFKVDPDSSPFVKLFTLIGVPFAAGIVNFVVLTAAASATNSGIYSNSRILFGLAKQGLGPKVLTKTNSNGVPYLSMLVSSITLLIAALLNFVFPDAIKLFIYVTTLSTVLFLVVWGMIIVSYIAYVKKNPEQHQSSAFKLWGGKIIAYIVLSFFIFIFILLFFSKDTRVAIFISPLWFIFLFFYYKKYKNNAESLADRQRH

SEQ ID NO: 30600 - protein, 614 aa, Staphylococcus epidermidis RP62A
MNLSVTNSPFTEGQAKQINELLHTLSPNQQVWLSGYLMANQQSNTSTDSVEQHNLDDNTEAMLHEKEPSVEPEARSITILYGSESGNAQGLAEIFEQRLSDIGNDVTLKSMDDFKPKNLKKVEDLFIITSTHGEGDPPDNAVELHEYIHGRKAPKLDGVRFSVLALGDQTYEFFCQTGKDFDNRLAELGAERLYHRTDCDVDYEEDAEKWMANVINTIDSTPAGTESEQVVSESIKSAKEKKYSKSNPYDAEVLTNINLNGRGSDKETRHIELLLDNFGEEYEPGDCVVVLPQNDPAIVDLLISTLGWSPETQVLINEDGDTLNLEEALTSHFEITKLTKPLIENAAIFFDNEELSEKIQDKEWIQNYVEGRDLIDLLNDFATTELQPENLHQLLRKLPPREYSISSSYKATPDEVHITVGAVRYQAHGRERSGVCSVQFAERIQEGDTIPIYLKRNPNFKFPQDESTPVIMIGPGTGVAPFRSYMQEREELGFEGNTWLFFGDQHFTTDFLYQTEWQEWLEDGTLSKLDVAFSRDTDKKVYVQHKIAENSEQFNRWIENGAIIYVCGDESKMAKDVHQAIKNVLIKEQNLSETDAEEYLKQMKRDKRYQRDVY

SEQ ID NO: 30601 - protein, 128 aa, Staphylococcus epidermidis RP62A
MIRTFMNSKIHRARVTESNLNYVGSITIDANILDAVDILPNEKVAIVNNNNGARFETYVIAGERGSGKMCLNGAASRLVEVGDVIIIMTYAQLNEDEMVDHSPKVAVLNENNEIIEMINEKENTISNV

SEQ ID NO: 30602 - protein, 483 aa, Staphylococcus epidermidis RP62A
MGSFFNRMTRKENPTIYQNKDGHLKRTLRVRDFLALGVGTIVSTSIFTLPGVVAAEHAGPAVALSFLLAAIVAGLVAFTYAEMASTMPFAGSAYSWINVLFGELFGWVAGWALLAEYFIAVAFVASGFSANLRGLIAPLGISLPKSLSNPFGSNGGVIDIIAAVVIILTALLLSRGMNEAARMENVLVILKVLAIILFVIVGLTAINFSNYIPFIPEHKVTETGDFGGWQGIYAGVSMIFLAYIGFDSIAANSAEAINPQKTMPRGILGSLIVAIVLFVAVALVLVGMFHYSQYADNAEPVGWALRESGHGIIAAIVQAISVIGMFTALIGMMLAGSRLLYSFGRDGLLPSWLSQLNHKHLPNRALVILTIIGVVIGSMFPFAFLAQLISAGTLVAFMFVSLAMYRLRKREGKDLPKPEFKLPLYPILPAITFILVLLVFWGLSFEAKLYTLIWFIVGIIIYLIYGIRHSKKNDEEAYQVPRE

SEQ ID NO: 30603 - protein, 445 aa, Staphylococcus epidermidis RP62A
MKRPIIQKLNHLIEKKAISMHVPGHKNMTIGYLNRLDLAMDMTEITGLDDMHYPEGIILESMENFRKHKNYDAFLLVNGTTSGILSVIQAFSTRKGKYLISRNVHKSVFHGLDITQQQATITKTDVSKKTNQYVNPKINQDKNQYYKLAICTYPNYYGETFDISQYIKQLHHRGIPILVDEAHGAHFGLYGFPESSMNFNADYVVQSYHKTLPALTMGSVIYIHKDAPLRQQVIDYLTYFQTSSPSYLIMSSLELANKFYKEYDSTLFDQRRKMLIDLLVNMGFTVIEPEDPLKLVVSFEGVEGYDVQKWFEDKEIYVELADMYQVLLVLPLWHEGDKFPFKLLIEKIREINVPKKCTRDIKPLNFMTGFSEYKTVHFQNTKEVSIKRAEGKVLAQHIVPYPPGIPVMFKGEVVTSHMIDLLNKYDKQNIKVEGLNHKKILVKDE

SEQ ID NO: 30604 - protein, 496 aa, Staphylococcus epidermidis RP62A
MENKNNNVDRGNLKQNLSEKFVWAIAYGSCIGWGAFILPGDWIKQSGPIASSIGIVIGALLMILIAVSYGALVEKFPVSGGAFAFSFLSFGRYVSFFSSWFLTFGYVCVVALNATAFSLLIKFLLPNVLNNGKLYTVAGWDVYITEIVIATVLLIVFMLITIRGASVSGSLQYYFCVAMVLVVALMFIGSFFSSHFSLSHLEPLASVDKGWFQSIIMIVSIAPWAYVGFDNIPQTAEEFNFSPNKTFKLIVYSLLAASLTYVVMLLYTGWLGTQATSLNGNLWLTGAVTQDAFGFIGLAVLAVAIIMGIFTGLNGFLMSSSRLLFSMGRSGIMPTVFSKLHSKHKTPYVAIIFLVAVSLIAPWLGRTALTWIVDMSSTGVSIAYFITCLSATKLFSFNKQSNTYAPVYKIFGIIGSIVSFVFLCLLLIPGSPAALSIPSYIALGIWLVIGLIFFIIRLPKLKKMNNDEMSRLILNHSEDEVLEMIHEPGQSNSTNK

SEQ ID NO: 30605 - protein, 329 aa, Staphylococcus epidermidis RP62A
MADLLSVLQDKLSGKNVKIVLPEGEDERVLIAATQLQKTDYVSPIVLGNEDNIKSLASKHALDLTQIEIIDPATSELKDELVDAFVERRKGKATKEQAVELLDNVNYFGTMLVYTGKAEGLVSGAAHSTGDTVRPALQIIKTKPGVSRTSGIFFMIKGDEQYIFGDCAINPELDAQGLAEIAVESAKSAQSFGMNPKVAMLSFSTKGSAKSDDVTKVQEALKLAQEKAEADQLEHVVIDGEFQFDAAIVPSVAEKKAPGAKIQGDANVFVFPSLEAGNIGYKIAQRLGGYDAVGPVLQGLNSPVNDLSRGCSTEDVYNLSIITAAQALQ

SEQ ID NO: 30606 - protein, 575 aa, Staphylococcus epidermidis RP62A
MKEQNPLFFLFKRLSWPYGLIIAAVIITSLGSLSGLLVPLFTGRLVDKFSVSSINWGMIAIFGSIFLVNALLSGIGLYLLSKIGEKIIYAIRSLLWEHIIQLKMPFFDKNESGQLMSRLTDDTKVINEFISQKLPNLLPSVLTLIGSLVMLFIMDWKLTLLTFITIPVFILIIVPLGRVMQKISTNTQSEIANFSGLLGRVLTEMRLVKVSNTERLELDNAHTNLKKIYRLGLKQAKISAVVQPISGVVMLLTIAIILGFGALEIGTGAITPGTLIAMIFYVIQLSMPLINLSTLVTDYKKAVGASSRIYEIMQEPIEPTEALSESKDVTIIDGELVFEHVDFKYDVKKILEDVSFSIPQGEVSAFVGPSGSGKSTIFNLIERMYDIERGDIKYGNQSIFDIPLSKWRTKIGYVMQSNSMMSGTIRDNILYGINRKVDDEELIEYAKLANCHDFIMQFDEGYDTMVGERGLKLSGGQRQRIDIARSFVKNPDILLLDEATANLDSESELKIQEALETLMEGRTTVVIAHRLSTIKKAGQIVFIDKGEVTGKGTHHELMASHDKYRHFVTSQKLSD

SEQ ID NO: 30607 - protein, 323 aa, Staphylococcus epidermidis RP62A
MNKILVTRQIPQHYIEQLKKIGQVVMWEHDLTPMSRESFLANVEDATACVITLSEHIDEEVFLRAQQLKVIANMAVGFDNIDITLAKKHGVVVTNTPHVLTETTAELGFTLMLTVARRIIEATSYIQEGKWKSWGPYLLSGKDVYGATVGIFGMGDIGKAFARRLQGFDARIIYHNRKRDLIAESELNATYVTFSSLLEQSDFIICTAPLTKKTENQFDNRAFNKMKNDAVFINIGRGAIVDEEALLEALKNHEIQACGLDVMRQEPIQPDHPILKLPNAVVLPHIGSSSQVTRNRMVQLCIDNIKAVLNNDAPLTPVTPLHI

SEQ ID NO: 30608 - protein, 869 aa, Staphylococcus epidermidis RP62A
MDINQMTYAVQGALQKAVAYSKEYELQNIEVEALLKAAMNENDSLFKSILERANIDVDQLIKAYDNQLSHYPTVQGDNVQYGQYISAKTNELLDKAEKYMKSYEDEFISMEHILRAAIDTDETTQKWVGNKVEVIKEIITKVRGGNHVTSQNPEVNYEALEKYGRDLVEEVRQGKMDPVIGRDEEIRNTIRILSRKTKNNPVLIGEPGVGKTAIVEGLAQRIVRKDVPESLLDKTIFELDLSALVAGAKYRGEFEERLKAVLKEVKESEGRIILFIDEIHMLVGAGKTDGAMDAGNMLKPMLARGELHCIGATTLNEYREYIEKDSALERRFQKVGVSEPDVEDTISILRGLKERYEVYHGVRIQDRALVAAAELSDRYITDRFLPDKAIDLVDQACATIRTEMGSNPTELDQVNRRVMQLEIEESALKNESDNPSKHRLEELQEELSNEKEKQSSLKSRVEQEKEKIAKVQEKRAELDSSRQALEDAQTEGNLEKAAELQYGTIPQLEKELQKFEEAFQDETGEDSERMIREVVSDEEIGDIVSQWTGIPVSKLVETEREKLLSLSDILHKRVVGQDKAVDLVSDAVVRARAGIKDPNRPIGSFLFLGPTGVGKTELAKSLASSLFDSEKHMIRIDMSEYMEKHAVSRLIGAPPGYVGHDEGGQLTEAVRRNPYSVILLDEVEKAHSDVFNVLLQILDEGRLTDSKGRSVDFKNTIIIMTSNIGSQVLLENVKDAGEISDDTEKAVMDSLHAYFKPEILNRMDDIVLFKPLSVNDMSMIVDKILTQLNMRLLDQHISIEVTEEAKKWLGEEAYEPQFGARPLKRFVQRQIETPIARMMIKESLPEGTIIKVDLNDNKELDFKVVKPTS

SEQ ID NO: 30609 - protein, 394 aa, Staphylococcus epidermidis RP62A
MKLSLNSSSKFLRAPSIRQFSNRIKAIDDCVNLTIGQPDFPMPDVVKNAYIKAIKNDKTSYSHNKGLFETREAISQYFKRKYNFLYSEEEIIVTNGASEALDTSLRSIIEPGDDILIPGPIYAGYIPLVETLGGNPVYIDTTQSDFKVTPELIESHLTHKTKAILLNYPTNPTGVILERSEVKNIVDTLVNKHIFIISDEIYAENTFKGQHTSFAEFPEIRDQLLLIGGLSKSHSATGIRIGFLLGPEYLIEKLTFMHAYNCICANVPAQIACTTALNEGINAPLYMNRDYIERRNYLKEKLESLGFELTAQPEGAFYIFPSIKRFTENDFEFCVDVLEKAHLAMVPGSSFTDIGKGYIRISYAYDMETLKKGMHRLENYLQQHYPEQMTTPTK

SEQ ID NO: 30610 - protein, 458 aa, Staphylococcus epidermidis RP62A
MKVAKFGGSSVSTAEQIKKVLTIVNEDPERKIIIVSAPGKRHNDDIKTTDLLIRLYEKVLNKLNYESKKQEIIQRYADIVEELGIGNDILITINDTLEEYIKNLSDKPNRLYDALLSCGENFNAQLIAQYNNSQGIPTRYISPKEAGLTVTDLPQQAQILDSAYNDIYKLRDYDEKLIIPGFFGVSKQNYIVTFPRGGSDITGAIIARGVRASLYENFTDVSGIYKANPNIINNPELIEEITYREMRELSYAGFGVFHDEALQPLYKDRIPVVIKNTNRPNDKGTYILHDREIDSKNVISGISCDKGFTVINIKKYLMNRLVGFTRKILGVLEDYNISFDHMPSGIDNISIIMRTNQIQGKESQVLNAIRKRCEVDELSIDHDLAVLMIVGEGMNQVVGTASKITHALSESNINLIMINQGASEISMMFGIHEADAEKAVLSTYEFCYNGVCLKNLCK

SEQ ID NO: 30611 - protein, 400 aa, Staphylococcus epidermidis RP62A
MNRSVLKFGGSSVSDFKKIKNIAEMLKTRIEDGEELIVVVSAMGKTTDQLMNNVSSLTSTPKDQELALLLTTGEQQTVSYLSMVLNDIGVNAKAMTGYQAGIKTVGHHLKSKIAEINPNIFDEAFKDHDILVVAGFQGINDDFELTTLGRGGSDTTAVALAASNQIPCEIYTDVDGVYATDPRILNEAKRLEYVSYEEMMEMSALGAGVLETRSVELAKNYDIPLYLGRTLSNMKGTWIMSKSDLLEKKAVTGVALDTHMMHVTISYPLPDNQLLTQLFTALEEESVNVDMISQIVNLEGLQLSFSIKDSDAHQISSILENLSIHFSALDYKINEAYVKISLIGSGMRDMSGVASKAFMTLINSDIPFYQTTTSEISISYVIDEENGEKAVEELYHAFEI

SEQ ID NO: 30612 - protein, 77 aa, Staphylococcus epidermidis RP62A
MKEFSLGGFRVMKQGTVKWFNAEKGFGFIEVEGENDVFVHFSAINQEGYKSLEEGQSVEFEVVEGDRGPQAANVVKL

SEQ ID NO: 30613 - protein, 299 aa, Staphylococcus epidermidis RP62A
MTEHKSGFVSIIGRPNVGKSTFVNRVIGHKIAIMSDKAQTTRNKIQGVMTRDDAQIIFIDTPGIHKPKHKLGDYMMRVAKNTLSEIDAIMFMVNVNEDIGRGDEYIMEMLKNVKTPIFLVLNKIDLVHPDTLMPKIEQYQSYMDFTDIIPISALEGLNVDHFIDVLKSFLPEGPKYYPDNQISDHPEQFVVSEIIREKILHLTSEEIPHAIGVNVDRMIKEDEDRVRIETTIYVERDSQKGIVIGKGGKKLKEVGKRARRDIEMLLGSKVYLELWVKVQRDWRNKVNFIRQIGYVEDQD

SEQ ID NO: 30614 - protein, 609 aa, Staphylococcus epidermidis RP62A
MGKVIGIDLGTTNSCVSILEGDEPKVIQNPEGARTTPSVVAFKNGETQVGEVAKRQAITNPNTVQSIKRHMGTDYKVDIEGKSYTPQELSAMILQNLKSTAENYLGDTVDKAVITVPAYFNDGERQATKDAGKIAGLEVERIINEPTAAALAYGLDKTETDQKVLVFDLGGGTFDVSILELGDGVFEVLSTAGDNKLGGDDFDQVIIDYLVSEFKKENGVDLSQDKMALQRLKDAAEKAKKDLSGVSQTQISLPFISAGENGPLHLEISLTRSKFEELADSLIKKTMEPTRQALKDAGLSTSEIDEVILVGGSTRIPAVQEAVKKEIGKEPHKGVNPDEVVAMGAAIQAGVITGDVKDVVLLDVTPLSLGIEIMGGRMNTLIERNTTIPTSKSQVYSTAADNQPAVDIHVLQGERPMASDNKTLGRFQLTDIPPAPRGVPQIEVTFDIDKNGIVNVTAKDLGTNKEQNITIQSSSSLSDEEIDRMVKDAEENAEADKKRREEVDLRNEADSLVFQVEKTVKDLGENISDEDKKNAEEKKDALKTALEGEDIDDIKAKKEELEKVIQELSAKVYEQAQQAQQQGQEEQGSQDSTVEDADFKEVKDDEDKK

SEQ ID NO: 30615 - protein, 430 aa, Staphylococcus epidermidis RP62A
MFVDQVKISLKAGDGGNGITAYRREKYVPFGGPAGGDGGIGASVVFEVDEGLRTLLDFRYQRHFKAKKGENGQSSNMHGRNAEDLVLKVPPGTIIKSVESEEVLADLVEDGQRAIVARGGRGGRGNSRFATPRNPAPDFSENGEPGEELEVTLELKLLADVGLVGFPSVGKSTLLSIVSKAKPKIGAYHFTTIKPNLGVVSTPDHRSFVMADLPGLIEGASDGVGLGHQFLRHVERTKVIVHMIDMSGSEGRNPLDDYKIINQELINYKQRLEDRPQIIVANKMDLPDSQGNLSHFKEQLDNDVTVVPVSTITRDNIDQLLYQIADKLEEVKDVDFSVEEDENLGVNRVLYKHTPSADKFTISRDDDGAYVVSGNAIERMFKMTDFNSDPAVRRFARQMRSMGIDDALRERGCSNGDIVRILGGEFEFVE

SEQ ID NO: 30616 - protein, 452 aa, Staphylococcus epidermidis RP62A
MAENLQRELSNRHVQLIAIGGAIGTGLFLGAGQTIAMTGPSILLTYIIIGFMLFMFMRGLGEIIIQNTNFKSFADVTNTYIGPFAGFVTGWTYWLCWIITGMAEVTAVAKYISFWFPDIPNWISALFCVLILMSFNLLSAKLFGELEFWFAIIKIVTIIALIVIGVIMILFAFKTPFGNTSLTHLYQHGIFPKGASGFFMSFQMALFSFVGIEMIGVTAGETKDPEKTIPKAINSVPIRILIFYVGALAVIMSIIPWDKVDPDNSPFVRLFALIGIPFAAGIINFVVLTAAASSCNSGIFSNSRMLYGLSNQNQAPPTFASTNKHGVPHKAIIASSALLLIAALLNYIFPDATLVFTYVTTISTVLFVVVWALIIIAYINYSRKNPELHKKATYKLPGGQYMGYLILIFFVFVFALLFINVDTRRAIYCTPIWFILLGLMYLRYKKADKEAR

SEQ ID NO: 30617 - protein, 379 aa, Staphylococcus epidermidis RP62A
MIYLDNAATTKADQDVVDSFVKVNQTLYFNPNSPHHAGVQAEQLLLKAKSEINRILNLNNQFDIIFTSGATESNNILLKGIAYMKKETANEIITSVLEHPSVLEVMRYLEREKGFKLKYVDVTKEGKLDTEHLKSLMTDKVGLVTCMYVNNIMGQIQPIEEIANIVKNYPRAHFHVDAVQALGKVPMQINHIDSLSLSGHKFNGLKGQGLLLLKNIQNIEPIVHGGGQEYGLRSGTINLPMAISMVRAIKNAVDQTKELNLRLSNYKNKLLSFLAEYKNVFINSPQNASPHIINIGFPGVKGEVLVNAFSKQNVMVSTTSACSSKMNKLNEVLLAMEIAESKIEGSIRISLGAHTTENDILSFMNAFESVYKEIKELLK

SEQ ID NO: 30618 - protein, 578 aa, Staphylococcus epidermidis RP62A
MIKRYLKFVKPYRYRIIATIIVGIIKFGIPMLIPLLIKYAIDGVINNHSLTNQEKFSHLGVAIGIALFIFLIVRPPIEFIRQYLAQWTSNKILYDIRKQLYNHLQALSVRFYANNQVGQVISRVINDVEQTKDFILTGLMNIWLDCITIIIALSIMFFLDVKLTFAAIFIFPFYILTVYFFFGRLRKLTRVRSQALAEVQGFLHERVQGMSVIKSFAIEDNEAKNFDNHNKNFLQRAFQHTRWNAYSFAAINTVTDLGPIIVIGVGSYLAITGSITVGTLAAFVGYLEQLFGPLRRLVSSFTTLTQSFASMDRVFQLMDEDYDIKNGIGAQPIKISKGQIDLKHVSFKYNENEKEVLHDINLTINKGETVAFVGMSGGGKSTLINLIPRFYDVTQGEILIDHHNVKDFLTGSLRNQIGLVQQDNILFSDTVKENILLGRPDATDDEVVEAAKMANAHDFISNLPNGYDTEVGERGVKLSGGQKQRLSIARIFLNNPPVLILDEATSALDLESEAIIQEALDVLSKDRTTLIVAHRLSTITHADRIVVMENGRIVETGTHQQLINKRGAYEHLYSIQNL

SEQ ID NO: 30619 - protein, 511 aa, Staphylococcus epidermidis RP62A
MFTLGTALSNQIDANWQTYVMIIVYFIILLIIGFYGYRQATGNLSEFMLGGRSIGPYITALSAGASDMSGWMIMGLPGSVYSTGLSAIWITIGLTLGAYINYFVVAPRLRVYTEIAGDAITLPDFFKNRLDDKKNIIKIISGLIIVVFFTLYTHSGFVSGGKLFESAFGLNYHAGLLIVAIIVIFYTFFGGYLAVSITDFFQGVIMLIAMVMVPIVALLKLNGWDTFHDIAQMKPTNLDLFRGTTVLGIVSLFSWGLGYFGQPHIIVRFMSIKSHKLLPKARRLGISWMAVGLLGAIGVGLTGISFISERHIKLEDPETLFIVMSQILFHPLVGGFLLAAILAAIMSTISSQLLVTSSSLTEDFYKLIRGSDKASSHQKEFVLIGRLSVLLVAIVAITIAWHPNDTILNLVGNAWAGFGAAFSPLVLYSLYWKDLTRAGAISGMVAGAVVVIVWISWIKPLATINAFFGMYEIIPGFIVSVLITYIVSKLTKKPDDYVIENLNKVKHVVKE

SEQ ID NO: 30620 - protein, 509 aa, Staphylococcus epidermidis RP62A
MQNFKELGISDKTVQTLEAMGFKEPTPIQKDSIPYALEGDDILGQAQTGTGKTGAFGIPLIEKVVGQQGVQSLILAPTRELAMQVAEQLREFSKGQKVQVVTVFGGMPIERQIKALKRGPQIVVGTPGRVIDHLNRRTLKTQGIHTLILDEADEMMNMGFIDDMRFIMDKIPAEQRQTMLFSATMPKAIQELVQQFMKAPKIIKTMNNEMSDPQIDEYYTIVKELEKFDTFTNFLDVHQPELAIVFGRTKRRVDELTSALLSKGYKAEGLHGDITQAKRLEVLKKFKNDQIDILVATDVAARGLDISGVSHVYNFDIPQDTESYTHRIGRTGRAGKEGIAVTFVNPIEMDYIRQIEDVNNRRMKALRPPHRKEVLKAREDDIKDRVQNWMSRENEPRLQRISSELLKEYDSTELVASLLQELVEANDEVEVQLTFEKPLARKNRSSKGGSRRSNHKRGNGKFDNKNRRSKGSKGQSSKKKNQKKFDRRDKQQKSGNQSLKGRTFADHQK

SEQ ID NO: 30621 - protein, 317 aa, Staphylococcus epidermidis RP62A
MTKVYIAGAIPEVGLNLLKEHFEVDMYDGEGLIDKETLKKGVEHADALISLLSTSVDKDIIDSANNLKIIANYGAGFNNIDVEYARQQNIDVTNTPHASTNATADLTIGLILSVARRIVEGDHLSRTTGFDGWAPLFFRGREVSGKTIGIIGLGEIGGAVAKRARAFDMDVLYTGPHRKEEKERDIGAKYVDLDTLLKNADFITINAAYNPSLHHMIDTEQFNKMKSTAYLINAGRGPIVNEQSLVEALDNKAIEGAALDVYEFEPEITDALKSFKNVVLTPHIGNATFEARDMMAKIVANDTIKKLNGDEPQFIVN

SEQ ID NO: 30622 - protein, 374 aa, Staphylococcus epidermidis RP62A
MKIAIVGAGIGGLTAAALLEEQGHQVKVFEKNTSINELSAGIGIGDNVLKKLGHHDLAKGIKNAGQNLTAMNIYDEQGTPLMSAKLKSHSLNVALSRQTLIEIIQSYVEESSIHTGFKVTKIEQTSCKVTLHFTKQESESFDLCIGADGLHSVVRESVGARTKIRYNGYTCFRGMVEDVQFNDQHVANEYWGVKGRVGIVPLINQRAYWFITVHAKEGDPKYQSFGKPHLQAYFNHFPNEVRNVLERQSETGILLHDIYDLKPLKTFVYGRTILMGDAAHATTPNMGQGASQAMEDAIVLVNCLEKYDFNKAIERYDKLRVKHTTKVIRRSKKIGKMAQKHHKLTVKLRNTAMKLIPNALASAQTKFLYKSKEK

SEQ ID NO: 30623 - protein, 262 aa, Oryza sativa Japonica Group
MSLSNLVLGFFEEAEREQRWPENGDDDDEGSSGSGAAESKAFWQNQHSQLHEALAKTSQVESRIREDTEEAIRKMRAAGAVCSCARRAAAGDCRSCTLRHVDERLRDAGYNSAICKSKWTRSPDIPSGEHSYVDVVVQTRSGKAVRVVVELNFRAEFEVARASAEYRALVTALPEVFVGRADRLRAVVKAMCAAAKQCMKENNMHMGPWRKHKYMQSKWLGTPERVAAAAAAPVAVWSPEKQTKFRASMLSFDFARAAVEVA

SEQ ID NO: 30624 - protein, 628 aa, Oryza sativa Japonica Group
MEGSRVDAVAGGRRWGEGEEGGRRGGGGGGGGGGGGTGGGGGGGGRRGGEDGGEVSLREWLDRPGRAVEAPECLHVFRQVAESVAIAHAQGVAVGSARPSCFVVSPPFARVAFIESASGSDVSGSCSGSDGSEEADPEPSPPRRRRDGASGGEDRGGKTFPLRSVLAMELTWYTSPEEADDRGGATFASDVYRLGVLLFELFCTFETMEEKMRAMANLRHRVLPPQLLLKWPKEASFCQLLMHPVPETRPKMSDVLQSEFLNRSRNSLEEREAALRLREEIEEQELLLDFLLQLQRRKQDIADNLQDTVAFLSSDINEAHQQSALGQCGNFSFELDKEVCSETVEDQSDCGSRKRFRPELPAVDMEEQNRSLEECSGTVPSSVLIQESVLSKSSRLMKNFKKLETAYFLTRSKLAKQVGNPVSSCHQVVKRTTGSPVVTEGSSIDDFALEGHYGTRQRGWMNSFLEGLCSYLSFSKLKVKAELKQCDLLNSSNLVCSVGFDRDKEFFATAGVNKKIKVFEYNMIVNEHCDIHYPVVEMSNRSKLSCICWNSYMKSHIASSDFEGIVQVWDVTRSQVFVEMREHERRVWSVDFSLADPTKLVSGSDDGSVKLWNMNQAILFLHLVYVSF

SEQ ID NO: 30625 - protein, 181 aa, Oryza sativa Japonica Group
MSSALIRGLVRSSCSPTVAAVAQPTIHQFRNYSSGLGGDSTATGDSSSTRVAADPDTHQDFQPTTKSSNMSFDDIVSQDIKENPVLIYMKGYPDAPRCGFSALAVRVLKQYDVPISARDILGDLKLKESVKAHTNWPTFPQIFIKGEFVGGSDIILDMHQKGQLKDVLGDIAQKREQNESS

SEQ ID NO: 30626 - protein, 221 aa, Oryza sativa Japonica Group
MVSERVKGMVKGFDATNGFSFITPDDGSEDLFIHQSSLKFDGYRSLNDDDVIELSVGSSDDGRTKAVDVTAPGSDAHTGGSRPSCGHIPTAGRPLVQPSPLWPQACIELSRRSSTPSTLHRCSPLLGPQPRAAHHRCLPSAVSSLLSTINRPSSSSPPALKEDLGKEAIASDARELKCKYAATLDGRVSQSTWSEVQVLWISMSHLNKIVNPNVDFSRSCT

SEQ ID NO: 30627 - protein, 483 aa, Gonium pectorale
MSALQNRCPAAAARQAQRHAAQHIIGRLPTVTHRRPLRPQTRLYAAEEALASVASTSSPSGLPHALDMALERLGTALVLADASAAAVPASVAAADAAAAAPQRAGGWVAPLADALEQVLYVLQEGLDKLHVPYTYGYSIILLTLIVKLLTYPLTKQQVESAMAVQALKPRIDLIKDRFGDDKDKVSKETSALYEAAGVNPLAGCLPTLATIPIFIGLYSSLTNVANAGSLDAEGFYWIPSLAGPTTLAMRQSGLGTSWLLPLVDGAPPIGWPEAAAYLSLPVALVAVQYASSALTSPPIDPKDENAGTQRALLVALPLMIGWFSLNVPSGLSLYYLSNTVLSAATQVYLKKLGGANVKMNELGPVTKPGSGRRSGPVAAGFAAWKPLTVLTTAEAAKARAEAEEAAERAREAREVAYDEAAASGMSYDGGAPGAAAAANGAAVAAVAVPDPAAVNRRCKRRRLTSLVQDGSQLAATAAAGSSA

SEQ ID NO: 30628 - protein, 481 aa, Heterosigma akashiwo
  misc_feature (266)..(266): Xaa can be any naturally occurring amino acid
  misc_feature (292)..(292): Xaa can be any naturally occurring amino acid
  misc_feature (314)..(314): Xaa can be any naturally occurring amino acid
  unsure (1)..(481): unsure at all Xaa locations
IGIDFGTTYSCVGVWQNDRVEIIANDQGNRTTPSYVAFTETERLIGDSAKNQVAMNASNTVFDAKRFIGRKFDDPATQEDMKHLPFTLVNGPGGKPLIQVEFKGETKTFMAEEISSMVLTKMKEIAEAYLGKDVKNAVITVPAYFNDSQRQATKDAGTISGLNVLRIINEPTAAAIAYGLDKKGEEKNVLIFDLGGGTFDVSLLTIEEGIFEVKATAGDTHLGGEDFDNRLVEYFLTEFKRKFKKQLNTNQRALRRLRTACERAKXTLSSSTQAHIEIDSLFEGIDFNSTIXRARFEDLNMDYFRKCMEPVEKXLRDSKLSKSQVHEVVLVGGSTRIPKVQQMLQDFFNGQAPCKSINPDEAVAFGATVQAAILSGQDQSEKLQDLLLLDVTPLSLGLETAGGVMTVLIKRNTTVPAKKSQVFSTYADNQPGVLIQVYEGERSMTRDNNLLGKFNLDGIPPMPRGQPQIDVTFDIDANGIV

SEQ ID NO: 30629 - protein, 336 aa, Coleochaete scutata
MGRGKIEIRRIENATSRQVTFSKRRNGLLKKAYELSVLCDVDIAVIVFSPTGKLFQYASSSMKEILERYEQVPPEQKEKGSQRLDNMDYLNREVAKLRNEVEHKYHEARQLEGEDLDRLGVYELEQLEQKLSNSMRRIRGRKDELMKAELEGLRKQVADMETALVGAASFDGRPLSGSSNYLLQSIPGIRTMPPSSLGGMNPASTSLQLGSDRLFGNRGVELHDRSASDESPVMTNRMSVDFAQAPREMSGVDLSGSPVPPWKSQAAAAAQQEWKNQASSPTDWKVTNTEHLDSWPKAPAPTPEWKSTSVQPEWKNQSSPSSEWKPLDWMYHGPQD

SEQ ID NO: 30630 - protein, 350 aa, Gluconobacter oxydans 621H
MRIKRPSPFLADNTMKFLDQAKIYVRSGDGGDGVIAFRREKYIEFGGPDGGDGGRGGDIIFRAVPGLNTLIDFRYTQHFKARKGGNGAGSNRTGAAAANVTINVPVGTQIFDEDRETLLADLDAEGKEVLLCRGGDGGLGNTHFKSSTNRAPRRADKGWPGEERWVWLRLKLIADIGLVGLPNAGKSTLLSVASRARPKIADYPFTTLHPQLGVVRLNNTEEFVIADIPGLIEGASEGAGLGDRFLGHVERCATLLHLIDGTESQIVKHWRLIRKELEAYDPELAAKPEIIVLNKCDSLTPTQRSAKKRALAKASGAEVMMLSGATQEGLPELLRLLQDRVTAAKRDRQG

SEQ ID NO: 30631 - protein, 296 aa, Saccharum officinarum
MSGGGQDLQLPPGFRFHPTDEELVMHYLCRRCASLPIAVPIIAEIDLYKFDPWQLPRMALYGEKEWYFFSPRDRKYPNGSRPNRAAGSGYWKATGADKPVGTPKPLAIKKALVFYAGKAPKGEKTNWIMHEYRLADVDRSARKKNSLRLDDWVLCRIYNKKGGLEKPAAASSGDHKPMVFAAGAVSSPPEQKPFVATPGGLPPAAFTADLAAYYDRPSDSMPRLHADSSCSEQVLSPEQLACDREVQSQPKISEWERTFASDPVNPAGSMLVDPVVGGHAGDPLLQDILMYWGKPF

SEQ ID NO: 30632 - protein, 513 aa, Gluconobacter oxydans 621H
MPASIQSPPDLPGPGRRKTLEQVLFENDTNGLKRSLTATQLIILGVGSTIGAGIYVMTGTAAAEYAGPSVLISFVIAALACLFTAFSYGELSSTLPVSGSAYSYAYISMGEKAAWMVGWLLLLEYGISCSAVAAGLSGYASSLLGVTGFHMPSALTHATLQPVPGTAGAQISADWRFDLIGFTATLLVTALLVRGVEESARINTMIVALKVGVLFVFVALGIGAVNPANWHPFIPASEGGFHYGVRGIFRAASVIFFAYVGFEAVSTASAEARNPTRDVPIGIIGSLLICTIVYMIVATVLLGIVPYRELDVPDPLAIAVKIMHTPWLSLLVNVGATIGLCSVLMGLMYAQSRVLLTISRDGLIPQIFSVIHPKFRTPWIGTIVLGFVVALITATLPIDIISDLVSIGTAAAFGIVCFTVIWQRNTRPDIVRPFSVPLGGIRIRGIWIGTTPALGILFCLVMTIPLVSDMVHAVTSGNPVPLILLVTYLALGIATYAFYGRRHSKMRPEPPLV

SEQ ID NO: 30633 - protein, 464 aa, Gluconobacter oxydans 621H
MSLPYPMPDPSAQRQTRTGALSAMSMPDTPVHDQVSGRADPHAAIKGESGKRKTVVMKFGGTSVGNIERIRNVAKRVKAEHDRGRRVAVVVSAMAGVTNRMVGYCAELDPLADPKEYDAVVAAGEQVTSGLVSIALQALGVKARSFQGWQIPLVTDDAHGKAAIESVDGTALLACLDDDVVPVVAGFQGVGPDGRIATLGRGGSDTSAVAVAAAINADQCDIYTDVDGIYTTDPRIVKRAKKLDRITYEEMLELASVGAKVLQTRSVGLAMREGVRVRVLSSFAETDDDSGSIVVDEDEIMEKELVAGIANSHDEAKISVRNIPDRPGIAAAIFDPLAAANINVDMIVQSVGVDNMTNMTFTVSKADEAAARAVLEKAREYVQYGELITSHNVVKISVVGIGMRSNAGLAARMFRTLADRGINVQVISTSEIKISVLIDSEYTELAMRALHTAYGLDAKEGADA

SEQ ID NO: 30634 - protein, 228 aa, Gluconobacter oxydans 621H
MRNNRTDRSSFNSPRRGGFDDTYSSQPSYGDRGGFGGGNGGGGYGAPRRNSFVAASGPEISSRVKWFNTEKGFGFVELSDGSGDIFLHANALTNAGVSNVNPGATVVVRIGQGPKGRQVAEVLSVDESTAEAPRPRAAFGDQPRFGGARPGRPAPDLSRAEDMRGTVKWYNATKGFGFITPESGGKDIFVHASALERSGLPTLDEGQTINVKVVQGQKGPEAAEISAD

SEQ ID NO: 30635 - protein, 416 aa, Gluconobacter oxydans 621H
METQFSLPKNKIRILLLEGIHESAAAHFAAEGYTEVTRVKGALEGDALKEALQGVHMVGIRSRTQLTREVLEGADRLMAIGCFCIGTNQVDLNAARMLGIPVFNAPFSNTRSVAELVMGEIVMLLRRIPSRSEACHKGGWDKSATNAWEVRGKTLGIVGYGSIGSQLSVLAEAFGMRVLYFDVMPRLPHGNAIAVSTLHDLLAQSDIVSLHVPQTPETDLLIGETEIRAMKPNSILLNNARGNVVELEALAVALKDGHLMGAGVDVFPVEPKKAGEEFKTPLQGLENVILTPHIGGSTMEAQERIGVEVARKLVDYSDVGSTIGSVNFPSVQLPERPRGTRFMHVHANRPGIMRQINDLFASQNCNVTAQYLQTDGEVGYVVVEAESEGPDMDTKLLDGLKALDGTLRARLLYQRA

SEQ ID NO: 30636 - protein, 256 aa, Gluconobacter oxydans 621H
MSDFLKIQGLQARIDADGTPKDILKGLDLEVPKGEVHAIMGPNGSGKSTLSYVLAGRDDYEVTGGSATFKGQDLLALEPEERAALGLFLAFQSPVELPGVNNANFLRTAVNAVRRARGEAELDAVAFLKAVRAETKHLSMSDDMLKRAVNVGFSGGEKKRNEVLQMRLLQPSFAILDETDSGLDIDALRIVAEGVNSLRSPDFSALVITHHQRLLDYIVPDRVHVMAHGRIIHSGGPDIAKTLEKQGYTQFLEAAA

SEQ ID NO: 30637 - protein, 104 aa, Gluconobacter oxydans 621H
MYAVIRTGGKQYRVAPESILKVEKLEAEAGSTITFTDVLMVGGEGTLTVGAPLVAGATVTATVVAQDRLPKVIIFKKRRRQNSRRKNGHRQPVTVLRINAINAA

SEQ ID NO: 30638 - protein, 382 aa, Gluconobacter oxydans 621H
MSFTIASRLADLPRPATIAMAARARELKAQGADVISLALGQPDFPSPPEAIEAAYAAAKAGDTGYPPIPGQKPLIDAIIRKFRRDNALDVTSDRIMVANGGKQVIFNALMASLEVGDEVIVPAPYWVSYPLITRMLGGVPVEIRCREENGFRPDPEAIREAITPRTKWLVLNFPNNPTGAILERQNLEAIADVLREAPHVLVMSDEIYEHLTFDGKKHLSLLSVAPDLADRILIVNGMAKAYAMTGWRVGFACGPVPLIQAMIAVQGNSTSGVCTLAQAGSVAALDGDADGIARMLETYERRRGLVVGALQQVPGLTCVMPDGASMPIRGCGPDWWHIGAGTVARHGCGFCGGTSGRSACRDRAGLGVRIQPVSAPVFCCFG

SEQ ID NO: 30639 - protein, 406 aa, Gluconobacter oxydans 621H
MIRKPVMSFIADRLNRILPSQTIAVTQKARALKAEGRDIISLSAGEPDFDTPDFIKRAAIRAIEAGKTKYTDVAGTLELRKAVAARLNADFDLDYKAEEICVSTGGKQVIYNVMVSTLNAGDEVIIPAPAWVSYPDIVTLADGTPVIVQTDPENGFRLTAEQLRAAITPRTKWLCLNSPCNPTGAAYDTEALKALTDVLLDYPDIWILTDDMYAKLLYDGAVAKTVVQVEPRLRSRTVTMNGVSKAYAMTGWRIGFSAAPVELTRQLVKLQGQSTSNPCSIAQAAAQEAVSGPQDFISEMVAVYQERRNLVIGMLNEAPGLSCALPEGAFYAFPSIAGTLGKTSKGGRLIDGDEAFVTALLEETGVAAVHGTAFLTPGYFRISYATSTELLKEACTRVQNFCRGLS

SEQ ID NO: 30640 - protein, 431 aa, Gluconobacter oxydans 621H
MTSFAELKLAEPIQKALAEEGYTTPTPIQAGAIPYLLEGRDLLGLAQTGTGKTAAFALPILNHIFTNRRPAPPKGVRALVLAPTRELASQIGESFAAYARHMKFSYAVVFGGVGQGRQIETTRRGVDVLVAAPGRLLDLIGQKHIDLSTLEILVLDEADRMLDMGFVRDIQRIMALLPKQRQTLLFSATMPPSISDLAHSLLKNPATVQVTPESSTVDRINQAVMFVDSGSKKDAALMLLESPSVARAVVFTLMKHEANKVAEFLNKNGIRAEAIHGNKSQGARERAMAGFRSGAIKALVATDIAARGIDVDEVSHVFNYDLPNVPESYVHRIGRTARAGREGCAVSLCDAEQRAWLKDIEKKIGKPIPVVTDHPFHSEEARLSTQRPPVLGGGRGGGGGGRRRSGPPSGGRPGGGRGGAPGRGGPRPGAR

SEQ ID NO: 30641 - protein, 314 aa, Gluconobacter oxydans 621H
MSLCFITQQIHPDAETYLNNAGIRTRYATAPTMEAVIREVGDADAVITRDLGFSAEALDAAPNLKIISCHGSGTNRIAKAAAAARGVLVTNAPNTNSRSVAEMTIGLLLAVVRRLCEADLAVREGNWEFRYTGKGMELHTRTLGLVGFGAIARHVAQIAGQGLGMRVMAWSPSVPADVFEGAGVMRANSLDDLLVASDVLSLHRPAQGSGRPTIDASALFRLKQGAILINTSRGGEVDGPALAEALEAGHLGGAGLDVMSPEPPLPDDPLLRAPNVVLTPHIGATTEQALRRMAMMCASQVQDALAGRVPPHCL

SEQ ID NO: 30642 - protein, 410 aa, Gluconobacter oxydans 621H
MSAHQDVKKVVLAYSGGLDTSVILRWLQKTYNCEVVTFTADLGQGEELEPARKKAEMFGVKEIFVEDLRETFVKDFVFPMFRANTLYEGQYLLGTSIARPLIAQRQIEIAEAVGADAVAHGATGKGNDQVRFELGYYSLKPDVKVIAPWREWDLTSRTKLLAFAEENQIPVTKDKRGEAPFSVDANLLHSSSEGKLLEDPSIGAEEIVFQRTISPEAAPDVATEITIDFVSGDPVAINGVEMTPATLLTRLNELGRDNGIGRLDIVENRFVGMKSRGIYETPGGTILLAAHRSIESITLDREAAHLKDSIMPRYAEIIYNGFWFSPERRMLQALIDTSQHSVTGRVRMRLYKGNVTCVGRESPHSLYDTRVVTFEDDEGAYNQQDAQGFIKLNALRLRLGGQIGRRGGTL

SEQ ID NO: 30643 - protein, 408 aa, Gluconobacter oxydans 621H
MTVKISVLKERDEGGERRVALIPQVAEKLTPLGITFAMETGAGVASSYPDSAYKDVTFSPDRNALVADADIVLAVQPPTLETVKAMKPGAILIAFIYGRNNPDLVKALRDGKITCFAMELVPRISRAQAMDALSSQATLAGYYAVLMGAVHMPKILPMMTTAVGSLRAAQVLVMGLGVAGLQSLATAKRLGAITEGYDVRPETKEEAQSLGAKFVDTGVDATGQGGYARELTDDEKQKVRKALSDHIARSDLIVTTAAVPGKRAPRLIDAEQIKAMKPGAVIIDLGAEGGGNCEGTQAGQTVQVGPTTIVGPVNVPSMLAEQASELYSKNIMHLLQQIITKDKGLAPDFTDEVISGTALTHDGYITNDGIRTAVDPNSPAPPAPAPAPTATPAPTTPAANDAGKETAK

SEQ ID NO: 30644 - protein, 293 aa, Gluconobacter oxydans 621H
MKVGFVGLGAMGHAMAERLLKGGHELVVTNRTRAKADDLVAQGAVFAETPADVARQVEAVFSMLFDDASTEEAVFGEHGIATALAPGGIHACSSTLSLEQARRLRDGHAEHGQVYVSANVLGRPPAAKAGELFVVTACADEALKRLRPLLECFGSKIFEVGQDPVQANLAKLSLNFMIYSTIEQMAEVFALNEKAGTDPHKIFEIMTGSFYNAPVHKNYGKLMVDHEYDHPGAPVTLGLKDMEMFLKAGGEHAVPLPYASVVRDRLLSAISAGDAGRDFVVLLERARQDSGLK

SEQ ID NO: 30645 - protein, 310 aa, Gluconobacter oxydans 621H
MSSKPDILTIDPLVPVMKERLEKSFTLHPYTSLENLKNIAPAIRGITTGGGSGVPSEIMDALPNLEVISVNGVGTDRINLDEARRRNIGVAITQNTLTDDVADMAVALMMAVMRSIVTNDAFVRAGKWPSATAPLGRSLTRKKVGIAGFGHIGQAIAKRVSAFGMEVAYFNSHARPESTCHFEPDLKALATWCDVLILAVSGGPRSANMIDRDTLDALGKDGFLVNIARGTVVDEAALLSALQEKRIAGAGLDVFQNEPNINPAFLSLPNTVLQAHQASATVETRTTMANLVVDNLIAYFTDKTLLTPVI

SEQ ID NO: 30646 - protein, 615 aa, Gluconobacter oxydans 621H
MSATLWVMILFLLTALTKDPSLSCQIMRHFRAGPNHLLDIVKTSFPQRPRTHLMSEQQHPTGPRRGWTDIVAGLSLASVNIPQVLGYTRIAAMPAVTGLYTVLLPLVAFAAFGSSRHLVVAADSATAAIFSSAIGKMAPPESAHYIALVSMTALLCAALLLVARVFRLGFLADFLSRTVLTGFLAGVGVQVCIAMLHDMLGVSVSAHNPLVQAYETFRQIPHGSLMVAALSAVTVGILMTGQRLAPHLPAGLYVVIGSIALSMGLNLSHHGVPTLGHVAGGLPHFGLPDVSWNELLALLPVAAFCVFVIIAQSAATSRVFGERFHETVDEDRDLLGLSAANVAAGLSGTFTVNGSPTQTAMAVRSGARTQVAQVTFACVTLMVLLFLTRPLEALPRCVLAGIVFTVAVGMIDLKSLRAIRQESPGEFWLAVTTAAVVVGVGVEEGIFLAIALSLFRHVRHSYEPHTMVLQQSPTAGVLEALPAKDGLESAPGLIVFRFCADLFYANSTRFRQDLLDLVEHAPHPVRCVVLDASPVTDIDYSAAADLRDLIAQLHQRGIALLFGRVSVYLRADMDRHHITPALGDGNIYAELHTALKAAHQILGDTTVPPPTVRPS

SEQ ID NO: 30647 - protein, 206 aa, Gluconobacter oxydans 621H
MDGQTYPDCAPVPGAEALFTQARTPRSFSPRPVGEDVLRRLYDLVKLGPTSGNCSPGRFVFLTTQDARERIRPALSPGNVARAMAAPVLAVVCHDPLFFEALPRLNPQEGLRDWFAADVGLSDETAFRNGTLEGAYLIMAARMLGLSAMPMSGFDSFMVEDTLLNATGWRVNFLVGLGYPAENEPAPDHAEPRAPRLDFGEACLCL

SEQ ID NO: 30648 - protein, 68 aa, Gluconobacter oxydans 621H
MATGTVKWFNATKGFGFIQSSDGTTDVFVHISALEKAGLQNLNEGQQVSYEIEDGRNGRKSAGSLKAL

SEQ ID NO: 30649 - protein, 634 aa, Gluconobacter oxydans 621H
MSKVIGIDLGTTNSCVAVREGDETKVIENSEGARTTPSMVAFTDNGERLVGQAAKRQAVTNPANTLYAVKRLIGRRYDDPTVQKDKEMVPYAIVRGDNGDAWVEARGEKYAPSQIAAYVLGKMKETAESYLGETVSQAVITVPAYFNDAQRQATRDAGKIAGLEVLRIINEPTAAALAYGLGKRDSGTVAVYDLGGGTFDVSILEISDGVIEVKSTNGDTFLGGEDFDNRIIGFLADEFKKDQGIDLRGDKLALQRLKEAAEKAKIELSSSKETEINLPFITADASGPKHLVVKLSRAKLESLVDDLIQRTLGPCRAAIKDASVSANEIDEVILVGGMTRMPKVIETVKEFFGKDPARNVNPDEVVAIGAAVQGAVLKGDVKDVLLLDVTPLSLGIETLGGVFTRLIDRNTTIPTKKSQTFSTAEDNQNAVTIKVYQGEREMAADNKLLGNFDLQGIAPAPRGVPQIEVTFDIDANGIVNVSAKDKATNKEQQIKIQASGGLSDADIDRMVKDAEANASADKAKRELVELRNSTESLIHQTEKSITEGGDKVPAADKSEAEAAIAEAREALGGENLDTLKAASEKLTQAAMKVGQGVYQAGQGAEGGAAPEGEKKDENVVDADFEDLEDDSKKH

SEQ ID NO: 30650 - protein, 393 aa, Gluconobacter oxydans 621H
MSTSADRSLTPETIAIIKATIPALEAHGVTITSEMYRRLLADPAIAEMFDPTHQSTGTQPRALAMAVLAYAKNIDNLGVMGSAVERIAQKHASLEIQPEHYPHVATALLGAISSVLGEAATPEILDAWGKAYWALADILIGREHQLYDSSAHAEGGWTGWRPFRIARAVPECANVTSLELEPVDGKPVISAVPGQYLGVDLDIPDRGRTRRNYSITSSPNRKGYRISVRHVSNGAVSGWLNSGKCEGMEVLLSPPAGNFVLPEKVEGPLAFVCAGIGITPMIGMLEALAQPGVTTPVHVVQIAHSAETAPFAERLAELSHNSAGRIRVVTRLTEKDGHPTAAWVAEQLPGGVSTYLCGPTGFMHDMVHGLPAAGVPAERLRYETFGPDTGVTD

SEQ ID NO: 30651 - protein, 310 aa, Gluconobacter oxydans 621H
MKIVACNSNLPLARAVAHELRMPLCKTVVKRFADGEVFVEIQENVRGEDVFVVQSTCMPTNDHLMELLVMLDALRRGSAKRVTAVMPYFGYARQDRKSGPRTPISAKLVANLLTEAGANRILTMDLHAMQIQGFFDIPTDNLYAAPLFVRDLKARLPDRELIIVSPDVGGVVRARQLAQRLNVDLAIIDKRRERAGVSEVMNVIGDVAGRYCVLVDDIIDSGGSLCNAANALMSRGAEGVEAYVTHGVLTGNACQRVKDSPLNMLTLTDSIPATEALLETPNIRQITTANLLARAMSAVADESSVSSLFD

SEQ ID NO: 30652 - protein, 563 aa, Gluconobacter oxydans 621H
MTYTVGHYLAERLTQIGLKHHFAVAGDYNLVLLDQLIEQGGTKQIYDCNELNCSFAAEGYARANGAAAAVITFSVGAISAMNGLGGAYAENLPILVISGAPNSNDHGSGHVLHHTIGTTDYSYQMEMAKHVTCAAESITSAETAPAKIDHVIRTMLREKKPAYLEIACNISAAPCVRPGPVSSLHAHPRPDEASLKAALDESLSFLSKANKVAILVGTKLRAAEALKETVELADKLGCPVTVMAAAKSYFPETHPGFRGVYWGDVSSPGAQEIIEGADAVICLAPVWNDYSSGGWKSVVRGEKVLEVDPNRVTVNGKTFEGFRLKEFVKALTEKAPKKSAALTGEYKPVMLPKADPSKPLSNDEMTRQINELVDGNTTLFAETGDSWFNAVRMHLPEGAKVETEMQWGHIGWSVPSMFGNATASPERKHVLMVGDGSFQLTAQEVAQMVRYELPVIIFLVNNHGYVIEIAIHDGPYNYIQNWDYAALMQCFNQGVPGEESGKYGLGLHATTGAELADAIAKAKKNTRGPTLIECKLDRTDCTKTLVEWGKAVAAANSRKPQSV

SEQ ID NO: 30653 - protein, 597 aa, Gluconobacter oxydans 621H
MTAAERDAGTGNEALNGAEVLLRVLDEEGVEVIFGYPGGAVLPIYDALFKQDRIRHVLVRHEQAAVHAAEAYARSTGKVGVVLVTSGPGATNAVTGLVDALMDSIPLVCLSGQVPTKLIGNDAFQEADTTGITRPATKHNYLVREPGTLAQTVREAFEVARSGRPGPVLVDLPKDITVGKAPLTKPALSRLQRLSHQGGPDAEAIARTVEAMKTAKRPLFYTGGGIINSGPEASELLRRLARKTGFPVTSTLMGLGAFPSPDPQFLGMLGMHGSVEANMATHGCDLLIALGSRFDDRVTGRVDAFSPNSFKVHADIDPSQIDKIVPVDVRIEGDVRDTLEALLEAWGDTPAPDLSTWWNQIASWRSVDGFGFTQDMDPSAIIRPQHAIRRLYVLAKETGRDTFVSTEVGQHQMWAAQHFQFDKPNRWLTSGGLGTMGYGLPAAVGAQVAHPDALVIDIAGEASTLMNIQELGTIAQYRLPVKIFILNNHYMGMVRQWQELLHGSRYSQSYSEALPDFVKLAEAFHATGMRATHVGELDDVIRRMLAHDGPVVADICVAEGENCYPMIPSGAAHNQMLLGPDQDSEAAGLTEEGKMLV

SEQ ID NO: 30654 - protein, 387 aa, Gluconobacter oxydans 621H
MKTPNQYLASLPTTIFTIMSQLAVKHGAINLGQGFPDTEGPQDIIQVAADALRDGRNQYAPLTGLPELREAVAASNRRFYGLEVDPATEVVVTSGATEALAACLMAVVEPGDEVVVIEPLYDTYLPALKLLGAVPRCVRLAPPHWSVPEAELRAAFGPKTKAIMLNSPMNPSGKVFVREELELIADLVREHDVYAICDEVYEHLTFHVKHIPLMTLPGMRERCMRIGSAGKSFSLTGWKVGYVTAPAALASVVAKAHQVLVFATAPNLQRAVAYGLNKDDGYYEGLSAQMETQRDLLRDGLHRLGFETLPADGSYFIVADISRHAAGRGDVEFARWLVEHAGVATIPVSAFYDPQGDAPPQNLIRFAFCKKPEILREALKRLEKALS

SEQ ID NO: 30655 - protein, 352 aa, Gluconobacter oxydans 621H
MGRLIIVSNRTPAPGERTQPAGGLTVGLCDAVQTQETLWFGWSGHQHADAADRPVQSEQVGNVNYVTFDLTQRQYDRFYLNFSNGVLWPLCHYRTNLIRYTREDCDAYYEANEVFADRLVGLLEPDDTVWIHDYHLFPLGKMLRDRGVTGRIGFFLHIPFPPWSVARLLPRLDMLLSGLAACDLIGVQTPEDATNLKGCFEIYGLKAAVEAVPIGIDPVSFRQQAIESASSDEVVKIMDTLEGTRLIMGVDRLDYSKGLPERMKGFEALLKNYPEHRGQVTFLQVTPVSRGGVESYRLLKEELDGLVGTINGAYARRTGCRSATRPGRSGGIFLPGFTGWQMWGLSRRCGMA

SEQ ID NO: 30656 - protein, 557 aa, Gluconobacter oxydans 621H
MSIPVGHYQYDRIDRDFLQARIAEFEGQVQRRLDGTLSEDEFKPLRLMNGLYLQLHAYMLRVAIPYGILDSRQLRKLGEIARRYDRDYGHFTTRQNIQFNWIRLEDTPAILRELAEVDMHAIQTSGNCIRNVTADEYAGAAADELVDPRVHAEILRQWSTLHPEFTFLPRKFKIAISGSPNDRVAARFHDIGILARPGEDGAPVFRIFVGGGLGRTPVIGEELFDSVREEHLLATLEAILRVYNAHGRRDNIYKARIKILVQAIGVEAYREAVEAELAQMDLERYRLTPEAVAAIRSRFAVPLLEAPADADAVLAQQRREDPLFDRWVRSNTHVHRDPGHIIATISLKPAGGIPGDATSAQIARLADLADAYSFGEIRITHLQNVVLGHVRKDRLRDLWLGLSEVGLAEANIGLIGDIVACPGLDYCALANARSIPIAQKLGARFADTALQAEIGALRINISGCINACGHHHAGHIGLLGVDKRGEEFFQLTVGGRAENGAAIGTILGAALPEDETVDAIARLVDCYLGRRESGETFLDTLTRLGHEPFREAAYETV

SEQ ID NO: 30657 - protein, 576 aa, Gluconobacter oxydans 621H
MSASLKGSSEVSNASLIHSLRAIVGARHVLTKPSATYRFRKGFRFGMGDVVAVLQPGSLVELWRAAKLCAETGRIIIMQAANTGLTGGSTPDGNDYDRDVVIISTNRLDGIHLIGEGKQVVCLPGSTLHDLEEKLAAIGREPHSVIGSSCIGASVLGGVSNNSGGALVQRGPAFTEMALFGQMGEDGKLHLVNHLGIRIEGNPEQVLAAVQAGQLPENAIDWKAGRGHDENYATHVRDVDADTPARFNADPNRWYEAAGCAGKLVVFAVRLDTFEANKNPGVFYIGTNNTSDLEDLRRHVLTHFDELPIAGEYLHRDAFNIAEKYGKDTFAVIRYFGTKYLPMFFSMKSRFDVFAQRLPFLSDHFSDLAMQFLSRFLPKQLPQRMCDYRDRFEHHLMLKVSAHMTAPVRAYLEQWASSTGGAFFECTPDEGTRAFLHRFAAAGAAVRYRAVHTKTAEDIVALDVALRRNDREWFEVLPKEIEDRIIVKLYYGHFFCHVMHQDYVIKKGYNAMKVEHDMLPGLDARGARYPAEHNVGHLYKAPEEMVEHYRSLDPCNCFNPGIGLATKKRNWVAESV

SEQ ID NO: 30658 - protein, 372 aa, Gluconobacter oxydans 621H
MSNLENMMTALKTVSGTTYLDANATEPLRPCAKEAALEGMMLSGNPSSVHAEGREARRFLEDARSRVAAGFGRISGTCVFTSGATEADAMAVHAFGQERRIFVGSTEHDAILRAAPGAEILPVNRDGILDVEHLRARLQDTGPALVCVMSANNETGVLSPLEDVLAVCHDSGAHLHVDAVQSAGRVPFVLGGCSVAVSGHKMGGPKGAGALLLAEDEPMDALVAGGGQERGRRGGTQALPAILGMAAAFDAARAQDWTPVRRIRDRVEAAAKNVGARVAGEAVARLPNTSCLILDGVAAQVQLMALDLAGFCVSAGSACSSGKVSSSHVLRAMGETEGASQAIRVSLPWNVQEAQVEAFCEAYEAMAWRLRK

SEQ ID NO: 30659 - protein, 284 aa, Gluconobacter oxydans 621H
MATEHKCVLGSVRDLEREGFEAVVLGVDGEGRVDPQALREALKVPTLLVSVMAANNETGVLQDIPQLAAIVKERGALMHVDLAQMAGKMPVSLRDVDLASVSAHKMYGPKGIGALYVRRKPRVRLEPLFSGGGQERGLRSGTLPTPLIVGFGEAADLAASAMGDEAARQVFLRDDLWAQLREGLPGIVLNGAGAPRLAGALNVCLPDGVRALDVLEACPDVAASTGSACTAAEIAPSYVLTAMGLSAEKASRCLRLSVGRSTSKADIDRAASLLIAAARACQPN

SEQ ID NO: 30660 - protein, 181 aa, Gluconobacter oxydans 621H
MADDEIQALDLSGSLLRPAVFLDRDGVINRDHGWVGTRERFEWESNVRETIARIADRGYHIFIVTNQSGIARGFYSERDLEHLMDWVIDSIREYGGNVDDWRYCPIHPEAVIEKYRGTSMDRKPGPGMLLDLLQRWELCPSCCLMFGDQPSDMAAARAAGVEGVTVGPVSLAELIASREGF

SEQ ID NO: 30661 - protein, 634 aa, Gluconobacter oxydans 621H
MNNLGRNVAIWVVIIVVGMAVLTAFQPGGGQHAAQQIAYSDFIHDVDQHQVRSVVIQEQNVSGTLTNGTSFETYAPLDPSLPARLTAANVEVTAKPMESGESPILRYASAYLPVLLLLGLCFMVFRQMQGGGGRAMGFGKSRAKLLTEKTGRVTFEDVAGIDEAKSELQEIVEFLRDPQKFTRLGGKIPKGALLVGPPGTGKTLLARAIAGEANVPFFTISGSDFVEMFVGVGASRVRDMFEQGKKSAPCIIFIDEIDAVGRHRGAGLGGGNDEREQTLNQMLVEMDGFESNEGVILIAATNRPDVLDPALLRPGRFDRQVVVPNPDVAGREKILRVHMRKVPLSSDVDPKVIARGTPGFSGADLSNLVNEAALMAARQGRRTVGMAQFEEAKDKVMMGAERRSMVMTEDEKRSTAYHESGHAICAIFTPGSDPIHKATIVPRGRALGLVMTLPEKDNISYSRKWCLARLVIAMGGRVAEEIIFGREEVSAGASGDIKSATDLARRMVTEWGMSDTLGMIAYGDNGQEVFLGHSVTQSKNISEETAREIDKEVKVLIDTAYKQAHDLLTTRIDDLHRLTAALLEYETLTGEDVGRIMRGEAIERTSDDEQVPDNRRASVPTTRPGAFDPAPQAG

SEQ ID NO: 30662 - protein, 290 aa, Gluconobacter oxydans 621H
MSSPKIGFIGYGAMAQRMGANLRKAGYPVVAYAPSGGKDETEMLPSPRAIAEAAEIIIFCVPNDAAENESLHGENGALAALTPGKLVLDTSTVSPDQADAFASLAVEHGFSLLDAPMSGSTPEAETGDLVMLVGGDEAVVKRAQPVLDVIGKLTIHAGPAGSAARLKLVVNGVMGATLNVIAEGVSYGLAAGLDRDVVFDTLQQVAVVSPHHKRKLKMGQNREFPSQFPTRLMSKDMGLLLDAGRKVGAFMPGMAVADQALALSNRLHANEDYSALIGAMEHSVANLPHK

SEQ ID NO: 30663 - protein, 295 aa, Gluconobacter oxydans 621H
MTTRCGFVALVGAPNAGKSTLLNRIAGAKLSIVSPKAQTTRFRTLGIVMQDNAQIILVDLPGIFKPRRRLDRAMVNAAWSGSQDADLTLLLVDAKSGLREDVREIIAKLAESKNRIWLVLNKTDLVERGELLPLTQEISGLINVEHVFMLSARSGEGVSDLMARLAAELPEGPFLYPEDDLTDLPDRLLAAELVREQIFMQTHEEIPYQATVETESFKERPDGSVRIEVTIYVSRPGHKAILIGEGGHKIKSLGARARMELQELLDRKCHLFLNVKERAGWDEEKARLRAIGLDD

SEQ ID NO: 30664 - protein, 575 aa, Gluconobacter oxydans 621H
MDTKRIIAATLLSALILIGFDYFMPKPHQDDPHPVTHAPAAQVQNSAPTTAAPPAEAATETQATARRIPVTGPDVQGSLNLKGAVLDDLILMKYRETLAKDSPLVRLLDKAGSAHPTFVVIGWTNAPGSNARLPDLNTVWESSDETLTPDHPVTLHWDNGQGLVFSIQIALDEHYMFAVSQTVENHSGQPVALVPFERVQRDYDAPEGAFTAHEGPIAVIGGRMQDESYKNLRKGADHPDHVSWSSTGTNGWDGISDKFWLTAVAPADGTPVAASFAYVPGTPGSYQVGMSTQNAQQIMPNGSITEKSHVFAGAKVVSLLQGYSKQLGIPDLDKAIDFGWFSFLTRPLLTLLHWLYLHLGNFGLALMALTLIVKIVLFPLASKAAQSSARMRLLAPKVKEIREKNKDDPMAMNQKVMALYREEKVSPASGCLPMLIQAPIFFCLYKILNISIDARHAPFFGWIHDLSMPDPTNVFNLFGLLPFDPTHYSSFLHVSIWGTALGLTFWLLQRQTSSTASLDPAQARMMQFMPLVYVFFMSGFPASLLVYYTWNNLLTVAQQMFIQRRTGLPVPVSRT

SEQ ID NO: 30665 - protein, 332 aa, Gluconobacter oxydans 621H
MHRPSPRPFRTALDSALQTVSIEREGLQALEHALSGPLGEAFCEAVNRIAESEGRLIVTGIGKSGHIARKVQATLASTGTPSLFLHPAEAAHGDLGMVAPGDLILAFSNSGESTELAAILAYAARQNHCVIAITSVGTSALARASEIPLVLPSSTEACPMGLAPTTSTLLQLALGDALALALLEKRGFTARDFGAFHPGGLLGARLRPISDLMHTGDALPLGQGSLPLRSVILEMTRKSFGCMGVTDDNGVLQGLITDADLRRALSGDLDTTTAKDVMNAAPVTATPTTLAQDVLQLMNQRERPITSLFIVDEDRRPTGIVHVHDLLRSGLS

SEQ ID NO: 30666 - protein, 1506 aa, Gluconobacter oxydans 621H
MTQNNDFIREYAENVERLKGLYDPSQERDSCGVGLVASLDGKPSRSVVQAGIEALGNIWHRGAVDADGKTGDGAGIHVEIPQDFFAEAIHNGSSDDTIDGRIAVGMVFLPKTDLGSQERGRQIIETEILNFGYGIYGWRQVPIDTACIGEKANQTRPEIEQIMIRNRLGRSEDEFERDLYVLRRRIEKQATAQQVDLYVCSMSCRSVIYKGMFLAENLTDFYPDLLDERFVSRFAIYHQRYSTNTFPTWKLAQPFRKVAHNGEINTISGNTNWMRSHETRLAHPELDPYMADLKPVVQAAGSDTAALDNVFELLTFAGRDAPMAKTMLVPASGGANSAMSDAARALFRYCNAVIEPWDGPAALCATDGRWVVAGLDRAGLRPLRYSITQDGLLIVGSETGMVRVPDARVKSRGRLGPGQTLALDLKEGRLYQSEELLEMLASRQDFRGWVKRIRDIEPIVRDVVEPEALDPDLLRRHQVAVSLTHEELETILHPMVENAAEALGSMGDDTPLQVLSTIYRGLAHYFRQGFSQVTNPPIDSLRETRVMSLVTRLGNLGNILDQAPEQCDLLQLPSPVLTIGEFDELLKVCGENAGVIDCTFPAEEGEEGLRAAIASIRAQAEDHVRGGCTHLFLTDDNTDATRVAIPMILATAAVHIHLVRNSLRTFTSLNVRTSGAIDVHAIAVTIGVGATTVNPALAQYCVADRLRRGLFGKMSLREAMERYRKAVDKGLLKIMSKSGISIISAYRGGYNFEAIGLSRALVAEFFPGMPSRISGIGLPGIARNILGAHAAAWNRKVEALPVGGRYKLRRQGETHAFSGQLVHMLQSAVTANSFTLYRRYADAVRQMPPVALRDLLDFKPAHAPVPVDEVESITQIRRRLVAPGISLGALSPEAHETLAIAMNRIGAKSDSGEGGEDAERSKPRPNGDNASSAIKQVASGRFGVTAQYLNDCREIEIKMAQGAKPGEGGQLPGFKVTELIGRLRHATPGVTLISPPPHHDIYSIEDLAQLIYDLKQINPTATVTVKLVARTGIGTIAAGVAKAKADAILISGHSGGTGASPQSSIHYAGLPWEMGLSEAHQVLMLNRLRHRLVLRTDGGIKTGRDVVMAAMLGAEEFGIGTAALVAMGCIMVRQCHSNTCPVGVCVQDEKLREKFGGSPEKVINLFTLIAEDIRHILADLGVRSLEEVIGRTDMLRQVSRGADYLDDLDLNSLLVQADPGGHARFCTREGRNEVPETLDGQIIPDATALFERREKLHLHYTVQNTHRAIGTRVSGLITRKFGMKELPEGQLTLSLRGSAGQSLGAFGVQGLKIEVEGDANDYVGKGLSGATIVVRKSPAAQWASEQSAIIGNTVLYGATAGTLFAAGQAGERFAVRNSGATAVVEGCGSNGCEYMTGGTVVILGETGDNFGAGFTGGMAYVLDVKGLFEAQINPDTVIWNRVQAGSRWDQELRALVERHVAETGSTYAADLLHCWERTLERFWHVVPRDYARIIGYVQEDLSQLSA

SEQ ID NO: 30667 - protein, 586 aa, Gluconobacter oxydans 621H
MCGIAGLSCLPGHHPDQDALERMSQAIFHRGPDGEGRLDLGGAALRHRRLSIVDIAGGAQPFRLGAAALIANGEIYNDPAIRRRFPKTCFQTHSDCEPPLHLWLHDGAGYTHELRGMYAIAIVENEHGRHEMVLSRDPFGIKPLYIAAYEGGIAFASEPQALLAGGFGRRSVRDGARNELMQLQFTTGQDIIFDGIRRLLPGETLRIVDGRIVESRRRHVLHEARDTVPARLSDEQALARLDTALLDSVSAHLRADVPLGLFLSGGIDSSVILAAAHRLGLPHPRTWTARFDAGKADESADAAALAASVGAEHHVLTVTEDMVWRDLPSIVACMDDPAADYAVIPTWFLAREARKDVTVILSGEGGDELFAGYGRYRRVMKPWWKGGRAPYRSGTFGKRFAEHGRQWRRGIAMTELALGVSGLEGAQALDIAEWLPNDLLLKLDRCLMAHSVEGRTPLLDPVVAKAIWPLPEHFKVRDGYGKWLLRRWLQDALPQARPFAPKQGFTVPVGPWIEKQAHRLGPLVARQPCIRAMMPAADVERLFARASQRGVARQAWTLLFFALWHRHHIEGVPVDGDTFETLARAS

SEQ ID NO: 30668 - protein, 96 aa, Gluconobacter oxydans 621H
MLRHSFPLRVMISCVSCARLLLLKRSLVMATGTVKWFNSTKGFGFIQPDNGGQDAFVHISELERAGMHTLNEGQHVSYELESGRNGKTSAVSIKAI

SEQ ID NO: 30669 - protein, 111 aa, Gluconobacter oxydans 621H
MSETVFQHIQNLIDANPVMLFMKGDKLFPQCGFSARVVQILTHLGVPFETCNILESAELRQGIKDFSQWPTVPQLYIKGEFVGGCDIVTDMYQSGELETLLTEKGITTANA

SEQ ID NO: 30670 - protein, 480 aa, Gluconobacter oxydans 621H
MTTPLWRTKPVSSAADSQTGLKRVLGPWQLVALGVGVTIGAGLFSLTGVAAGQNAGPAVTLSFVIAAVACGFAGLCYGELASMIPSGGSAYSYAYASMGELIAWIIGWDLVLEYTVGAAAVASSWSGYLASLLGGWGIHIDPRLLATPMTPVTMPDGSMASAWLNLPAVCALWGVTALLMRGVSESTTINTIVVCIKLAVIVAVIAACAPHISFEHYHPFIPQNTGTFGQFGMSGVMRAAGMAFFAYLGFDIVSTTAQDSRNPARDIPIGILGSLLVCSVVYAVFSMVLTGVVDYRAMANDPSPVATAIDVAGMPWLASLVKLGITAGYISVLFGLLMGQARVFLIMSHDGLLPPVFSKLNARTHTPWTSHLMFAALTSVFAAVLPIGQLGNMTSIGTLLAFIIVCIGVPVLRHRYPEAPRQFRVPGGLLVPVLGILSCGAVMVSLDRLTWIRLVVWLAIGLAVYFAYGIRNSRLCRSES

SEQ ID NO: 30671 - protein, 123 aa, Citrobacter sp. MY-5
HCAEDYITDRSQRFMASEIIREKLMRFLGAELPYSVTVEIERFVSNERGGYDINGLILVDREGQKKMVIGNKGAKIKTIGIEARKDMQEMFEAPVHLELWVKVKSGWADDERALRSLGYVDDL

SEQ ID NO: 30672 - protein, 660 aa, Hyaloperonospora parasitica
MNLAKICFLAAAALANAAVSGEDTKGPRGPVIGIDLGTTYSCVGIYKDQKVEIIANDQGNRITPSYVAWDSNDERLIGDGAKNQATINPEKTLFDVKRLIGRKYTDKSVQSDKKLLPYELVNKDGKPFIQVQVKGETRQFAPEEVSAMVLTKMKHIAEGYIGREVFDAVVTVPAYFNDAQRQATKDAGTIAGLTVQRIINEPTAAAIAYGIDKKAQGEKNVLVFDLGGGTFDVTLLAIDGGVFEVLATNGDTHLGGEDFDQRIMQYFIKKWKKDKNIDVASDKRALQKLRREAERVKRALSAQAQARLEIESLLEGEDFTESLSPARFEKLNDDLFKKTLGPVEKVMKDAGLKKSEVDEIVLVGGSTRIPKVQQLIKDYFNGKEPSRGVNPDEAVAYGAAVQGGILGGEQDDLTKDVLLIDVVPLSQGIETVGGVMTKLINRNTVIPTKKSQTFSTYQDNQPAVLIQVFEGERAMTKDNRLLGKFELTGLPPAPRGVPQIEVTFEIDANGILQVSAEDKGTGKAETITITAEKGRLSQEEIDRMVQEASEFADEDKRVKDRIDGRNSLEGYLYNLKNNVEGKLDDKIEEDDKDTVLTAVQDAMDWLEDNQEVDKEDYEAKQKEVEKVVNPIMSKVYESGAAQEDTYETGEDDEDDEHDEL

SEQ ID NO: 30673 - protein, 660 aa, Hyaloperonospora parasitica
MNLAKICFLAAAALANAAVSGEDTKGPRGPVIGIDLGTTYSCVGIYKDQKVEIIANDQGNRITPSYVAWDSNDERLIGDGAKNQATINPEKTLFDVKRLIGRKYTDKSVQSDKKLLPYELVNKDGKPFIQVQVKGETRQFAPEEVSAMVLTKMKHIAEGYIGREVFDAVVTVPAYFNDAQRQATKDAGTIAGLTVQRIINEPTAAAIAYGIDKKAQGEKNVLVFDLGGGTFDVTLLAIDGGVFEVLATNGDTHLGGEDFDQRIMQYFIKKWKKDKNIDVASDKRALQKLRREAERVKRALSAQAQARLEIESLLEGEDFTESLSRARFEKLNDDLFKKTLGPVEKVMKDAGLKKSEVDEIVLVGGSTRIPKVQQLIKDYFNGKEPSRGVNPDEAVAYGAAVQGGILGGEQDDLTKDVLLIDVVPLSQGIETVGGVMTKLINRNTVIPTKKSQTFSTYQDNQPAVLIQVFEGERAMTKDNRLLGKFELTGLPPAPRGVPQIEVTFEIDANGILQVSAEDKGTGKAETITITAEKGRLSQEEIDRMVQEASEFADEDKRVKDRIDGRNSLEGYLYNLKNNVEGKLDDKIEEDDKDTVLTAVQDAMDWLEDNQEVDKEDYEAKQKEVEKVVNPIMSKVYESGAAQEDTYETGEDDEDDEHDEL

SEQ ID NO: 30674 - protein, 572 aa, Bacillus subtilis
MSKVIGIDLGTTNSCVAVLEGGEPKVIANAEGNRTTPSVVAFKNGERQVGEVAKRQSITNPNTIMSIKRHMGTDYKVEIEGKDYTPQEVSAIILQHLKSYAESYLGETVSKAVITVPAYFNDAERQATKDAGKIAGLEVERIINEPTAAALAYGLDKTDEDQTILVYDLGGGTFDVSILELGDGVFEVRSTAGDNRLGGDDFDQVIIDHLVSEFKKENGIDLSKDKMALQRLKDAAEKAKKDLSGVSSTQISLPFITAGEAGPLHLELTLTRAKFEELSSHLVERTMGPVRQALQDAGLSASEIDKVILVGGSTRIPAVQEAIKKETGKEAHKGVNPDEVVALGAAIQGGVITGDVKDVVLLDVTPLSLGIETMGGVFTKLIDRNTTIPTSKSQVFSTAADNQTAVDIHVLQGERPMSADNKTLGRFQLTDIPPAPRGVPQIEVSFDIDKNGIVNVRAKDLGTGKEQNITIKSSSGLSDEEIERMVKEAEENADADAKKKEEIEVRNEADQLVFQTEKTLKDLEGKVDEEQVKKANDAKDALKAAIEKNEFEEIKAKKDELQTIVQELSMKL

SEQ ID NO: 30675 - protein, 421 aa, Corynebacterium glutamicum
MALVVQKYGGSSLESAERIRNVAERIVATKKAGNDVVVVVSAMGDTTDELLELAAAVNPVPPAREMDMLLTAGERISNALVAMAIESLGAEAQSFTGSQAGVLTTERHGNARIVDVTPGRVREALDEGKICIVAGFQGVNKETRDVTTLGRGGSDTTAVALAAALNADVCEIYSDVDGVYTADPRIVPNAQKLEKLSFEEMLELAAVGSKILVLRSVEYARAFNVPLRVRSSYSNDPGTLIAGSMEDIPVEEAVLTGVATDKSEAKVTVLGISDKPGEAAKVFRALADAEINIDMVLQNVSSVEDGTTDITFTCPRSDGRRAMEILKKLQVQGNWTNVLYDDQVGKVSLVGAGMKSHPGVTAEFMEALRDVNVNIELISTSEIRISVLIREDDLDAAARALHEQFQLGGEDEAVVYAGTGR

SEQ ID NO: 30676 - protein, 355 aa, Canavalia lineata
MSLVSDLINLNLSESTEKIIAEYIWVGGSGMDLRSKARTLPGPVSDPSKLPKWNYDGSSTDQAPGDDSEVILYPQAIFKDPFRRGNNILVICDVYTPAGEPLPTNKRHDAAKIFTHPDVVAEEPWYGIEQEYTLLQKDVNWPLGWPLGGYPGPQGPYYCGVGADKAYGRDIVDAHYKACVYAGINISGINGEVMPGQWEFQVGPSVGISAGDELWAARYILERITEIAGAVVSFDPKPIPGDWNGAGAHTNYSTKSMRDEGGYEVIKKAIEKLGLKHKEHIAAYGKGNRRLTGRHETADINTFSWGVANRGSSIRVGRDTEKEGKGYFEDRRPASNMDPYVVTSMIAETTILWKP

SEQ ID NO: 30677 - protein, 220 aa, Streptomyces lincolnensis
MKIFLDTPDLSVVEQWLPHGIVDGVTTNPTLLRKSGIEDWTGTVGVLARRIAPRDLSVQVSGVDHDDMVSQAKMLASRGENIVIKVPVISPDGRPHLDVMTTLREYGIPVNATACLSAGQALAAAKAGVRYASLLWGRVGDEGGCPESVVADITGLLRRHGMTAQLLVGSCMYPADITRGLTAGADAVTVPPALLARWLDHHYARATVRDFQADAGVKYE

SEQ ID NO: 30678 - protein, 329 aa, Bacillus subtilis
GGGGGGMADLFSTVQEKVAGKDVKIVFPEGLDERILEAVSKLAGNKVLNPIVIGNENEIQAKAKELNLTLGGVKIYDPHTYEGMEDLVQAFVERRKGKATEEQARKALLDENYFGTMLVYKGLADGLVSGAAHSTADTVRPALQIIKTKEGVKKTSGVFIMARGEEQYVFADCAINIAPDSQDLAEIAIESANTAKMFDIEPRVAMLSFSTKGSAKSDETEKVADAVKIAKEKAPELTLDGEFQFDAAFVPSVAEKKAPDSEIKGDANVFVFPSLEAGNIGYKIAQRLGNFEAVGPILQGLNMPVNDLSRGCNAEDVYNLALITAAQAL

SEQ ID NO: 30679 - protein, 230 aa, Thermotoga maritima
MGSDKIHHHHHHMKIFLDTANLEEIKKGVEWGIVDGVTTNPTLISKEGAEFKQRVKEICDLVKGPVSAEVVSLDYEGMVREARELAQISEYVVIKIPMTPDGIKAVKTLSAEGIKTNVTLVFSPAQAILAAKAGATYVSPFVGRMDDLSNDGMRMLGEIVEIYNNYGFETEIIAASIRHPMHVVEAALMGVDIVTMPFAVLEKLFKHPMTDLGIERFMEDWKKYLENLKK

SEQ ID NO: 30680 - protein, 479 aa, Escherichia coli K12
LISGRHDRKPYYAGEAAIMAINSPLNIAAQPGKTRLRKSLKLWQVVMMGLAYLTPMTVFDTFGIVSGISDGHVPASYLLALAGVLFTAISYGKLVRQFPEAGSAYTYAQKSINPHVGFMVGWSSLLDYLFLPMINVLLAKIYLSALFPEVPPWVWVVTFVAILTAANLKSVNLVANFNTLFVLVQISIMVVFIFLVVQGLHKGEGVGTVWSLQPFISENAHLIPIITGATIVCFSFLGFDAVTTLSEETPDAARVIPKAIFLTAVYGGVIFIAASFFMQLFFPDISRFKDPDAALPEIALYVGGKLFQSIFLCTTFVNTLASGLASHASVSRLLYVMGRDNVFPERVFGYVHPKWRTPALNVIMVGIVALSALFFDLVTATALINFGALVAFTFVNLSVFNHFWRRKGMNKSWKDHFHYLLMPLVGALTVGVLWVNLESTSLTLGLVWASLGGAYLWYLIRRYRKVPLYDGDRTPVSET

SEQ ID NO: 30681 - protein, 268 aa, Helicobacter muridarum
MTKKYSFTKLFIGALIAIIGMLAIACSESGNNKKANNQIEAIKKRGVLIVGVKKDAPNFALMNHKTQQIEGFEIDMAKMLAKQMLGDENKIKLEPVTAKTRGPLLDNGTLDIVIATFTITDERKKTYNFTESYYSDPIGFLVLKENNFKSFKDLDDKVIGVAQAATTNKVVTEAAADLGITVKIKEFPDYPSLKSALDSKRIDAFSVDKSILRGYLDANNEILDDNLKAQEYGMATRKEDIDWSNYVNNFVKDNKQTIDDLAVKWNLK

SEQ ID NO: 30682 - protein, 170 aa, Acinetobacter sp. GXA7
MNILKFRVINKIAETKESFSFVLKPLCEVPPEHVPGKYLPIKIRTGKSLLFRSYSLSSAAAANEDFKITVKRENGGRGSNWLCDNVNVGDLVETLPPAGEFYPQNWERDFIFFAGGSGITPVISIIKTALIKYNNRMKLFYANSSKDSVIFREELKELSLAHPERFDIEF

SEQ ID NO: 30683 - protein, 382 aa, Thermus thermophilus
  misc_feature (234)..(234): Xaa can be any naturally occurring amino acid
  unsure (1)..(382): unsure at all Xaa locations
MRGLSRRVQAMKPSATVAVNAKALELRRQGVDLVALTAGEPDFDTPEHVKEAARRALAQGKTKYAPPAGIPELREALAEKFRRENGLSVTPEETIVTVGGKQALFNLFQAILDPGDEVIVLSPYWVSYPEMVRFAGGVVVEVETLPEEGFVPDPERVRRAITPRTKALVVNSPNNPTGAVYPKEVLEALARLAVEHDFYLVSDEIYEHLLYEGEHFSPGRVAPEHTLTVNGAAXAFAMTGWRIGYACGPKEVIKAMASVSSQSTTSPDTIAQWATLEALTNQEASRAFVEMAREAYRRRRDLLLEGLTALGLKAVRPSGAFYVLMDTSPIAPDEVRAAERLLEAGVAVVPGTDFAAFGHVRLSYATSEENLRKALERFARVL

SEQ ID NO: 30684 - protein, 226 aa, Bacillus halodurans
SFGAFIPRGMTLHLEGDANDYTAKGLSGGKIIVRPPAGSTFKAEENVIIGNTSFYGATSGEAFIRGQAGERFCVRNSGVNVVIEGMGDHGLEYMTGGRVINLGKVGKNFGAGMSGGVGYIYDYDGTFEKKCNKEMILLESLSDEGDVVFIKSMLERHLAYTDSDLAKSILADWNQARKRFIKVIPKDYKRMLEAIERVKREGLSDTEAVMVAFDENKNDKSRVGGK

SEQ ID NO: 30685 - protein, 149 aa, Trichodesmium erythraeum IMS101
IFFPGDPAERVYVLIKGAVKLSRVYEAGDEITVALLRENSVFGVLSLITGHKSDRFYHAVAFTPVELISVPIDQVEKALREDPELSVILLRGLSSRILQTEMMIETLAHRDMGSRLVSFLLILCRDFGVPRDDGIVIDLKLSHQAIAEA

SEQ ID NO: 30686 - protein, 213 aa, Frankia sp. ACN14a
MSKAEFIQAEYIWIDGTEPEPLMRSKTRIIKKGKEPEIWGFDGSSTNQAPGSNSDCVLRPVFVTPDPIRGGDNILVLCEVELTDFTPHPTNTRAATRAVAEKYADMSPMFGIEQEYTFFKDGRPYGWPEVGYPAPQGPYYCGVGGSKMPGREIVERHTQACLDAGLAIEGTNAEVMMGQWEFQIGVLPAPAIGDQIWLGRWLLHRIAEDYGVE

SEQ ID NO: 30687 - protein, 835 aa, Cryptococcus neoformans var. neoformans JEC21
MGLIKSSLGNSNKGKFVDCSTPPLHNSSFIRIQEDSSSTAAARTSTQEDLHASMSPDIKPSFRPEVVKSKIKHYFGYTETTPETVSVFDWARSQTPALGPGIKAYILSLFPFIQWVPRYNLTWLFGDLVAGITVGMVLVPQSLSYAKIAELEPQYGLYSSFIGVLTYAFFATSKDVSIGPVAVMSLETGNIILSVQDKYGDLYSKPVIATALAFICGFIVLGIGLLRIGWLVEFIPQPAVSGFMTGSALNIAAGQFPAVFGLSKKFDTRAATYKVIINTLKYLPQASLDTAFGMTALAALYGIKWGFTWLGKRYPRYGRITFFCQSLRHAFVIIIWTIISWRVNVHAASPRISLVGNVPSGLQHVGRPFIDSQLLSAIGPHIPVATIILLLEHISIAKSFGRLNGYKINPNQELIAIGVNNTIGTLFSAYPSTGSFSRSALKSKAGVRTPAAGLATGVVVIVALYAVAPAFYWIPNAALSALIIHAVADLVASPKHSYSFWRVAPIEYVIFVGAVLWSVFYTIESGIYWSLATSVVLLLLRIARPKGHFLGRVRIKPEAGNTLEHIRDVYVPLDEESSGEDVKVENPPAGVIIYRFEESFLYPNASYINDRLIEQAKKVTRRGGDYSKVAAGDRPWNDPGPSKKNAAAVIEADMVKPVLKAVILDFAAVANLDTTGVQNLIDTKTEMEKWADGPVEFHFCGILSPWIRRALVAGGFGQGRAKEGAALEVAPAVIENLENAASPGMERERYNEHEVSFIHEVGQASNSTSAGTSFSEEEKRIGSGATTPSPQLDGVNERRPSGVSTKTVPLLDRSTPFFHFDLADALNSLNLPENE

SEQ ID NO: 30688 - protein, 858 aa, Cryptococcus neoformans var. neoformans JEC21
MPPKFDPNSPENAPLIQLFQSLGLASNSATELVRQPKSGKAFKSLIDEYGLTNNKYDEKQAGALVKLSSVSAKLGSEQKDFLVQKIVKGDVKTPDQVTAAVKFAEKNPDLKANEEAFDKECGVGINITLADLPELLKSYITSLPSPPEGWNSLGPILGGIKGGASDLRWANATEVKSTLESIFVSLFGTKEAAAAAAAAKPKAKAPKAAEKPVKPVSTTAAVATKSSSATPAIPTNIFEEGFLSEFHKVGENPQSDPKLKEEHLAWTKGQVYTRFPPEPNGYLHIGHVKAIMVDFGYAKYHGGRTYLRYDDTNPEAEEGRYFQSILETVRWLGFEPWKITYSSDNFDRLYELAVELIRRGKGYVCTCDAEKIKEDRGMGKGNPIPCVHRDRPIEESLHEFERMKNGEYKEKEACMRMKMDLNSGNPYMWDTVAYRVKKAPHHRTGDKWKIYPTYDFTHCLCDSIENITHSLCTIEFIPARESYEWLCDALSVYKARQYEFARLNLQGTFLSKRKIAKLVQNGHVKDWDDPRLYTIIALRRRGIPPGALLSFVSELGVTNIPSTTEIQKFESCVRGYLESSAPRLMMVLNPIKIIIDNVPDDYRVQVEVPLHPKIPAMGTVQTIFTKEVYIDADDFREVDSPDYFRLAPGKSVGLFKAPYPVTCTSFTKDPVTGRVTEVHCTLAGEGFKKPKAYIQWVNAPEAVKIDEVRYFKKLFKSDPPPADYEADVDPDSLEVYSNAVIEPAFYELAKKQISDARKDSEERTKKAVEQAAKPDTSSAPVEGSAAAQHKDEEPVATAEQLVGNENIRFQGMRLAYFTLDRESKLGCLEKEDVKGRSEGDKIILNRIVSLKEDAGKSA

SEQ ID NO: 30689 - protein, 415 aa, Cryptococcus neoformans var. neoformans JEC21
MKLINKHIEKDGSGYVTLRPEDDEDMWHVYNLISEGDRVRAMAVRRVQTVSSTGSSDSYRVRTNLTLEVTKTTFSPAASSSQGNGQGEKKEPTASLQISGKVVEENEFVKMGAYHTLDLEANRDFRLTKETGWDSVALERIQESTQEGRGAEVGAIVCGEGTAALCLLSEHMTVIRQRIDMPVPRKRKGGTSGHDKAVENFLSTVYQAILRLIPFQTLKAIVIASPGFTRDALYEYIFQQATLQSNKPLLASRSKWIKVHSTTSHVHGLVEALKAPEVAKMLAGAKFAKEGLGLDKFHKMLATDELRAWYGPEHVALAVDRGAVGTLLISDDLFRSSDPATRTHYVKMVESVRAVGGEVLIFSSMHESGQQLNMLTGIAAILTYPLDIEVVEMEEKEEKERIEREKAEKELAEES

SEQ ID NO: 30690 - protein, 442 aa, Cryptococcus neoformans var. neoformans JEC21
MSVDPIVIIGAGPSGLLLARYLQLHHIPVVIYERDSSPTHRPQGGSLDLHDETGLKALKETGLLDEAKSYMRAEGEAMKIVDKSGKIWYDENGKEVKAHTEFQDGEPVTGRPEIDRTDLRNILIKCLNSDTIKWDHAVSSCSKISSSHYQINFISQPYITTPYLIGADGAFSRVRPLIHSTLPSYSGVSMYELTIPPKNMTPELKTYVGQGCLLALDEGMTVLPQMNSGGLCKVYVGLRCPENWTDENPLPDKGKREWLANLFQGWHDQVRDVIMASEEDKLVIRRIWQFDPDLKWDTDLTGVTVMGDAAHVMSPFAGEGVNQALADALELGISLVSLFTVPTPRASSPPFPLSLLPISQPRSKPLISSPSPADLHHALRHFERKMMRRARKEMIGSKENMDMFFGENAARNLTHWMSTFMIRFVWQTVTEWPVDFLKAIWD

SEQ ID NO: 30691 - protein, 575 aa, Cryptococcus neoformans var. neoformans JEC21
MVNITYGALLSSSDGAVHFEPLGTDIISTLAGQPTAFDPGDIAWVLTCSALIVFMLPGLGYLYSGLARRKNALSMLFLSLVSLGIVSFQWFFIGYSLVFSETGGSFWGDGRNIGFRQVLERPIPEANGKLPEIVFATFQLMFACLVPAVLLGAAAERSRILPAMIFMFCWTTLVYDPLAHWIWSANGWANKWGVLDYAGGVPVEIASGTAGLAYSYFIGKRRGYGTDRVLFKPSNVGNVVLGTVFLWVGWLGFNGGSCYCASLKAALAIFNTNLAGSVGGVVWLIMDFRLERKWSMVGYCTGAIAGLVAITPAAGYVGAPAAALIGLVSAAVSNLATRLKVTMRVDDPMDIFAVHALAGIVGVLMTGLFAQSSVAANDGFSDIDGGWLDRHYVQLGKQIAWACVGMAWTFVVTYAIMFFINLIPGCHFRATDEAEIVGMDEVELGEYVADYAFHQRDLEGEYEAHTLSQCPSATKLHLQEFRHNKDGESSSSSQPKELPPTMPRGGAVVGDLDGDTAVESQHSRSRSRGRSQHRVRIEKEGDNEAMEMSDVRHTKTSDQRQEGSNLEGSYMDHRE

SEQ ID NO: 30692 - protein, 312 aa, Cryptococcus neoformans var. neoformans JEC21
MSPRFGYIGLGNMGVPIVRNLAKYAAASGFPSISIWNRSSAKYALVKDAIPDAFYADDVEEVVMKSDIVLSSLIDDKAAEDVYEKMFKATEGRNVIFVDQSSLKAVTSAKSIGATYIASPVFGRPPAAEASKLLIVLSGPANVKSEVKKHLIPAIGDRFVDVGEDVKLASSLKSMGNMVLLGWIELLAEAFTLGDAVGLEPSVFNGFIQQFFPAPPLTAYSNLISKGEFPSGSGFSVNGGLKDARNMMSLGADLGHPCPLPTIQRAHDNLERAKELGGPDQDWSALAAAVREQAGFSPYREGTNNGQGEKQI

SEQ ID NO: 30693 - protein, 898 aa, Cryptococcus neoformans var. neoformans JEC21
MDNFTDKSSEVLKAALDKAAEMANAQVHPLHLISVLWEEPNQPSSGPDQPTLLKAALEHVGGNPTLFNRALMHKINRLPVVDPPPSPPLPLANSFNAVIREAQKLQKDQNDQFVAVDHLLLALLRTDASDMKELLRGTGAEPRALEAEIKRKRGGRKVDSKGAEGQFDALNKYCVDLTALAEQGKLDPVIGRDNEIRRVIRILSRRTKGNPVLIGEPGVGKTAIAEGLAQRIVDRDVPASLISRLLALDMGALMAGAKYKGEYEERVKAVLSEVEKSGDEGTQIILFIDEIHLIMAGKDSSGGMDAANLLKPMLARGKLKVIGATTLNEYREYIEKDSAFERRFAQVIVDEPSVPDTVAIMRGIREKYETHHGVRIMDSALVLAAQLAKQYLTARRLPDSAIDLLDEAASAVKVARETRPEAIDELERKKLGLEVEIHALEREKDEASKERLEVAKKAIADLEDKLGPLKREYENDKHLGDQIHELRRKIDELRTKADEAERRYDLATAADIRYHSIPQREQKLQELEQKEAEKGSGQQVAPEMIAEVVARWTGVPVSRLVETEKAKLLRLEKLISKKVIGQPEAVKSVANAIRLNRSGLGNQNRPIASFLLVGPSGTGKTLLAKTLAGVMFNSEDAMVRIDASEYSEKHAISRLIGAGPGYVGHEAGGQLTEAVRRKPYSLILIDEIEKAAREFHQLFLQVLDDGRLTDGKGRVVDFRNTIVMMTSNVGSMYLNEHPSEGAVDPAVRAKVNGAIAKTFPPEFINRIDDIILYRSLSRADIRKVVDVRLKEIQQRLLDNNRKIKLDVDDPSCEWLAQAGYSPTYGARPMARLIQTEILNPLSRLLLQGRVRDGEVAHITVDLRKNRLVVIPNHEPDVIQPDDSEDEDDSMDIEVEEMD

SEQ ID NO: 30694 - protein, 358 aa, Cryptococcus neoformans var. neoformans JEC21
MSQLIATKRVDLLAPYLALDQGSRVQAEYIWIDAEGGIRSKTMTLDKAPSSVADLKEWNFDGSSTNQAPADNSDVFLRPVAIFKDPFRGGANILVLCECYDNDGTPNKSNYRAHCKKVMDAAKDTEPWFGLEQEYTLFDADGQVFGWPKNGFPGPQGPYYCGVGAGKVFARDFIEAHYRACLYAGIKISGINAEVMPSQWEFQVGPCTGIEMGDHLWMARFLLLRIGEEWGITPSLHPKPLKGDWNGAGCHSNYSTKDMRTPGKGMAAIEDAIKKLEKKHLEHIAVYGEDNDLRLTGKHETASMTTFSAGVANRGASIRIPRHVGAQGYGYLEDRRPASNVDPYRVTAILVETTVLNN

SEQ ID NO: 30695 - protein, 411 aa, Cryptococcus neoformans var. neoformans JEC21
MRITAKRLASHIPRQESYIVASKRTPFGAYGGKLREFKASELGGIAGKAALAELPQGIKIDQVFFGNVTQTDNSTPYLARHVGHLSGLDSTVPALTVNRLCGSGFQTAIIGAQHIALGEAEVCLTGGVEAMSMSPYTLSGLTRYGSKYGVDLKMEDSLAAALVDQNPGGPKTPMGITAENLAKKYNITRDECDAFALMSQQRYADGLAAGAFASELIPVTLKPIKGVPQTLEADEHPRPQSTLASLQKLPSVFIKGTGVVTAGNASGICDGAAANILMSEEAVNKYGVKPLARVASYAWSACEPEIMGIGPVVAVKEALKKVGKSVGEMDIIELNEAFAAQWLAVQKELQLPSEKTNMFGGAIAVGHPLAASGARILANLTHNLHRLDKQWALGTACIGGGQGIAVVLERC

SEQ ID NO: 30696 - protein, 415 aa, Cryptococcus neoformans var. neoformans JEC21
MASTIQNITNSIPSLGRARLLINSSDDVVIVSAVRTPIAKAKKGGFKDCCPEDLLAAVFTEAVKRGKVNPSQIQDVAVGNVLPPGGGANVARMAQLYAGIPYTTPINTVNRQCSSGLTAVVQIANEIKAGEIDIGIGAGVEHMTAHYGAGVLPEKMSEEILSNPESADCLTPMGITSENVAKQYNISRDVQDTFAANSFGKAAAAQKAGKFKEEIVPVKVRWTDPKTNDEKEIIIDSDEGIREGVTAESLAKLKPAFAKDGSTHAGNASQVSDGAAAVILARRSVAQKLGLPILGKFVISAVVGVPPKLMGIGPAFAIPKVLEKAGISKDDVDFFEINEAFASQAVMSIQHLHIPFEIVNPVGGAIAIGHPLGCTGARQIATAFSEAKREKKKIFVTSMCIGSGMGMAAVFVNEQ

SEQ ID NO: 30697 - protein, 799 aa, Cryptococcus neoformans var. neoformans JEC21
MKFMLGDLPVLFPYDRLYPEQYSYMADLKTTLDAGGHCVLEMPSGTGKTVSLLSLIIAYMQFYPNKRKLIYCSRTVPEIEKALAELKRLMMYRAEMGANDGDFRGLGLTSRRNLCLHPEVSKEKKGKIVDSRCRDLTSAFACEKGRADPGSVPLCSFHEELNNYEPGNLIPPGVYTLDDVKKYGQEKGVCPYFTIRRMLPFLDVMIYSFHYLLDPKVAEQVSAEMSKESIVIFDEAHNIDNVCIESLSIDLTRPMLDSAARSVNKLSDKIAEIKETDAKKLEDEYAKLVEGLQEANERVEDDDMLVSPVLSKDMVDEAIPGNIRKAEHFIAFLKRFIEYLKTRMRVLHVVAETPQSFLAHLKEITYIDQRPLKFASERLTCLVRTLELTNLEEHSALQKVAGFGTLVATYEKGFLLILEPYETEHATVPNPIFHFTCLDPSLAIAPVFDRFASVVITSGTISPLDMYPKMLQFQPVMEQSYPMTLTRNAFLPMVITRGSDQVPISSRFEVRNDPAVVRNFGSILIEMARTVPDGVVAFFPSYLYMESIVSAWYDMGILSEVWKHKLLFVETPDAMETSIALRNYREACNNGRGAVLLSVARGKVSEGIDFDHNYGRAVIMFGIPYQYTESRILKARLEFLRDNHRIRENDYLTFDAMRHAAQCVGRVLRGKTDWGLMVFADKRFARQDKRAKLPKWINSYITEAHSNLSTDVAVSLAKKFIRQISQPFDHTQTGISLWTLEDIEERQRRDKDEAERVEMTQSAAIRESAAEENDHAPLASDYMEIDDAELAGLSIPIDE

SEQ ID NO: 30698 - protein, 448 aa, Cryptococcus neoformans var. neoformans JEC21
MAPILADDLRIHIIGAGMGGMGSALALAKQGYTNIHVWESAREIGEVGAGINITPNLSRILDGWGVLDIARAEAVALDGASVLRCAEDDVLTSVDFQYIEKEFGYPFYVVHRSALQKCLVTGAMDSGVVKLHLGKLIKEWDFDNNRFFVTSRDQANGTANGNGSTGEWVEGDVILAADGVKSKARGAMLKRKGEEDHVEDTGQAAYRIIVKRSMINEDPELLPFFTGSHSYRWIGEKRHIIAYPIASHDLFNMSTAHPDRRFVEADSWTASGSKEEMLDMFHDFCPRVQKLLRTVPEDSVLEWKLRVHTPLSHWVDGNTALVGDACHPTLPHLAQGAAQAVEDAAVLGVVLSKIKSKEEIHKALLVYQALRKPRADWAVLTAAANGKGLHLGAGKDQEARDAAFRQAKKEGGENPDKAIDQLTQKILYAHDCAKEAEERYAELLAEVV

SEQ ID NO: 30699 - protein, 508 aa, Cryptococcus neoformans var. neoformans JEC21
MSIPIPDRNRRQSVSASDPPNNIPIPANTRGIPVSSFAPHSPPTGTSPRNSSFSFSTSPSTSYLRNASGAFHGIARQLTAFLPPDYPTQENHEKRQGKTKILLLENINLDAADYLKSQGYEVDHVTKAYTEEELIAKLPNYHAIGIRSKTKITAKVIDANPQLLAIGCFCIGTNQVDLEHAAKRGIAVFNSPFSNSRSVAELVISEIIALSRQIIDRTHEMRAGIWNKLSKNCWEIRGKTLGIVGYGHIGSQLSVLAEAFGMSVIYFDVVPIMPLGSARQVDTLEDLLSRADFITLHVPEIPDTIGMMGAEQFSQMKKGAFFINNARGKVVDLSALCDALESDHLAGAAIDVFPKEPGSNGPGFNETLGDFIPRLRKIPNLILTPHIGGSTEEAQRAIGTEVSNALTRYLNYGTTLGAVNFPEVDLRAITAADERHIRVCHVHKNEPGVLRGINNILADHNIEKQFSDSKGDIAYLMADISGVGQEEVEGLYSAIKNTRSNILTRLLY

SEQ ID NO: 30700 - protein, 1408 aa, Cryptococcus neoformans var. neoformans JEC21
MSASPGPTAAAAGSDHLQARRDEEVIDSEKDVLAHDAHAVNSGIPYPTATAPNIGVPTVSTSVGRVSSAPEEKISRSSIAASSDTLRNPPLEKSTSNAVSKSHTHKKSKFNFLKSRKKKEEEERKNKEKEKEASVLPPVSFFALFRFAAPLEIVAMVLGLVLAVAAGCCQPLMTLIFGRLTTSFTNYAVIVNQISQVGLTPETSAALQAAKDDLKTQSGHNALYLMAIGIAMFLATWLYMFIWNVTGELNSKRIRERYLAAVLRQEIAYFDDLGAGEVATRIQTDCHLVQEGTSEKVALVFQYAGTFVCGFVLAFVRSPRLAGALISILPVIMLCGGIMMTAMAKFGTAALDHIAKAGSLAEEVIASIRTVQAFGKEKILGDKFADHIEQSKIVGRKGSIFEGFGLSIMFFAIYAAYALAFFYGGVLVSQGRADSGIVINVFMSILIGSFSMAMLAPELAAVTKARGAAAKLFATIDRVPTIDSASDEGLKPDSLHGEISFENVKFHYPSRPSVPILKGFTTTFEAGKTFALVGASGSGKSTVVSLIERFYDPISGVVKLDGKDIRSLNLNWLRQQIGLVSQEPTLFGTTVRGNVEHGLIGSRYENASFEEKFELVKKACVDANAHDFIMKLPQGYDTMVGERGMLLSGGQKQRVAIARAIVSDPRILLLDEATSALDTQSEGIVQDALDKASRGRTTITIAHRLSTIRDADRIYVMGGGEVLEQGSHNDLLANENGPYAQLVNNQKLAQEAAAEALQVDDDIDDPDDVVFGGPSSPMQEKDRQLHRAVTGRSLASIAMDDIQAKRAEEVAGEDKIPSSFGLYARLLRMNSADKFIYIIAFIAAICAGMVYPALAILFGKALSDFEIQDPTELRDALSRRALWYFITALAAGFVIFFQSAGFSHAGWDLNGVLRKKLFTSTLRHDIEWFDEEHNSTGAVTSNLADQPQKVQGLFGPTLGTIIQSCATLLGGCIIGLCYGPLLALIGIACIPILVSGGYIRLKVVVLKDQRMKKLHAASAHLASEAAGAVKTVASLTREKDVREIYSEALKAPMKLNFRTSIKSQCLFAASQGLTFCIIALVFYIGALWIINGKYTTASFYTVLNSIVFASIQAGNVFTFVPDASKANSSAASIFRSIDNEPAINAESSEGKVLDHEHVVGHVRIEGVHFRYPTRPGVRVLRNLTIDVPAGTYVALVGPSGCGKSTTIQMLERFYDPLAGRVTLDGIDIKELNLASYRSQISLVSQEPTLYAGTIRFNILLGANKPLEEVTQDEIDSACKDANIYDFIVSLPDGFDTEVGGKGSQLSGGQKQRIAIARALIRNPKVLLLDEATSALDSQSEKVVQEALDKAAKGRTTIAIAHRLSSIQHSDQIYYFSEGRVAEQGTHQELLSKKGGYYELVQMQNLSRQ

SEQ ID NO: 30701 - protein, 339 aa, Cryptococcus neoformans var. neoformans JEC21
MALSNAPKVLFLDTIKLAKSQLSSFSKIANVIPNTSKTREEFLHDLGTKYKDVTGIYRHFKASESIKITGRFDEELVSKLPSNLKFIAHNGAGYDQIDIPPCTARNIQVSNVPSAVDNATADTAMFLLLGAIRNFSSALLHARQGTFNSQLPLSHDPQGKVLGILGMGGIGSALARRAKPFGLKVQYHNRRRLTEEKEKETGATYVENMDQLLATSDIVSLNLPLTAATKHLISDDTFSKMKPTSILINTARGPIVDEAALVRALESGKIAGCGLDVYENEPQITKELLDHPNALCLPHVGTVTVETQTEMEAVCLRNLEHGLKTGKLAFTVPEQAHML

SEQ ID NO: 30702 - protein, 812 aa, Cryptococcus neoformans var. neoformans JEC21
MSTNLGINHNSNQYLDDEKDLVLEKKESDLHGTHIAEVHYYTTKNGVRITVGDTPKEVKAVAVEVDDVNEPCETFRAYVIGTILAAVGTGLNVWFGARQPGIYISPFIIQLISHPLGLILSKILPTRRFTLFGQEWSLNPGPWTIKEHAIITMMSTVSLPTATALDVVVAVRQPTFFNDSEMGNSQGFRWLVVLSTQFLGLSLAGLAREYLVYPSDMTFPLNLAKLSLFNALHRRKVDENGMVQVAEHHLHEDENEKDPPVHGWKISMFKFCLIATAGSFIWFFFTAFIFPALTYFNWPTWIAPDNKKLAIVMGSITGLGLNPIPTFDWTYISGAGLTPLITPWWATLQTFIGCTIGFFAILGIYWSNVWYSAYLVPNSNQAFDRFGAIYNITGVLSADKTLDVEAYRQYSPMYFGAGYNIVIAGFFASYSAILVYAALEHGSQIKNGLATAYGKTVSFVRRSSAPEESHNRPEYDIHYAIMHKYKEVPQWAFILVLVFSLVTGIIMVEVYKTTMPVWGIFVCLALAFIFLIPAGIIQALSNMQITLVILAEIIPGVAIPGRPYANMIFKLYGWVALVMALLYVQDQKLAHYLHIAPRATFRVQMWGVLVSSIVSVGVLTWQFNAIPDMCEIGQKDLMTCPYYTTFYSSALMFGVVGPERMYGANGLYKWTMFAFLAGAIATFAAWLVKRKWPNKYTKSVNIPVVITGLLYYAPYNWSFVWSGVPLAWFFMSYVYNRYSSWWSKYCYVLSIGLTVGAALSGVVQFFCITYPGGAMPSWWGNTAYASGCDGLGCPLLEMPEQGYFGPGPGEFS

SEQ ID NO: 30703 - protein, 234 aa, Cryptococcus neoformans var. neoformans JEC21
MSLGSEFQGFKQWKSLEERGISSEVLETLTDESRECLERLANYDSHSVHDFGIVKQAAVLVVLFQREADDKLHVLLTTRAKTLRRHPSQTALPGGKVDPEDRDATHTARREAFEEVNLPLEHPSIHNLTVLEPVMTILPLNAHMKNHIIVIPTVCFLSDTSLLEHLRPSPDEVDAIFTHPLKGCLTGTVEGKDLEGLAEKGSEWWPHKEEFHSIEDRIGTTGGYRIVLGRKGHL

SEQ ID NO: 30704 - protein, 496 aa, Cryptococcus neoformans var. neoformans JEC21
MVNVTYTDSSSDMIYTADDGTQYLYNLGDMSFVIAAMALVWIMVPGVGLFYSGLLRRKNALSMIFLSMAGVAVGSFQWFFWGYSLAFSDTGSKYIGDLRYFGLKGVLAEPSAGSDRIPALLFCVYQCMFCLITGVLAIGGFAERSRIGPVMVFLFCWLTLVYCPLACWTWNPNGWSFVMGGLDFAGGTPVHISSGTASLAIALYLGKRRGYGTERLAYKPHNTAFVVIGTVFLWFGWFGFNGGSALSANLRAVQACIVTNLSASVGGLVWMFLDYRLERKWSAVGFCSGAISGLVGITPAAGYVGSPAALAIGAITAIACNFATKLKFLIGVDETLDVFASHGIGGMVGCFLTGLFAQGSVAGFDGITDIPGGWVSHYWIQAGYQMADLTAGFAYTFVMTTIICWLLHFIPGLRLRASEEAEIIGIDDAYLGEFAYDYVGTDPELRLHRIDSKPQFTSGDVIAEVSASNGHESSTTEKVDPHATGNAAAGGGRVDV

SEQ ID NO: 30705 - protein, 375 aa, Cryptococcus neoformans var. neoformans JEC21
MLSASILRPIPVALLGLGGVGKAVLSQLLSPPLSAQFQLVLIANSRLSLSLPLPAAPITPANFQSILEKHGAPLDVTSVISVLSTHPDAPGIFIDCTGSDAIPAMYPQILSMGVHIVTPNKKGLSSSEALYKAIAEKSFPNTPSLLYGESTVGAGLPIIQTLKDLVATGDEIEKIEGVFSGTLSYIFNEFSKPGGGDVKFSEVVKVAKEKGYTEPDPRDDLSGIDVARKLSILARLVPTVPALPEGYASIPTQSLVPDVLSDASTKEEYLERLEEGDEFFANLREEAKKEGQVVRYVGVIDIKSGKVEAKLDKYPADHALATGLKGSDNIVSFTTKRYSPRPLIIQGAGAGADVTAMGVTSDMVKIYERLAVSRI

SEQ ID NO: 30706 - protein, 713 aa, Cryptococcus neoformans var. neoformans JEC21
MALPETIRVSPDSPRAHWKSRPALSRAWESGLKAGPIRCRRAFRDPSPLSVVIVDHCGYSRLRCPTSYICLQNISFQLSTTHPTTSATTTMSDNEQVAFFTYILERLKQCGVKQIFGVPGDFNLTALDYIEKDPELQWVGNANELNAAYASDGYARVKGTLAVVITTFGVGELSALCGIAGCLSERVPVLHIVGAPSTSLQAKQSLLHHTLNLPESFSTFSSMSAPLSCSQALINNIEPKTPTSWTEAFDKTLKAVLEQCRPGYVEVPTDAVHAKVSAEGLKQPLPPPHSAPPPESMGTSLSNTSASAASRGAAQVSLSTAPTNVPSAPSSDDVTAHVVEDITKRFGEAKKPIILVDACAGRFGMAIEVRKLVDACGIRFFETPMGKSLMDERHPLYGGCYAGANSLPTVQKEVESADFVLYVGALKSDFNSGSFSVNIDPKVIVELHSFTTTIGYASYPTTDIRTILPLLRPAFEKLGRGKQSEGQSVEQKVEDKSVDSPVVPDPKGDEIKHEWLWPRVGKWFQDTDIIITETGTSSFGLTNVVLPSNSTYIAQILWGAIGWSVGACLGAAMAAKENGNNRRTVLFVGDGSLQLTLQEIGTMLRRGVHPYIFVLNNDGYEIERQIHGWTAEYNDIQLYDHQLLLPFLAGKKTKTPYQSYAVHTPQEFSKLLDDEEFNKPDRLRLIEVFMPRGDAPAGLIRQAKLTAEANDRI

SEQ ID NO: 30707 - protein, 2135 aa, Cryptococcus neoformans var. neoformans JEC21
MCGVGFICHIKGHAAHKIVSDARNILCNMTHRGATGADARDGDGAGVMTGIPHDFFVREASFCFDAKLPGEGHYAVGNVFFSTDDYAQQQGTFESIAKSLGLRVLGWREVPTDNSILGPASKSKEPKILQPFVVLEEHYGPGQDSQDGNFDERKFERELYILRKQATHKIGLKNGFYVCSLTTSNIVYKGQLSPIQVYNYYHDLNHALYASHFALVHSRFSTNTFPSWDRAQPMRWAAHNGEINTVRGNKNWMRAREGNLRSDRFGDDLELLYPIVESGGSDSAAFDNVLELLVVNGVMTLPEAVMMLIPEAWQNNDLMEPEKKAFYAWAGSLMEPWDGPALFTFSDGRYCGANLDRNGLRPCRFVVTSDDIMVCASEVGTITIEPEKIIQKGRLKPGRMLLVDTKEGRIVDDRELKLTTAKRQPFAAWVESQVLRLPEVVRRVQRFENIDVSLDEVPLSTDPKLLAFGYTIEQLNMLMLPMVHEGHEALGSMGNDAALACMSTTPRTVYDYFRQLFAQVTNPPIDPIRESIVMSLETMVGNEGNLLEIKPSQLHRLHLKSPILTIQEMNSVKHMKLANSGWPSITIDITFDKREGLPGYRNALDRVRQEVINAVDAGFKSVILSDRATSPDRVPLSAILAVGGAHHFLVKERKRSKVALMVETGEAREVHHMCVLIGYGADAICPWLIMEMIYKVGREGLVKESQSVEKLVANYMKATDEGILKVLSKMGVSTLASYKGAQLFEILGLHEEVVGDCFVGTASRVQGATYELLAMDAFEFHERAWPTRDAVMVPGMPESGEYHYRQGSEMRVNDPVSIAQLQDAVRQKNQAAYDTYSKNSRESIKRGTLRGLLEFNFENATPVPIEQVEPWNEIVRRCVTGAMSYGSISMEAHTALALAMNRLGGKSNTGEGGEDAERSIPIPGPGAELNGQPFTHAMELKPVWDSRRSAIKQVASGRFGVTSNYLADSDELQIKMAQGAKPGEGGELPGHKVSASIGRTRHSTPGVTLVSPPPHHDIYSIEDLKQLIYDLKAANPRARVSVKLVSEVGVGIVASGVVKAKADHITISGHDGGTGAAKWTSIKYAGLPWELGLAETHQTLVLNNLRGRVTVQTDGQIRTGRDIAIATLLGAEEWGFATTPLIAMGCIMMKACHKNTCPVGIATQDPALRAKFAGQPEQVINFFYYVIEELRQIMAKLGFRTINEMVGRADMLTVDDSLRTPKTAHLDLSHILKPAQLLRNDVATYRVRAQDHKLYVRLDNKFIDEAEPALQKGLPVTIDCDVVNTDRALGTTLSYHVSKRYGEEGLPRDTIHINMKGSAGQSLGAFLAPGITIELEGDANDYVGKGLSGGRLVVYPPKSSPFKAEENIIIGNVCFFGATSGQAFVRGIAAERFAVRNSGATLVVEGTGDHGCEYMTGGRVVVLGLTGRNFAAGMSGGIAYVLDMAHSFAPKVNMSTIELGPVSDPQEVAELRSLIEDHRHYTGSEIADRVLRNFHHLLPMFVRVMPLDYKRVIEQEAQRAAEEKKRQSVIDLIPSQTASQVDLVATGYDPVLPRDANALTVSTSALISPEGSPKHKPQEPQIVDVEDAMVDETATKERLAKVDKVRGFMKYKRLNEAYRPPRKRVKDWKEISTRLKPSELKYQSARCMDCGIPFCQSDTGCPIANVIPKWNTMIFEGRWLDALNRLLKTNNFPEFTGRVCPAPCESACVLGINEAPVGIKSIECAIIDKGFEMGWMTPNPPEHRTGKRVAVIGSGPAGLAAADQLNKAGHIVTVYERQDRVGGLLMYGIPNMKLDKGVVQRRVDLMAAEGVTFITNAHVGVDSQYDPLNIKAENDAVIVATGATWPRDLKLPHREVDGIHFAMDFLTPNTKVKAFGDDAPGFISAQGKDVIVIGGGDTGNDCIGTSMRHGAKSIVNFELLPEPPKSRAPDNPWPMFNRSFRTDYGHAEVQAHFGHDPRKYCMATKKFVLDDEGKLKGLDTVQVEWTKQNGQWKMEEAVGSEKFYPAQLVLLALGFLGPQQECLKALGVETDPRTNIKTAPNSYSTNVPGVFAAGDCHRGQSLVVWGIREGRQAAAEVDTFLMGSTHLAWQGGIEKRQYVVPSISKPLHGLDEKAGDIETSSQGVDLESASVTASA

SEQ ID NO: 30708 - protein, 605 aa, Cryptococcus neoformans var. neoformans JEC21
MINEQKPVVGWIGLGAMGSGMAASLVSQGYKVQAFDVYPPSLKRVAEQGAIPSSSPRDAAEGVQVLCLMVVNAQQVEETLFGKDGGVAEILKNGASIIVFSTVPPSFLVEVARRLDKLGKNIGLVDSPVSGGSTRAAQGQLAIMSSGTPSSIATARTVLDSLTLPPQGGLTLVGDRVGIASDFKMINQVFCAVSIAAQGEALGLAKALGLNVRTVYEIVKQTTGDSFMFGHRAPWSIRPDPIPKSAMTIINKDIAIVMGEARRDHFPAPLSAAAEQLYTAALAVGLEKEEDGLVSKFWEKLGGEPIAEQGTEEEEIEKARELVIKPGKKVQKVLLATKNIDSRISYLKETLKKAGVEVVEQGKEVDAVIVSAGSAAAVEELLLHISSAGLSVNTPVIIISNVLPSSRLSQLAIEIKPLQLIDAPTAGGSKEAKGGSLTVFASGEADALSASHSILSALSIQGGDSTKLHFIAGGVGSATKVKAVNSLLEAIHLAVTGEGFAFAKHKGMDIEKVFKVLSGGAARSFIMGDRFPRIIKKSSQDAPENTVSTLWNDLSITLAEAKQHKCPFFLTQAAMQQLERLHSSGYADADDSSIIKLWEETGVKI

SEQ ID NO: 30709 - protein, 520 aa, Cryptococcus neoformans var. neoformans JEC21
MFYAMRTLASLAILPLVLSLQLPHFPTPQDTLELAESFIHSGHAHAGDHAAEVEMVHANDMRLSTIGDEHVILTHKKYPNHKVRIKSTTGWCDPDVKSYSGFLDVGYGKNLFFYFFESRSKPSEDPIVMWINGGPGCSSSLGMLMELGPCSVKDDPKGVNDTERNPYAWNEKANVFFLDEPIGVGFSHANNGQTVSTTEEAAIDVQAFISIFFETFKEFEGRAFHMAGESYGGRYLPVFASAVVDGNKQLIKDGKTPINLNSVMIGNGVTDYFTTTESYFPFQCTVHGDLTEPVQSIGACVAMAEAVPKCHKLAKKGCLETHDYTTCSMAINYCEEVLGETFLSAGVNPYDVTMPCTVEELADSLCYPVTKKIGTYLDLPDVRHTLGVEKLRSNWSSCDGPVFTRFTQSLDNTGKTWLYVAGLLERGVRVLNYVGMLDFICNHVANELWMERLEWSGKEGYNAAQFSDWVVDGHRAGEFKTYGNLTMLKIRGAGHMVPYDKPKEALSMVTSWLDAAALDQ

SEQ ID NO: 30710 - protein, 1022 aa, Cryptococcus neoformans var. neoformans JEC21
MPSSANAHDGAARQATVTRKRTNGSSTRDEKQYIGQWRIGRTIGKGSSGRVKIAKHAVTGKYAAIKIVPKGLILNSRMSMSEAGAKADKVLLGIEREIVIMKLIDHPNVLNLYDVWETSSELYLIMEYVPGGELFDYLVKRGRLPVSEALHYFQQIIYAVDYCHRFNICHRDLKPENLLLDKDKNIKVADFGMAAWEAGERMLETSCGSPHYASPEIVAGKAYHGSSSDIWSCGIILFALLTGRLPFDDDNIRSLLQKVKIGIFEMPDEIKDPARDLLRRMLERDPERRITMPEILSHPFFISRPPRPIPGRSLVSPPSLDEVERPVNSVDEIDPDIMGNLKTLWSGVSDEEIIKALMCKDKTWEKTIYHLLIKYRNKHLENYNMEEEEYAEARERRQARKQLQSSSSPARRKGVPAQDQSARLAPLGENETVANTPVKRPQAPTPNKASRKAPPECPTPTKQVSQARSPAGPRPANSRGNSGASNSSQAPAIVLQGATPTKELPPPHTTSSHPRPEMITTPTSPAPLSVPRVEDANLQTFLNQIADQMNRFSVRSSVASQSSTSSSAVLGSDYQACLAFAAGVTPSANPSSSVTESVIEEQGQFEDAADDQTDTEVASIHSGFTASIAPQSPLAGLGLGAPSAAVRPGLHPVAGPNQQRWSYASSAGSSYQGSSVGSYAPVESPQYIHSPLEVQAPVLQAERSAPRPPPRATRPAPPPISRPLPFSPAQQTYSEPTESLLPRDTSYVIIDNSELPSDASLSSWGSKSSGFKAHRGLDGFGMLKKKKLNVEPVPYSYGNLGSSATSPLNSPKRSWFNNLFNFKPATCTLLSRDNVANTRERVRKILLSIGVRTAVTEIDGHKALKCRLDEVRDNGNVTTKGVRFRVEFTRASTSQTYSTLVTLTQEKGAESSFRACFAELKHFMDSQPSAPTTLSLNRPSVEQSRSVNSSNLLPAHSYQQQRYSSTSADTPAGAPTSPLLSAPPIRYTASAPTTPVIESSPRFTSPYLQLPVSPQSLQMPSY

SEQ ID NO: 30711 - protein, 1005 aa, Cryptococcus neoformans var. neoformans JEC21
MTSFNPAPAQIQAAQDHTYGSMPTPTYMGMVDTGAQWDYVGRRGSSRSREPSASPQRAATESGIPRTSTHAASASASSSYAPVAGASGQASSAPHEPTIREEATAVVDRSMRAHQQTTGPSNGNGNSQPKKSKVRMVGDWQLNKTLGAGSMGKVKLATNIVTKEKCAVKIIPRYTDANRKEETTRTPEEVEKQRLKDESKEIRTIREAHISLLLHHPYICGMREFISHQNHHYMVFEFIDGGQMLDYIISHGRLRERAARKFARQIGSALNYCHQNSIVHRDLKIENILISKNGNIKLIDFGLSNLYSPSRHLSTFCGSLYFAAPELLNARPYTGPEVDVWSFGIVIYVLVCGKVPFDDQSMPALHAKIKRGVVEYPSWLSAEVKSLLSRMLVTNPAERATLAEVLSHPFMTKGYDGPPDSFLIRRELLRAEEIDMNVVEAMEGFTFGDANTIYRNLHSILTSEDYLHCVATFEAHREKLRTSSPGVSTNDPSDSPKKKRFSGFDLKKRLFKEDKKVEEAPFKEKVRDPTKGYDPLISIYFLAREKIERERVFGPGFFASSQLSLDTFNTSQGYGMAVPNLPPPASTHVMGHDSSRGPDFASEPRPRSDDVPNPVMAHPSADREQSKLADIPSAVHRRQPSLSQPPLPSSMPAAVERSADEGLTKKFSMLGRGPRPPSAGPAGPSRSASTKRESMTASPSMPIQEHRRATTVVHSDKSKQERRVSVGSFTNSVSKASGLARRASQRDRPPATPPDSRWLNAPAEAEEYHQVETSVRPSSTPREPEPDTANEPQSYDDVKPSYLKGIFSVSTTSTKPANVLIRDIAMVLDRIGIKHRPIKGGFECVHMPSIDLASVVNGDEASTSLSNVPSHASGARRKQSLRRKGSKVNMNGISSNGAGSRATSPGPHRVLTGNSSGTVSGGDVAHLSVPSGKNRHHVGTVEEDEVDAWALAQSGGAGSSLIVRFEIFVVKVPVLPLHGIQFRRVGGDGWQYQMLAKAILREMRL

SEQ ID NO: 30712 - protein, 797 aa, Cryptococcus neoformans var. neoformans JEC21
MSASYNGIEAPIPRDQATDFPIQTFYASTESPELDQKQEDNVDLEKNESTDNVEVKVESIKDPGVELTPNEAFRWNVDGDQSPFPEVAACVPNTDDPSIPCNTVRAWILLTVFVVLFAGVNQFFGLRYPSLTIGYVVCQLLVFPIGRAWEKLPKWVVPLGPFSFYLNPGKFTIKEHALIVICVNLTASTAYAMGSLVAIISPVYWNSDFGAGFSFVYLLTTQALGFGLAGLARRWLVYPAALIWPSSLASTVLFRALHEPQSRSPANGWTITRYRFFVYLTIGAFIWFWFPDYIWTSLSTFAFITWIVPHNQKVNTIFGMNSGLGLLPISFDWTQINYAGYPLTTPFYITCNAFAVVVFFYLFLSPILYYKNVWHSAYLPLLSSSTFDNTGSSYNISRVVDEKLDFVLAKYQEYSPMYISMSYSLTYGLSFAAVTSIVFYTYLYSGKEIWAKFKDAKHGGEDIHKRLMSSYKEVPDWWYGVLTLVVLGLGIFTCRYWDTQLSVWGFIVVCFGMGLVLIVPEGILEGTTNQRIFLNIITELIAGYAWPGKPIANMLVKCYGYNSVKHGMDFAQDLKLGQYMKIPPRTLFWAQIYSTLLATMTQTGVLRWMIGNIKDLCQPTNSDRFTCAGAKVVYNASLIWGTIGPQRMFQAGQVYNGLMYFFLIGPVVTVLVYLVYRRYPSSWVKYINVPVFFNAAGNIPPANTTQYSLWFIFGFIFNYLIRRRAFAWWKRYNYLTQAAMDTGTALATIIIFFALSYNGVKLNWWGNTVGSDTDDAKGTPWLTVPSGSYFGRGPGEF

SEQ ID NO: 30713 - protein, 725 aa, Cryptococcus neoformans var. neoformans JEC21
MLSRQGLGLAANFIRTPLRRRFPANIPVPAHAATLHPQLRALLLQSRLRYYSQSSKKQEKIDKEKEPEEERAPSPIPIHPPASIKLPSATASPTTSPTSPGKDAKPDTSSILKLLTLAKPQWKLLTVGVAFLSVSTAVNLSIPWAIGRIIDFFAPGSEETLLFGLPLEHATGALAVVLLIGAAANSGRSVCLRLAGQRTVARIRNKTYDKYLSMPPSHIEASGVGDALSRLGQDTSIVGQSLSENLGEGLKAVLGAGAGIGAMWLISPTLTVVMLCIIPPIALGTFFYGRFIRKLSLKTQEAMGGMSKLAEERLSAHRTITSSNTQAMEKGLYASKVDGVYKLQKKETVANGIFQGANEVAGDIGMIGLLIYGGVLVKRGEISVGDMTSLFIYVNWIEWSLNTLAGFFTGLMKGVGASQRIIGLHALPSPIPLSSGKLLPKTDAGSIELRNVDFAYPSRPDAKVLNGLNLKINKGERIALVGGSGSGKSSIQLLLLRFYDPTSGSVLFSDNDIRKYIPESWRSRIGVVQQDPVLFGGTIEENIAYGHPNATRGDIKRAAQVAHCDFIEKLPQGYDTLITKNSLSGGQRQRIAIARALVGNPSVLLMDEATSALDSESEHAVNAALNDLFANSDITVILIAHRLSSIASANRVVLLEDGRVVEDGTYEDLISRRDGKFRKMVDGQLAKIQVGEVEEGPEPVSEEEGQHQVEEVKEDAEVKVERKKE

SEQ ID NO: 30714 - protein, 525 aa, Cryptococcus neoformans var. neoformans JEC21
MRRIAPVLLRPLAARAYAAKPLDIDHVQDPDFEDVLGELTRRRRKADAKRRQYGSSFVDHAIVTVRGGKGGNGAAALEASLRGPSFPSGGNGAHGGSVYITTSPELTSLATVKKRLIAGAGGSGGGAFKHGRKGEDLVVQVPVGTIVRELKREGEEERMEREEDDLGLSDAEKKKKRWQRWFIAHPSTKGEVSEEEYADGEDLLRRERRWIAHTPSFDQTPPFHLDISEPLDEPVLIASGGSGGLGNPFFPSPRLASRGTLPPTHTFEFELKLLADVGLVGFPNAGKSTILRALTGRRAEVAGYQFTTLNPQIGVVRVYEDGSWGVGKEEVVETWIEREREDFSRQTGGPFPASRIKNGREDKMERLRFTLSDNPGLLPMASQNVGLGHSFLRSIERSPVLAYVLDLTKPSPVQDLQVLKTELEAYKPGLSERAGVVVLNKGDAVPEEEGKKRVEEVAAFVSEHKSGQVIVLSGRYGLGMETLVALLADNVEKARIERAEMLDRERKAVKEEPVSHRVSGFGLKK

SEQ ID NO: 30715 - protein, 313 aa, Cryptococcus neoformans var. neoformans JEC21
MSEVARKPKDAKAFLTDFLMGGVSAAVSKTAAAPIERIKLLVQNQDEMIKQGRLATPYKGVGDCFARTYKDEGLASLWRGNTANVIRYFPTQALNFAFKDYFKSMFGFKKSEGYWKWFAGNIASGGAAGASSLLFVYSLDYARTRLANDNKSAKKGGSRQFNGLVDVYKKTLASDGIAGLYRGFVPSVVGIIVYRGLYFGLYDSIKPVILVGPLEGNFLASFLLGWTVTTSAGLASYPLDTIRRRMMMTSGGTVHYKSMFDAGSQIVAKEGMKSLFKGAGANILRGVAGAGVLSLYDKAQELMFGKVYSGGSG

SEQ ID NO: 30716 - protein, 319 aa, Cryptococcus neoformans var. neoformans JEC21
MSKVQESTVKKPTDTDVSGFLTNFLMGGVSAAISKTAAAPIERVKLLIQNQDEMIKQGRLSTPYKGVINTFARTYKDEGLVSLWRGNTANVIRYFPTQALNFAFKDYFKTLFGFKRSEGYWKWFAGNIASGAAAGASSLIFVYSLDYARTRLANDNKSAGKGGTRQFNGLLDVYKKTLASDGIIGLYRGFVPSVAGIVVYRGLYFGLYDSVKPVVLVGVLEGNFLASFLLGWTVTTAAGFVSYPLDTIRRRMMMTSGGTVHYKSMFDAASQIVAKEGSRSLFKGAGANILRGVASAGVLSLYDKAQELMFGKVYSSGSG

SEQ ID NO: 30717 - protein, 430 aa, Cryptococcus neoformans var. neoformans JEC21
MPDKTEYLLAINCGSSSIKGKLFAIPSFELLANLAVTNISSADERVKIRITWEEGKGKNSEEEADYGDKIRYASLVPILLDHLTNSTHVEKEEIKYVCHRVVHGGTHDRGIRVVKGHEEGLIEMDKLSEFAPLHNHRAVLAVKSCLDALPHHTSLLLFDTIFHQTIAPEVYTYALPPSDNELSMPLRKYGFHGLSYASIVRSLAEHLKKPSDQVNVVVAHLGSGSSSCCIKNGKSVDTSMGLTPLEGLLGGTRSGTIDPTAIFHHTKDAASDANVGDFTVSKAEIILNKNSGLKALAGTTNFGHIIQNLDPSKCSKEDHEKAKLTYAVFLDRLLNFVAQYLFKLLSEVPIESIDGLVFSGGIGEKGAELRRDVLKKLAWLGAEVDEEANNSNSGGTVKCITKEGSKLKGWVVETDEEGWMATMAKEEFGF

SEQ ID NO: 30718 - protein, 478 aa, Cryptococcus neoformans var. neoformans JEC21
MQDLTAVDNHALQAALHPISVSSSSPLATFSNWAKTFKCKPQRVFVPTTALQCRQILELARREGARVHPVGAGHSPSDLACTNGWLVRMEGLRGTVKIDSEKHTATFLAGTTLHEVHASLASSDPPLAIPNVGSISDQTIAGLISTATHGSGVTFPVLSAHVKSLLLALPLPGTPLVRVSQSEDEELFKASLCGLGATGLILEVEIEVEDAFRLRETKEGKRVEEVLESLDEIRKSAEHVRVWWYPYGKGAVVGRASRTYEPAQPTSDLVGHILGFHVTQFFLYVARIFPSLTSLVGRWAWWLSKEDSVMVDDGYKVLNFDCLFPQYALEWAIDAKEAKACLQEMKKWLDREAADPAGLRVHFPIEIRWSCADDIWLSPSYGRDTCWIGVVTYRPYGLSVPYRQFHEKFSSLLKSYGGRPHWAKQHILGPKTLEVIYPKFKDFQQVLRRVDPSGVLLSENVRRHVQGESIPESLFERR

SEQ ID NO: 30719 - protein, 744 aa, Cryptococcus neoformans var. neoformans JEC21
MKWRVRRVPPMPRWHQAVLAGSNVSGCRGDADGQPAPRQLLSTRIYSLLFLSFFHLCLFLKIFATMAYPSRITRPKRQSGMSSLMSKLTLFAFVLVAVLCFLPVGSQVRAEEKDVDVGTVIGIDLGTTYSCVAIQRGGKVEIIANDQGNRITPSWVAFTEEERLIGDAAKNQASNNPENTVFDAKRLIGRYFDDPDVTRDRKHWPFKIVNKDGKPMIQVNHRGDLRDFTPEEVSAMVLTKMKETAEAYLGHKVTHAVVTVPAYFNDAQRSATKDAGTIAGLTVLRIVNEPTAAAIAYGLDRSGKQESQIIVYDLGGGTFDVSLLSIEDGVFEVLATAGDTHLGGEDFDNRVIDYLVKQYKKKTDIDVSKNNRAMGKLKREVEKAKRTLSSQMSTKIEIEAFEGGNDFSETLTRAKFEELNMDLFRKTMKPVEQVLKDAGVKKDEIDDVVLVGGSTRIPKIQQLLKEYFNGKEPSKGINPDEAVAYGAAVQGGILSGEAGSSDVLLIDVCPLTLGIETTGGVMTKLIPRNSVVPTKKSQIFSTAADNQPTVRIQVYEGERSMTKDNNLLGEFDLNNIPPAPRGVPQIEVTFEIDANGILRVSAVDKGTGKSESITITNDQRRLSPEEIERMVQEAEEFADEDAAVKRKIEAMNNLQNFIFSLKSQIGDAEGLGGKLSEDDKDTILSAIKEKTEWLDEHPQSDAEDYEEQLSELQATVAPITSNLYGGAGGSSYDDEQMPFSHDEL

SEQ ID NO: 30720 - protein, 798 aa, Cryptococcus neoformans var. neoformans JEC21
MKWRVRRVPPMPRWHQAVLAGSNVSGCRGDADGQPAPRQLLSTRIYSLLFLSFFHLCLFLKIFATMAYPSRITRPKRQSGMSSLMSKLTLFAFVLVAVLCFLPVGSQVRAEEKDVDVGTVIGIDLGTTYSCVAIQRGGKVEIIANDQGNRITPSWVAFTEEERLIGDAAKNQASNNPENTVFDAKRLIGRYFDDPDVTRDRKHWPFKIVNKDGKPMIQVNHRGDLRDFTPEEVSAMVLTKMKETAEAYLGHKVTHAVVTVPAYFNDAQRSATKDAGTIAGLTVLRIVNEPTAAAIAYGLDRSGKQESQIIVYDLGGGTFDVSLLSIEDGVFEVLATAGDTHLGGEDFDNRVIDYLVKQYKKKTDIDVSKNNRAMGKLKREVEKAKRTLSSQMSTKIEIEAFEGGNDFSETLTRAKFEELNMDLFRKTMKPVEQVLKDAGVKKDEIDDVVLVGGSTRIPKIQQLLKEYFNGKEPSKGINPDEAVAYGAAVQGGILSGEAGSSDVLLIDVCPLTLGIETTGGVMTKLIPRNSVVPTKKSQIFSTAADNQPTVRIQVYEGERSMTKDNNLLGEFDLNNIPPAPRGVPQIEVTFEIDANGILRVSAVDKGTGKSESITITNDQRRLSPEEIERMVQEAEEFADEDAAVKRKIEAMNNLQNFIFSLKSQIGDAEGLGGKLSEDDKDTILSAIKEKTEWLDEHPQSDAEDYEEQLSELQATVAVSLILLLDIFFVADHRFSLSLPICMVVPVVHPTMTSRCLSAMTSFKAGVEINKSKIAWHWRLPVIVDDASSQIQYGIVLTL

SEQ ID NO: 30721 - protein, 694 aa, Cryptococcus neoformans var. neoformans JEC21
MAPLHRSFSLPVSLSNPVSRLKALSGAAGKDEVSNKPEQIQSPEEPSSSSRRPSLASLRRFSSNASEATTLESNVSKVPPSKKNSPSLGSLTLWGGRRKKLDSATVGEDQGLALKNVDANEDEKERGRRQKKSSSKCVLIPENENELTQTVPPPLPSNTYPPSKSNPPMALLSLDDQVSHLILGAIDRGGKPGSSSSPGSSEMKKTPSALAALGLRAAAIGSSSSVTPNPPKSPEKIVEPSPKEATEMKASFLQTSKPVGGASKSSSKNRAPSPFFRARRARDQARARDTSPEVGALKKDKDNYAESDGESVGGAKKFRPQALAYEDESASEGETEPEGETEEEGSGVDLDEVDIIDEDGEVIFDEETEKNTEANAVFFEGDAAGMGGRGPTDDPDAARNDTDNCSQLDFYGEEVEQDVLGEGPNVVVPPASLFAAPSGQTRGKKNKNVKTGLRLETSRPTFARDRCTIALTQGDPDEALEESGKRMRRYVVLSDLSEESRYAVEWAIGTVARDGDEIFLISVKEDENKLDPKSWSESDRAQKMRIQKERQTTTLLLVKQVTGLLSRTRLQITVTCQFLHAKNARHMLIDLIDFLEPTMVIVGSRGLGKLQGILLGSTSHYLVQKSSVPVMVARRRLLRPLRRTNPANLRHSPRVSLASASIEKAASSKQEDDVVDLAQEEETTDEAAIAADRQ

SEQ ID NO: 30722 - protein, 567 aa, Cryptococcus neoformans var. neoformans JEC21
MSTKPKPELIEQLKALGISERTAYFALSKTKNDISKAADYALSGAAGKDEVSHLILGAIDRGGKPGSSSSPGSSEMKKTPSALAALGLRAAAIGSSSSVTPNPPKSPEKIVEPSPKEATEMKASFLQTSKPVGGASKSSSKNRAPSPFFRARRARDQARARDTSPEVGALKKDKDNYAESDGESVGGAKKFRPQALAYEDESASEGETEPEGETEEEGSGVDLDEVDIIDEDGEVIFDEETEKNTEANAVFFEGDAAGMGGRGPTDDPDAARNDTDNCSQLDFYGEEVEQDVLGEGPNVVVPPASLFAAPSGQTRGKKNKNVKTGLRLETSRPTFARDRCTIALTQGDPDEALEESGKRMRRYVVLSDLSEESRYAVEWAIGTVARDGDEIFLISVKEDENKLDPKSWSESDRAQKMRIQKERQTTTLLLVKQVTGLLSRTRLQITVTCQFLHAKNARHMLIDLIDFLEPTMVIVGSRGLGKLQGILLGSTSHYLVQKSSVPVMVARRRLLRPLRRTNPANLRHSPRVSLASASIEKAASSKQEDDVVDLAQEEETTDEAAIAADRQ

SEQ ID NO: 30723 - protein, 1430 aa, Cryptococcus neoformans var. neoformans JEC21
MVPPARAHTHNTTNTKQAQLSSAYHELANELGTDNISVVGNYTLGRVIGQGTYGSVHLATHRLTGTRAAVKKVPKSFTPHLTRELHHHRRLHHPHIVHLHEIIATESHIWLVTELCSGGELFDYLVERGRILEGEARRLFGELTLAVGWLHMHGVVHRDLKLENVLLDGELRIKLGDLGFAREWQKGRLMDTYCGTTGYASPEMLACQKYLGVETDIWSLGIILYTLLCGGLPFDDDDERVMKELIQKGEYEEPDWLSQEARDLIRGMLQHDPSKRLSIREILTHPWFKMTIVDKVYPNGDVPSIPPSPNPTSPTAAGDDFFAESALRQQQQQQSRLTPHVAGRSPLSTHLPTTPRQNSGSSEAENGDSRTERKASNMQRLNSAEFSTTEKELEQLHLCTSRPAATATGSGAISPRSISSPSMRGKTLRTLPEGQVDVDETPAGLPPPLSLIDEHPHLPVALHSRTPSRTKRRSVSSTLSLERRLSHHSSHNSYITFPPEDYLSKLDPSLLPNPDSSSSSTTTPPARSFTTPSETRLLRQLDDLGLDVGQLKHSVETDACDASAGLWWLLRQKQEERGETDEVVRRREKEVVRREEKVAEYAKEERRKAREAERERERIPTSPMGILGTRPGKRDSIEKSSEGLRFKEEQPPSIPTTPSYTSVIDLGPPVLPVDVDVDVERTAVGRDAPREAAGEEMKSWKRVESPQSVAISSQSSLDPAPTLPPPAAAGGGGAAGAKTQKEDGRDQAGLDPVAVATPMSNANSSTGASTVAKPEPNVNASANANTSANPRLKAKSPSMNMLQRATSVLGGVGKKGDDKDKDKNGMNEKREESTNDSLHPKRGGSSSPNKLKKPMPAGMKGLTSTLSRSESESEGLLAGGGGGGGGGDSPAVSASGSKTVTPGSSPRRKGLTPQGTPRGGLRDAGAKDSSGERASGNGNGNAGGGNEKGKGGKKDSLWTTFRHLFYEDRRRRKRESVTPSASSPLLLPPSDIKLPAGAVVLSRGANSRTSQFKRSNVGYAPSTGSRRTSLDGNRPVYSRRSSSVHTTSRRSSVGSLHFQDHQAMISDLSRRASQRSHGSQTPTSDREYLDYPSAAAPISRPGSSHSIRGGVGGGSRRSSFSVRSPSLHPETFSASAGGPTSTRFKSSVPPPASPLLGYRRRPAGGNDSSRVRHIKVIPESQIMRSSSVASSIRSNASSRASSMDRDRDRDRESEYESGRDDVSLRSGKRQKRRSGSQRSLAQQIHRTRSPLALSLENTYGSNSVANVGLGIGGASRIPKKPLRDVFQKKGKRKDGGDDDWVSEDEDGFACGLGQGRGIAKSFSNANANGTVWMNVNAKTNPARSAAAFPTSKMVAQPTAQGGTSRRRERGRRSSLEEERGRPQEGKGKAKGETAAQGLMGIESLSGRSRRNLPDRSTAPGIIEEEEEDEE

SEQ ID NO: 30724 - protein, 725 aa, Cryptococcus neoformans var. neoformans JEC21
MLGTTVGFHVHLRQQLFASAVRVRPMAGSRCLDVLPTQPRLLLQQRPRLCRTLTNRSSQPSIQQSRSDKSAQPELAEIDTTTPERPAKRQSLISRLTSKVSLQSTKGASSENGESETGASSVRKLISLAKPESRHLSVAVGLLLVSSSVSMLVPLTIGKLIDFFSTNSSTFLGLSFPVAAGLLAVTFCVGAAANAGRAIIMRTSGQRIIARVRNQAYHSTLRQEPEFADRSAGDIVSRLSVDTNILGDSVTSNLSDGLRALISATVGVAAMFWISAKLTLVMLCVVPPVSLGAVFYGRYLRKLSNLTQEAVGDMSKVAEEKLNAFKTVAAYNSQSLEANLFSQKVDRVFQLAKKEAYMTGIFWGASGLTGNLAMLCLLGYGGHLVATQEITVGDLTSLLMYSAYVGGSVSGMTGFFTGLMRGVGAGGRVFWLLDRQSHIPLEAGVKLSAARNGPIVFENVRFRYPSRKEVEVLKGINMTIEPGMSVALVGSSGSGKSSIQALLSRFYDPEEGKITFDGTDIREFTPESWRSRIGVVFQDPILFAGTVHDNIAYGSPDITREDVEEAARAANCDFIWDLPDGFDTMIGKASLSGGQRQRISIARALVRNPSILLLDEATSALDSTSENAVNAAIDDIIHKRNITVVLAAHRLSSIAMAERVVVLENGVVSEAGRYDVLSRREGSRFRTLMAAQLLVEKNSGVEDGAPEEEGEGNKRELEEARIIEK

SEQ ID NO: 30725 - protein, 580 aa, Cryptococcus neoformans var. neoformans JEC21
MTSPYIPLPAAPLPLSEDPSSMELSSSADDDEGHGRPRLGRSATINSLGDFEFEHALLPLTLSGDADVDSHKEERHVELWHGVALVVGAQVGSGIFSSPGVVVQEVGSVGASLMVWVISGVLAWTGASSYAELGCAIPLSGGSQAYLAYAFGPITSYLFTWTAVSALKPGSAAMIALIFGEYVNRLISHSLGDSEVPAWSIEVTAVFAIFLCSILNAISPTMGTNSTVVLTVIKIGALVFVAVLGAIVLLRDGPGEGLMPSGLFKGTLADAGNYAIAIYSGLWAFDGWDACCYVAGEMRDTNRDLPRALHSSMAIVVVLFLGANLSYFIVLSPSVVASSNTVALDFGKVTIGKFGAVVFSTLVAISCFGALNGGLYTTARLIYAASKEHFLPSIFSRLHPQRRTPDNAILLQGGLAIFFVIFGGGFRALLNFFSVASWTFYLLTVLGLLVLRVKEPHLDRPYRAWLVTPIVFCAVSMFLLLMPIFAAPWEAFAAFVFIASGMPVYYLTVRSRTRNAELDGASSSGWGVRVTLSDAWIKFREDIDRLLPREWQQPYRPQPHYNSDRRRGMLGEQVEMSERR

SEQ ID NO: 30726 - protein, 152 aa, Cryptococcus neoformans var. neoformans JEC21
MVFAKLGLRTLRSLPQSQVARSTTILAQRRFLSAEARKLIDGAVKSNPLVVFMKGTPDAPQCGFSRAVCQILDVQGVPRENLKTYNCLEDQELREGIKEYSEWPTIPQVYIKGEFVGGCDILLSMHQSGELEDLLIKEGLAPPLPEGPEGSA

SEQ ID NO: 30727 - protein, 989 aa, Cryptococcus neoformans var. neoformans JEC21
MDSMHPDPTPDIPPSLPDLKAQVARLEASHKEKGLPLSGRIIHVMHHLPVEIVRIVPADALESAGSGFLSPPMTPEFKPEDAETTVESADAKWRIHARTAHPALVSGIKSLSETHDQLLVAWTGEVLIQPDNTQSPQQPSQATFSSIASNLLAPFSGGAGDATPQPQPPPQQGSLMVFGGEFNEADQKEIASELDRFAEAESKFDPTDKLKYVPVFLPPDVSKGHYEGFCKKTLWPLFHYLLWLDSTATVPSPDPSWLAYQKTNQMFAQRVAQIYKPGDLIICHDYHLLLAPKMIRESLGQVFHPNAGWGTAHPSPSLHHAQRKGFDWESNQQTPTPEKAKGEKIGAFMNHVGTALGNHLGTMEHGLQNEIMIGMFMHTPWPSSEIFRCLPKRREILDGMLGANLVSFQTYSYSRHFVSTCIRVCGYESTPGGVDANGQVTAVGYCPIGIDIKRVVHDRAQPGVLPKMQALRDLYKDKKIIVGREKLDVAKGVYNKLQAFEKFLQVYPEWRGKVVLIQVTTPALSESPKLERMTAELVSHINGTYGSLDFTPVHHYHQALEKDEYFGLLSCADLALITSLRDGMNTTSMEFILCQDKTSKSPLVLSEFMGTAPSFASALQINPHDLLGVAQAINKGLTMREEEKAERHANLLEGVLAHTSHTWAATILKQLLENVGGEHTAHHTPALDTAQFADAYKKANKRLLLFDYDGTLTPIVKVPAHAVPTERTRNAIAALCKDPKNIVYLISGRDGDFLEEHWGHLDRLGLSAEHGSFVKQPGEEDFINMTEALDMSWMSEVEEIFKYYTERTTGSTIEVKKASITWHYRNSDPDFGEFQCKQALDLLESSLAPRRPIEVLVGKKNLEVRPLAVNKGEIVRRLMYENPDVDLIFCAGDDKTDEDMFRALRTVFPPGGVVDNNPVVMKPPVAVTSALEPEEVAELPDVELSIRTKGVFATTVGPPAKRTLAGWHVTCPEEVVEALESLLEEIQVV

SEQ ID NO: 30728 - protein, 944 aa, Cryptococcus neoformans var. neoformans JEC21
MSSLASAPPTASIPASDSYNSPVQSSGPGLSNGNSTPSKWKSVFKLGRTATIGRGKENRSALGGESFVLDNKEQQSFAGEVSPAVPTEPYLPPRKTQLRAHTDPYPPKSPSVKNNPGSVSVEHFDSKVLHEEGMPKTREEGSSESFNVHLNSSNGNLQTTSTSGEQSRPYSSVTDSASASTTERTSHSSGGHFLPGDGSLHGVASSNTYGTASTRSPTGGPLGIGNLKSRFFSAPLSAPAGKNKHDKSKSEKYRGLGKVATDFPQSTAPPSSAGGASSSGGGRKKSDGSSSLSSRGAASPRTPAKSKREPSANSSRRMPFGQTNDNGSNSGSVAARFLRRVVSAPNTKALFSNNLFSNAPDVPPLPAPKNQPNSSTSSKEKSSSPVVIVGNSGGHIDLTSSPDSDHPPSISPLSNSSTMYTSQTSHTPSASASATPTPSPLKQKNHFLSPTASPSPGQGSGLSAKGTRASRSLTTGTAPVLKNIRQLQGYSGSSPGGGGYMDGESRHKQVFKRTYSSNSIKTKQVEVTASSFQKIKLLGKGDVGKVYLVREKKTDKLFAMKVLSKKEMIKRNKIKRALAEQEILATANHPFIVTLFHSFQSQDYLFFVLDYCMGGEFFRALQTRPGKCLSEEHAKFYAAEVTAALEYLHLNGYIYRDLKPENILLHQSGHIMLSDFDLSKQSGEAGGAPAAIRHGGPNGQTILVDTRSCIADFRTNSFVGTEEYIAPEVIKGHSHSSAVDWWTLGILVYEMIFATTPFKGPNRNATFANVMKNEVLFPESVPVSSNCKSCIRKLLIKDENKRLGSASGASEVKQHKWFASVNWGLLRNMTPPIIPEESNGIDTINFRPLRESKSIDFDRDDITTDIIHAKAGSPSVSGNSTPGMLTPKELVQTTSSSSPIGGGAGGTSGHSSSAMPIPGSMRGYDKEKNPFGEFSSVTRDFGEC

SEQ ID NO: 30729 - protein, 382 aa, Cryptococcus neoformans var. neoformans JEC21
MHFDEPISPRSQPSNLPGFLPGFESRRAFSLPSITMPFNNYGNNNAPLLPLTRHSFSGHSSRRSAARRLSYGIKNRASQYPYSVTIGGILTLALFFFVYTSPGSDLGRYNSAASRLHIRTPNEDILPLPTSERVIHRPDSKMDNGVMLLTVDENELIAEDDLFWDTYTEAEPLSAEEAAAEAELQAHKQNVQAQNVAQSLRALVWWLAEGGVLPNDFEVPSKSHLKKIGSSGFEKLLSSIDAGEEDEIIFEDGWADFANKRYRIVVFSKTYCPYSKNAKSILGKYHLSPAPFIIELNQRSDMEALQGLLQRFTNRRTVPNVLLDFISIGGSDDITLLHSEGGLHRKFEEMGAFPGLVRRATSLLPDSEENRRDEFEDHEDRS

SEQ ID NO: 30730 - protein, 101 aa, Cryptococcus neoformans var. neoformans JEC21
MSERGSNPPEEKPKAEEPAADPNTLNIKITNTNNEEVFFKIKRTTKLNKLKSAYADRVGTDVASIRLLFDGHRILDHQTANDLDLEDGDAIEVQLEQVGGY

SEQ ID NO: 30731 - protein, 345 aa, Cryptococcus neoformans var. neoformans JEC21
MPKILVTRNLGEHAMTILRQSGYDLIVNPDDAPPSREWVLNHLADPQVYAACIMHSQPSDKVDKELIATANDNLRCISSFSVGYDHIDVKAANARGIKIGHTPGVLSDAVADIAVILVLSTLRRIGEGINLVKSGNWKQQPWAPFVNCGLSIGHPSLTIGFLGFGRISQATVQRLLAFTNKEQPPRILYTSSYRRDNQDEIDAGFSKTFGVEVRREERETLASQADILIVLCDLNPSTKDLVNKNFLQKMKKSAILVNVARGPIVNSEDLHEALVSGQIFGAGLDVLTGEPDIPADHPLLTLDNCLVLPHLGSADYDTRNAMAERCVRNAIAAANGEPLVAEVKV

SEQ ID NO: 30732 - protein, 335 aa, Cryptococcus neoformans var. neoformans JEC21
MSKPQVLIAANPKTGIVWSKEEQSSKLGAVAEVLELASASRSEFFQDLAPNGKYANIVAIYRHNDSVSAIGLFDEELINKLPASVKYICHNGAGYDQIDVAACTARGIQVSHTPQAVDDATATVGAFLAISAMRQFWRAEVNVRSGKWKAGLSPARDPEGKTLGIIGMGGIGSALARRLLAFDMKVIYYNRRPIQPPPNFPCTYVSSIEELLKQADVVSLNLPLNEKTKGSFGRQEFGLMKDGSVLINTARGAVIDEEAFIEALESGKLYSAGIDVYPDEPNVNPKLLAMDNITLLPHMGTETRDSQKKMELLVLDNMISALAGKGLLNQVPEQK

SEQ ID NO: 30733 - protein, 406 aa, Cryptococcus neoformans var. neoformans JEC21
MHTSLRLLSQNIKQARIMANPVYIVSASRTPVGAKDGALATVSAPQLGVVAVKHAVERAGIKPERVEELYMGNVVQAGVGQSPARQVGIGAGIPETADATTINKVCASGMKAIMLAAQNIQLGQRGVMVAGGMESMSQAPFLVPRQTPAFGHFETKDSLVVDGLFDVYNKFPMGNCAEHTAAKLKITREDQDDFCLSSYTRAQEAWAADAFADEIAPVTVKGRKGDVVVKEDEEYKKLLKDKFRTIRPVFVKENGTVTAANASTLNDGASAVVLASGEVVEKEGLKPLAKILGFADAACAPIDFPTAPTLAVPLALKNAGVTKDEIALWEFNEAFSVVGVAAERVLGLDRSKVNVKGGAVALGHPIGSSGSRIVVTLVHALKKGEKGVAAICNGGGAASAIVVERL

SEQ ID NO: 30734 - protein, 242 aa, Cryptococcus neoformans var. neoformans JEC21
MSASNLVQVNSPEHFRELLSADLNRVSCLNFWAPWAEPCVAFNNAVEQEAAQFPSVLFLNIEAEQLADISESFDIEAVPSFLVLRGHTLLARHSGADASLLRSLLTQHASPSAPLSTSSAQPQAPAAAQRPRTEAEIVARCHELMNKHKVVLFMKGNPTAPKCGFSRQTVGLLREQGVEFAWFDIFSDEDVRQGLKKVNDWPTFPQIIVNGELVGGLDILREMIENGEWQELMDSIEEGKAE

SEQ ID NO: 30735 - protein, 373 aa, Cryptococcus neoformans var. neoformans JEC21
MNSTPTPTPQPDTDNPHSNDANHADDRRPLAAHIPDYAGKSPFPAPPSRFTPRTPLQFLSNSPTNTDASAISCPSYILPTLPSSAASLPSLDPPSSNDRLAMINRIKSLGSYTNSPATVKIPLPTPSPSVSLSLSSRGPATPSSSIIRNKPHMPSPLNKLDYLYDIPPSPPISADADPGQLLVMPRMPNPDVESPIASPFVNLNLQTSTSSNRKPGGHTLLARHSGADASLLRSLLTQHASPSAPLSTSSAQPQAPAAAQRPRTEAEIVARCHELMNKHKVVLFMKGNPTAPKCGFSRQTVGLLREQGVEFAWFDIFSDEDVRQGLKKVNDWPTFPQIIVNGELVGGLDILREMIENGEWQELMDSIEEGKAE

SEQ ID NO: 30736 - protein, 504 aa, Cryptococcus neoformans var. neoformans JEC21
MDAKKATIAVIALAAAATAYKVMSTTQEKKNTEGVCPATGQKLAGSTGCPFSSGLPLPDPAHRCDPNSIQEEYKVPEVPPLTEAQKDIIKSTAPILEQHGVTITTHFYKNMIRAHPELRDVFSESAQKLGHQPAALAAAVYAYACNIHDLTPILPVVERIAHKHTSLHITANQYGIVGKHLIQAIVDILGDAVTPDIADAWYNGYWNLAHVFIKRERELYDSAIEAGGWEGWRQFKVAKRVKESNEITSFYLKPVEGSGKPLPKFRPGQYTAVQIDIPALGHKQARQYSLSDAPNGEYFRISVKREDGVPVPTFSNPEVPFHPGWMSNVLHKDYQEGSIINVASPFGDFYYAPSDSSPTAPLVLLSAGVGQTPVMAMLNAQLAKNNEPNSPAKPITYVTVARSPKVRAFKDHVKKLSEVHENVKSRIFYSRPTDDVVEGKDYDFKGRMDLEKIKEDLYLEDKTAEYYICGPSKFMLNTRDKLQSLGVDPSRIHYELFEAGNLSA

SEQ ID NO: 30737 - protein, 733 aa, Cryptococcus neoformans var. neoformans JEC21
MPSYFFFSLIIFNCISRMASPSSMRDDHLTFTTSTSDSDTLPSTSHNPNTGTNSRIARNLSDVLFGKTTMSGTSLNTTANESTPLLTELPSHEEAEARNRVVKLNNASIILSESGELGDARSPQKRASITMAYAKRIKQRSKYYVPVTDWLPKYNWSLFSGDLVAGVSVACLLIPQAMSYASGLARLTPVAGLWSTAIPALIYGALGTCRQLSIGPEAALSLLIGQMIQEAVYGDPHSRPAHPEAEAAAIALITTLQIGVITSVLGLLRLGFLDVVLSRALLRGFITAVAVIIFIEQLVPMLGLTALLAQPTDPSQEPPTRPLSKLFFTINNIHSINVPTALLSFISLGFLIVVRVTKQKIAQTPGGKWVRYVPEILILVVGTTVLTNVLKWDDMGVEVLGKIKGGSSLPFGWPIYKKTMKYFNFTLPTAFVSSVVGVVDSIVAARENAAKYGYAVSPNRELVALGASNLVGSSIVGTGAIPVFGSITRSRLNGQIGSRTQMASIITSICMIFSIFFLLPYLYYLPKQSSPWLSTPMVGTFFLTLCFSIELGLVASVVFSLILVIQSTSQPRIKIIGRVPGTNEWVPIDEDESAQEEIPGVLVVRIRENLSFANTGQLKERLRRLELYGMDKSHPSDEPRRESAKALILHMGDVEQIDASATQILYELTKAYHERGVGVHFAHLRPGQVNAFGIAGITDIVGPSHFHRDLSNAMREVESMGYGTSIFARWDPS

SEQ ID NO: 30738 - protein, 749 aa, Cryptococcus neoformans var. neoformans JEC21
MPSYFFFSLIIFNCISRMASPSSMRDDHLTFTTSTSDSDTLPSTSHNPNTGTNSRIARNLSDVLFGKTTMSGTSLNTTANESTPLLTELPSHEGRTPRRNFTASLDQVAEAEARNRVVKLNNASIILSESGELGDARSPQKRASITMAYAKRIKQRSKYYVPVTDWLPKYNWSLFSGDLVAGVSVACLLIPQAMSYASGLARLTPVAGLWSTAIPALIYGALGTCRQLSIGPEAALSLLIGQMIQEAVYGDPHSRPAHPEAEAAAIALITTLQIGVITSVLGLLRLGFLDVVLSRALLRGFITAVAVIIFIEQLVPMLGLTALLAQPTDPSQEPPTRPLSKLFFTINNIHSINVPTALLSFISLGFLIVVRVTKQKIAQTPGGKWVRYVPEILILVVGTTVLTNVLKWDDMGVEVLGKIKGGSSLPFGWPIYKKTMKYFNFTLPTAFVSSVVGVVDSIVAARENAAKYGYAVSPNRELVALGASNLVGSSIVGTGAIPVFGSITRSRLNGQIGSRTQMASIITSICMIFSIFFLLPYLYYLPKQSSPWLSTPMVGTFFLTLCFSIELGLVASVVFSLILVIQSTSQPRIKIIGRVPGTNEWVPIDEDESAQEEIPGVLVVRIRENLSFANTGQLKERLRRLELYGMDKSHPSDEPRRESAKALILHMGDVEQIDASATQILYELTKAYHERGVGVHFAHLRPGQVNAFGIAGITDIVGPSHFHRDLSNAMREVESMGYGTSIFARWDPS

SEQ ID NO: 30739 - protein, 344 aa, Cryptococcus neoformans var. neoformans JEC21
MTVTVAPRRKILGIGYPRFAIPEWKELAEKYDIHYFIPDERKQVMREIKRLCDEQGPFDAAYVLFGTAAYSPFHPDLLGPLFEKPGYCGLFAQGGAGYDDVDYPWLAANGCYLSNTPNAVTEATADMGILLVLAAVRGLYEAEVSVRAGQWRKGIELTDDPTEMTIGFIGLGAIGKSMAKKTKPWNMKILYHNRKPLPKEEEETLGATFVSLDELLAQSDVISLNCPLTPETRGILSDKEFEKMKDGVYIVNTARGAVIDEPALIRALKSGKVRRAGLDVLTNEPCADSPLYSMKNVTLQPHLGAFTKGTMLRGEREVFANVKQYMEIGLPVNPVNTPAKVEKK

SEQ ID NO: 30740 - protein, 285 aa, Cryptococcus neoformans var. neoformans JEC21
MAKSRFEYVKKFELPDPLVPNTYIIVRIDGKGFHKFSDVHSFDKPNDIRALKLMNTAAKAVLNEYKDVVMAFGESDEYSFLLRRTTTLYNRRRSKINSSIVSLFTSAYVFHWASFFPNTPLLYPPSFDARVVLYPNVKEVRDYFSWRQADTHINNLYNTTFWALVHDGLTTAEANKALQGTNSKDKNEILFTKFGINYNTLPEMFRKGSVCVRSLSLEEPQGSLAEQQAAHGIMTLSIVPSTSGNSNTILSQKEKVYQGTEGSPMVLHMDIINDIFWSERPWLLS

SEQ ID NO: 30741 - protein, 961 aa, Cryptococcus neoformans var. neoformans JEC21
MPHTTNVSLSPRPTTPSGSLPRTDRSRRPLPPDTAASGINDLPRREFFSEGSDGEDYDDEEDEEEEDDVFAFNRPATAAQPNGASSSGYGTAPTSGRPTTAGISWTQTTAEERGPAHVGTSTGPGTLSYDGPTPLRDQPQSVNSNNKDAVPTPTGVIDVGGHLPDTTYDVNNPPPFSEDGVYSEDGNFGRRRRRSRGSIGMTELTGDMTVPDGMTTWGDGMGGLAKGGSDGEVQSAMDVDFDEEDSPYPEVRASVSNIDDPDMPAMTIRAWVLGIFLTILASGCNTYFHFRTPAPYISPLIVQVVAYPLGKFAAWILPIDTYKLPLWLGGREFSFNPGPFNIKEHTVIVMMANVAIGPAYALYATVSSELYYNHPMGFGFSIMFLFATQMTGFTLAGICRRFVVWPASMIWPGNLVVATNLNTFHAEEDGFTGGMSRFKFLIVCMAGSFAWYFFPGFVFTALSYFSWVCWIAPRNNVVNQLFGVSTGLGMGLLTFDWTQITWIGNPLTTPWWAEVNVGIGFVIFYWILTPILYYTNVWHTAFLPISVIQAADRFGSTYDVFNILTPEITLNKTAYAEYSPIYLSASYCVTYMVAFALSTALLVHTALYHGPRIYRAILNIKTEADDIHYKLMKMYPEVPDWWFLALFAVVFVFAVVSIEVYHTELPVWGYLISVLLPFIYIIPTAFIYAMTSQQITINLLAELIPGYIFQGQPLPGMIFKVFSVQTIVEALSFVQDQKLGHYMKVPPRATFVAQLSATTVACFVQSGTKELLFHVVKDICTATQKSLLICSSTKVFFTSSIIWGLIGPNRLFSKGAFYYPQLFALVFGAVLPIPLWFWVRRNPRSIFRNLNFPVMFNGALSIPPASGVNYASWLSTGFIFQFWLRRKRFAWWSKYNYVLSAALDVGTALSAVALFLFIDLPGASLSWWGNNVYKQTVDWDGVGATYYKPPPEGFGPDTWKV

SEQ ID NO: 30742 - protein, 414 aa, Cryptococcus neoformans var. neoformans JEC21
MPTKLPRIHTTGWIGLGAMGHPMALNLFLKTHQFYQKVSPSVTPTFLFCEHEDSRAESFIRELRNRGGQDLASRAERVGTGKEMVMGASKVFTMLPSTPQVQAVYLDQDNGILAGLAKLPMDTPPLSETLLLSDTSLLSNTVTQEEGVKKESPSMIDASTPATQPIHVHTMLVDQTTLDPTVSLSISSLIHDSTSRAALMIDAPVSGGTVAAERGELTIMFGSPAPIATRLAMPLLQMMAREGGVIECGGSGTGVGVKVCNNLVLASNQIALSEGLALGRSLNIDIALLQSVINTSSGSSWSSRVNPPISSIPGTPASRGYSGGFQTRLMLKDVNLALQAANKHNLATPLTSASKSIYEAICSDGDGDWASKDFSWVKSMLEIDKTESFFSVAYEWVQKKQQEAMDMAWKDGLP

SEQ ID NO: 30743 - protein, 763 aa, Cryptococcus neoformans var. neoformans JEC21
MLPPAPPPLPAPPDSPVQLSSVEINILIYLYLQESNFPHTAFTLLAESNLPATPLFQHFNPAYPAPAKPARPAHSAPAFGAAAGRIQRGELVRKLWKAVRWEHVERHVGENGEPLSPECPNPFHLLIPHVCPPSCPSASANPPLPLPSVLQAASAQAANAVAPPPKRPEPFPPPEERVKDKSRGKRKTRRPSSSPAPAQPEARKENEKTRKRARVSDAEDDKASKKLEPEREPEREALQVPSTQPSRATSPDKSRRPSPRSKVNTSASTSAKTDEIGVWTEHRDVVSNVAWNPKNVDLLATGSADGFVRLWDFLPLSASSSATAPLTLPSRPTGISHKGIESSKKTITSVAWHPDGTILATGSQDGVGRLFTPSGQLQAIMSYGRGAVNAMKWSPSGTQILVGKDDFTVCKWMDRGGSMAMKMCYDAHTKEVNDVDWLDDEVFASAGNDHTIHVHHGDDKRPRFTFRGHTDDVTRIKWSPLGAAERLLASVSDDGNCMIWKLPFYPSARGKSASVGLGGTRSLSPMKKMEPPSDEDDYFHQQPQPQSHPNPNPNSADSGPNARSNSTSAISIENCLHRLNVVSGSENKRMSMLEWMPVDDGARARMILAAGGQDSTIKLFDALSGETLHVLPGLESGTGSLAFSPFSLNSLVGSLFPTTTTTTTAAENGTAAATAERLGVGKYGLLAGGGWDGVLRIWDVETGRVLWGTEVEEEEGKRMVRERPMMLSMAWREDGKHLACGLFNKTLMVVNVIKALEAGKEKN

SEQ ID NO: 30744 - protein, 502 aa, Cryptococcus neoformans var. neoformans JEC21
MLATMNPIRPLFRSTPLRLCHNSLSSRIPRRTLVTPTNLVHATVSNVTVDHVKEDPAEHQSGEQIAGEHPSGKEMFGFKLNPVATKTGGSAKSGGRPIYLDMQATTPMDPRVLDKMLPLFTEQYGNPHSRTHAYGWEAEKAVDEARQQVAQLVGAQPKDIVFTSGATESNNMLIKGIAKFHQSKKKHIITTQTEHKCVLDSCRWLSTQGFEVTYLPVLPNGLVSINELKAALRPDTSLVSIMAVNNEIGVIQPLAEISQAIKSWAKENGVTKPLFHTDAAQAVGKIPIDVEALGIDAMSISGHKLYGPKGVGAAYVRRRPRVRLEPLIHGGGQERGLRSGTVAAPLVVGLGEACRIAENEMAADHARIKALSDRLIEGITSKVEHIVRNGDVNGYPGCVNLSFSYVEGESLLMALKDIALSSGSACTSASLEPSYVLRALGAAEDMAHSSLRFGIGRFTTEEEIDLVVQRIVSVVNKLRDMSPLWEMVQEGIDISKIEWNQH

SEQ ID NO: 30745 - protein, 158 aa, Cryptococcus neoformans var. neoformans JEC21
MAEEEHHETFEATGAGASKTFPMQCSALRKNGHVVIKGRPCKIVDMSTSKTGKHGHAKVHLVAIDIFTGKKLEDISPSTHNMDVPNVRRQEFQLLDIQDGFLNLMDSDGGSKDDVKVPETEIGQQIMADFEAGKDLMVTIISAMDEEQAISYKEAPSN

SEQ ID NO: 30746 - protein, 398 aa, Cryptococcus neoformans var. neoformans JEC21
MYGRLGVSILLMAAASNVLAKIQEDDGYSEQLDPWNDEYANTPDLSFSGVASFAHLPHKRCLDVKDAAFDIALLGVPFDSAVSFRPGARFGPYALRSGSRRQRPDRGYNSRLEVNPYSGDLSILDCGDVPVTPFDPATAVKQINSAYRSLLHHPVVSPEKMQNLNMQRGLDGKIHPRIITLGGDHTIVLPILDAVHEVYGPVSVIHFDAHIDTWNPHRYVGSVSVQASLNHGTFFWHAYEKGFIKPNSSIHAGIRTRFGGPQDLEDDVTAGFDLIHTFDLDDFGIDWISEKIKNRIGDGPVVISLDVDVMDPAFVPATGTPESGGWTSRELRRILHSLIGLNIVALDIVELSPAYDTNAEISAIAAADMVYDFLSILALGVEHRNDGVSGTKTLKDEL

SEQ ID NO: 30747 - protein, 252 aa, Cryptococcus neoformans var. neoformans JEC21
MAASLPIFHLLPNHHPAYPPSPTFSDPAFSAQYDSAFPANMDLSKSSQHPLNGYPFPAPPGTSAPQYSSRHIPSYPNLVPPNFSRGSYPAVQGGEDPTTFLDLDLSQPGPSTYHQQQPQPQSAAHHYHQPDHEYVQSDAEDDESLVQVKEEQDERQEGEEQDADVDNEEPLYVNAKQYHRILKRRMARARLEELNRLVRSRKPYLHESRHRHACSRPRGKGGRFLTAEEIETLKRQEAEKASKGEDEAQASA

SEQ ID NO: 30748 - protein, 429 aa, Cryptococcus neoformans var. neoformans JEC21
MVATGEKKGKVILAYSGGLDTSCILLWLIEQGYEVVAYMADVGQEEDFEAARAKAMQCGAVGFHLADLKREFVEELIYPAVQCNAIYENVYLLGTSLARPVIARGMIEAAVKEGCDFVSHGCTGKGNDQVRFELAFYGLAPNIKVIAPWRLPEFYERFDGRSALLEYAAKNGIPVTQTAAKPWSTDENLFHISYEAGILEDPNQTPPDDMWKLTVSPEKAPDAPERVHIEFAKGLPVKVTFPADGNTVTDSVEIFLTLNALARRHGVGRIDIVENRFIGVKSRGCYESPAATILRAAHMDLEGLTLDRNVRALRDQFVTTQLSQILYNGFFFSPEREFITAAIPASQKTVNGVVRLKLYKGNVVVEGRDADEGLYDAKFTSMDEMGGFEPTATSGFIEISSIRIKAWGRANIKRGQDGVSPKDVYHREN

SEQ ID NO: 30749 - protein, 104 aa, Cryptococcus neoformans var. neoformans JEC21
MTADVKSLVDKAIADNKVVVFSKTYCPYCKRAKSYLAEDTKDIEILELDEREDGAAIQAYLKELNGQGTVPHVYINKEFIGGSSDLLKLSHEQVKQKISAAASA

SEQ ID NO: 30750 - protein, 819 aa, Cryptococcus neoformans var. neoformans JEC21
MPPKQPPKKSSTPSMSGAEPNINSNGNTVKPRSISISRNSPSTNSGGTPPVPNIPSRASMSSTGPPRSFAGSFRPASSVVGMENSKSRRQSISKEKIISKDSSDSLIGNKTIPQTQTTSSALTAALESPQPQGLSHQGSGSLSRPPISRDDSGTSALRNGAASTSAPKDGDKAGESSFSNLADVPDEEKARVLRRHLVSADERGASSPTPGGQSPAGSGINMGGTPTRAEFDDILGESGVSGYGSIDAHPKDDSDQFPIPYDAPGGDVTHDLYKWQHDHRTRPVRSASFSHVPVDRSTILDPHLAHIKEPGGFRRNFVVNRAQEQGLEAPDMVRNVVDFLFLYGHFAGEDLNEDEDVLEEDEESYPEDASSSSAYARRPFPAGGEEAGQIARGERAPLLGSTKRSLSRHRRTKSGHNQGTASVTQAVLMLLKGFVGTGILFMGKAFFNGGILFSSIVMLAIAGISLWSFLLLVQAYMKVPGSFGDIGGELYGNNMRLIILTSITVSQIGFVAAYSIFIAENLQAFIMAVSNCRTFIPVKYLIFAQLIVFMPLSMIRNLAKLSGTALIADAFILIGIIYIGGNEISVLSKNGVADVALFNKQSFPLLIGTAVFAFEGIGLVIPITESMREPQKFPRVLSGVMFCVAILFAGSGVMSYAAYGSDIQTVVIVNLPQDDKFVQAVQFLYSVAILLSSPLQLFPAVRIMENGLFSKSGKHNPSVKWQKNVFRSCTVIFCSLLSWAGSNELDKFVALIGSFACIPLCFIYPPMLHLKACARTPKARIMDWTLIVFGTIVGAFTTVQTLRSLFIPSAEGPKFGGCE

SEQ ID NO: 30751 - protein, 752 aa, Cryptococcus neoformans var. neoformans JEC21
MFNSSRDNTTEQEKNDDEIYTTELKGDESPSSSSSDIDEKNEKFDPYVDQSQEGIAVEEAKLDDFIHRDEKYDWDSEEFRNIPELVRNTVSFEDDPSMPVITFRAILLSTIFCAIGSVISQISYFRTTTAQFPVFFVILASHPLGKLLARVLPDYTVPLGRFSFSLNPGPFSVKEHVIIGIAANTGSQGQWATYLPTNAALYYNITMSPAIALFFGWGVSLLGFSFAAMVRPILIDDPQFIFPLSMQQVAVYRSIQGTSELHLERSRKQMRVSSFRYLKVFWWLFLGMFAWQFLPEFAFPFVASLAPLCWFASRNHKVNFLGAGRGGAGLLNITLDWSNITSTVITYPYSVQVIIFVSFCWILIPIAYFGNLWGSPTWNIMSNGVFMKNGTSYPFNSLCNMKRSALHTLELSTCGMSLWAWRAKKPAHNDRLSRIAAKYPGLTWWEWGLLTLIPFVILLAVVVSKKLYMSTWTYFVALGFGAAAMLPMSLVYAMSGYSMKVGIFNELIYGCKSRSSRHPLGQLAYRIISGNVWYDARTVLEDQKIGHYFHLPPRQVIGIQILANMLALPINYAVMRWVLDTKFDYVSGKEVDPTGQWTGQEFQSYNSAGVQYSLVGPKRLFRSSVYRPLTYGFVVGAAAPVIIWLLHKRFPRARFNLWNTTIFFSGAATFYGNLSTGPFTAFIIGTVWNFWLYRYRRKFWNMWAYISGAALDTGFNFNLLFIFIFLGTTGAVMPYWWGNNADSIERCFALNE

SEQ ID NO: 30752 - protein, 473 aa, Cryptococcus neoformans var. neoformans JEC21
MSSQNVSGLMAGLSLYAPQSPKGSKAQQAGKTQESSHSSQSQNRLPPVLKKYMNPGLVRPPNSGLANNSHPSSSYSDPSSRGPLLTLAGVNVSYPKSGTVSPMNKSKGAVGHHSAHGIHGPAHSTSSRAMASSINPGASKHAVTTSSSHITNLVSENCKSLELGRYDGGLEEDEANHGDASGPTAKMLELSSVSEGAIPLSLPSFTIGRPLGKGKFGRVYLARSKAPPHFIVALKCLHKAEIIQGKVESQVRREIEIQQNLRHPNILRLYGYFHDSKRIFLVLEFAAKGELYKQLSRLGRFDEKKSSRYIAQMADALSYLHRKHVIHRDIKPENLLIGLNGELKIGDFGWSVHAPSNRRSTLCGTLDYLPPEMVEGKEHTAAVDLWALGVLTYEFVVGGPPFEDLSGNAATYRRIRNVDLHVPSWVSPEATDLIKRLLRYKPEDRLPLSQVMIHPWIKMYEKKRSASNGIRRS

SEQ ID NO: 30753 - protein, 564 aa, Cryptococcus neoformans var. neoformans JEC21
MQPPAIYNHHRLPPAGTPSQPSVLAQPSTARLNELFDLIRQEYETLGTDGNIWKQQRDEYEAKVQSQINELGMIRQSLYELEANHAKIRQEYETEIARLRRELESRGGPSSSAPSGAAAALNNPSSPSDLHRPGEDRPPFGMTLPGPTLNGLDAGRSRSPYPNPTAGPPILRPPSAADRDRERRITRPPQFNAPPSPPVHLSDLDPDNVSRELRKEGSDWQAMWSSQMRKQLDVTLVHTLEHETVVCCVKFSNDGKYLATGCNRTAQIYDVKTGARVSTLQDDLANRTGDLYIRSICFSPDGKFLATGAEDRQIRIWDLKQRRICHLLQGHMQEIYSLDFSRDGRFLVSGSGDKSARIWDVEKGTCVFNLQIEDFIHNEHGPIDAGITSVALSPDGKLVAAGSLDTMVRVWNVSTGQQVERLKGHKDSVYSVAFSPDGKCLVSGSLDRTLRIWDLTGTKREVESLPPGKEAQKNLGTCQSTLNGHKDYVLSVAISPDGQWVVSGSKDRSIQFWHISTGQAQLMLQGHKNSVISIDLARSGGYLASGSGDCMARIWKYEPIPGRD

SEQ ID NO: 30754 - protein, 339 aa, Cryptococcus neoformans var. neoformans JEC21
MSTSHLRIPPAEPFTPSREATVYLHTPFHPKAEIYAETKFKKVLRPKDGKVDDLMKQIDGILLRTGDVTAEMVLAAPNLRIISRNGTGVDNVPLPTCLSRGIAVTNIPGSNAFAVAELAIALMLTVLRRVVEVDKRIRGGERVPSIEALAPGLGGKKVGLVGMGDIAYELAKLLRAFGCEVLIHSPSSPELRWTVEDTRYPVTISHTRMPSLRSLLEQCDVLSLHCPLNANTRYMIGREELGWMKSTAVVINTARGGIIDERALEEALKERKIGGAGLDVFEKEPAYGESLGGLRDLDNVVLLPHLGGSTDSVTLDGCIKAVDIMASYLDGKGAINRVI

SEQ ID NO: 30755 - protein, 751 aa, Cryptococcus neoformans var. neoformans JEC21
MPINPLEAEAYELPPLSQAAISPAEQYFEDLVAEEESAKLLDTEGQLKQDVEDELVDDSALYMRRTQDEEVIGRGSKVEELIARTVPSHDDPTLPTLTLRVIFLGSSFCILGACASQIFYFKSNAPSFSSYFVVLATYPLGHLLANERLVPRGNKIFGWEINPGRFSIKEAILISVLSSSGASSAYAADILAIMDLYFDTPLSPLPSILLLLTTQCIGFGLAGMLQNLLVSPPAMYWPSTLVTVQLFTTLYSTTSSTLSLTQQQLTFTRLRVFLVIFLAIFLYQFLPFLFFPTLTSVSLLCLVNNRSWWMRTLGSAYQGLGIMDFSFDWSSIGSSGPLYTPYWALGNYFGGLVGMLWIILPLLLMLNFWDARSFPSPVSAGLFNATFQKFDVASILKPDLSLDEAAWEEKKPLLLTPYFALTYGLSFAALSSVLVHVWLWHRDEIKQGNKLMRSYLPVPSVWYVGLLAVNFGAAVILVKTTSLQMPIWALVLAMAIATVSARDVGIIAAVSNTQIGLPIGNVTFKCYGYMAMSQALALTADLKLGWYTSIPPREMFTCQIIGTVLGALTNYATLVSVMAAKRPYLNGSLTDPTGQWTGRAPSIFYSASIIWGAVAPARFFSGGYEVLYLGFLVGALVPVGFWLAHKKWPGYKLNKVVFPIICSGATVVPQYPSNIILTSLLTAVLVNSWFAKRHPKLHRQYVYVASSALDAGTSITALAIYVLFGGVFWSWNGWEWWGNSGVDSEHCVPGS

SEQ ID NO: 30756 - protein, 751 aa, Cryptococcus neoformans var. neoformans JEC21
MGPNTRPAPQAPTHYSRHRPQSITGNNAPQSRTKPRIGQYIVERTLGTGSFGKVKLATHAVTGHQVALKLINRSKITTPDMNARVKREIQYLKVLRHPHIIKLYEVITTPTDVIMVMEYAGEELFNYIVQKGKHGMTEDEARRFFQQMIGAIEYCHKHHIVHRDLKPENLFLDSRRNIKIGDFGLSNLMTDGDFLKTSCGSPNYAAPEVISGKLYSGPEIDVWSAGVIMFVLLCGKLPFDDEHIPTLFKKIENGVFHIPSHVSEPARHLLKRMLEVDPLKRCTIAEIRQMPFFQENLPRYLQPLPELADMERYPSLTMDDMTTLLLINEGQADPKKVAEDKGLVFSEDLGVIDPDIVEELLEKITTYSEGMVWEALKMPGDNQVKVAYQLVRDHRRILKDSNAYEDEDSSAMEEFMASSPPAWNADIAPPIDVQQNGADEYPDLEDVDLEIQDIPNAHFDVLDSSLPGWMTPPSSSTSAMSTPTTTHPTSAQNSANPSFSSVTSDTTASGSTAEEAARALLSPAPSSASQSVTSFSSPTPQPQPQRRLDKSMTKPKWHFGIRSRSPPMEVMLEIYRTLNVLGMQWRLKDIPLPDIGGAPPGGYSEEVELVLEDLKEKNGERPVMGRKPPSKKDAMAQEKLAQGLYHVETRARYGDVMVRMDLQLYRVDDQHYLVDFRNLGYYMVSEKDMSLPDVSRQGHSHEEGASNAGGSVPSATSATAAGAKEAGIGGVSGPFHFLEMACQLIAELASG

SEQ ID NO: 30757 - protein, 590 aa, Cryptococcus neoformans var. neoformans JEC21
MPPRRSTSRAASAKPPSRAPSSRLAKVPEASIPAANGNTKRRRVSDTGEPVAKKGRPSTASVAGRGPKKIIGGINAIPSIPPVKTPHNALFVWGTGDQGQFGLGPDNLDEIGRPKLHSWFEEQIEEGKLSRDGKPGSGGLESVYCGGMHTLAIDEAGRVRSWGINDNAALGRITTDVPDPKNPDEMIPNEDLESYPYVVETLEKEGFRAVQVAAGDSISVAISDKGELRAWGSFRSNEGILGFDGVPGHPKFQYTPISLPALAKVQITQISCGADHVLALTTIGHVYVWGKGEENQLGRRIISRRRINGLEPERLGLRNIVHVAAGIYHSFAVDNKGVVYGWGLNTFHQTGVAEHQDMIITPTVVDALHPDKHNGSKVIKVSGGEHHSLFLFDNGEVWGCGRCDANELGLAEDHPAFEGIKERREELQREREERVAEKQKKLDEVLKKDKVDEEEKQKAEAELSEAQATLKVPPSGEYVPEPVRICFPPIPEKYEVVPEFPAYKDSKPEDNPVVDISAGMRHNLAVSKSGHLYAWGYGNLAQLGLGSEEVAEVPSLVRSKLLRPYRSVTVSAGGQHCVALAVKKPDGEQN

SEQ ID NO: 30758 - protein, 539 aa, Cryptococcus neoformans var. neoformans JEC21
MRLSTLALMATPALALPNYLRLSNGPSELASDLATHAISSAQAWLQGAVSSTRSSVQNGWKGVQDGLDQGLKVETVDEAGIEYLALSHPAFPLHRLRVVEPKLCDPSVKQLSGYLDISETRHLFFWFQESRENPDEDPLVLWLNGGPGCSSTTGLLFELGGCNIRDKGENTTFNEHSWNSVANVLYLDQPIGVGYSYADEGEVNNSPAAAEDVYAFLVLFISKFREYSKLDFHVAGESYAGTYIPNIASVVHKNNIALDLVPTPSVPKINLKSVMIGNGLTDPYAQFGSVPDWACNSPYAPYDDPSPECDSLRTRANRCQGLISGCYKTNSRFTCVPAALYCWSMFNELQDLGRNMYDVRKTCDKSPEKDGPLCYREMGWMETYLNKPEVKKELGAPERVTFQSCNMQINQNFLLHGDGMHYAGGLLPDLVEDDIRVLIYAGQADMLVNYIGCASVLDNLQTSYLASYLAAPFVNFTSPDGEVSGYTKSASKDGKGSGNVAFVAFHNAGHMVPHDDPEGALRMVGRWLKNEPLAVAEDE

SEQ ID NO: 30759 - protein, 593 aa, Cryptococcus neoformans var. neoformans JEC21
MSSPENDRVLDNLWTTEDESFEVQMPDFHFDWGLEKGKTADQGIKAPTASLRSLSINEITPPLPSGSSSTSTPPHSTISARSSISSAQILPKRDISNASSSPHIPTPPGSIANPGHRSLSAQNFANSGGSSGGESSGERGKTYGGRKFQRVVSAPISPENGTDTEGVEFQVSGNVCSTDVTDPPPQGPPDVYCSSDQAIVSPTATAGCESRLTNISHPDDRPVKPARKPVNQSVHEINESIHEPMALATQSQAEHGVSRTSAAVPSEGEDRLFRPFGKLEETLRPVNGVPYERLQRLGKGGSSTVYSVLYSGPKKRIIYALKVVQLDRADSETYQSYTNEIELLKRLRGHDRVIQLIDHQITFNQHNRPHRLLMVMECGEIDFAALLDEQRGKAINMNFVGLYWEQMLEAVQAVHRENVVHTDLKPANFVLVKGRLKIIDFGIAKAIANDTVNIQRDQQIGTVNYMSPEAIQRMNNQKVLKLSYPSDVWSLGCILYQMIYGSPPFQHVSGGPLAKMGVIADPNHVVTYPEVAVPKAAVGFSLDGHPTDPASLSVPVSPSAIDSMKRCLAYRKEHRLTIPELLQHEFLKPRIRG

SEQ ID NO: 30760 - protein, 421 aa, Cryptococcus neoformans var. neoformans JEC21
MAQERSKIPSHVLILGGGLAGTCFALALSKSGIRSTIFELRSDPGDIGGALMLAPNALRVLDKLVGVYEEIKDNGFSFEKLNFYSEDGMKLGGFAQGDQERWGYKALRIKRPILHKKLLEACAASDKIDFKYGMIWKSIDESETGVMIHFEDGTRTSGDILVGCDGIHSRLRNYLLPDPPTPTYAGLAGIGGEVSRSSLDIPPYMTLPAFIYTRPGMVMLVPCDFSGESIGWAAQKSVPDRTRSGWREYEESGDAIKGIKEDYKDVQNETLQSLLKVASEEAGQARVWAPYQIPRLPTWHSKRICLIGDAAHAIPPSGGQGAAQAFEDGGLLSMFLSNEEAVGKGYEKLFEQFEKKRKKRFEIVESLTKASGSSRQEGMTGLEWFIKKWGMWAYLLTKGGYMKDDALMSYDVTKESVVVPS

SEQ ID NO: 30761 - protein, 513 aa, Cryptococcus neoformans var. neoformans JEC21
MPRLSNVYCPKSLLQRQTIQIRSFSQTMSPFKPALTLDTINPAVQAVHYAVRGELAIKADKYVQVLADITHKPLPFEKIVTANIGNPQQQGLDQVPLTYWRQIISLLEYPDLMQKHEQLAKQIYPGDVIERARALHNEIGSTGAYTHSKGVLGIRKRVAKFIEERDGYPADPQNIFLTAGASAGVASILGVALRRGDGCMIPIPQYPLYTATLAYLESEPLPYYLSEADDWSMNHDSLLKSVEEGKKKGIPIKALVIINPGNPTGACLSQEAMEAVVHLCYEEGIVLLADEVYQMNVFDPEQRPFISFKKVLMDMPKEIRESVELVSFHSISKGVSGECGRRGGYFECVNIDKDVMDQVYKMASVTLCPPVSGQIGVDLMVSPPKPGDESYPLWKEETDLIQNNLKSRSYLMAEHFNKMEGVSCNNAEGAMYLFPRINIPPKAVEAAKKLGKEPDVMYALDLLDATGICAVAGSGFGQEPGTFHLRVTALCPDTAEFIGRFQKFNKEFMEKYA

SEQ ID NO: 30762 - protein, 328 aa, Cryptococcus neoformans var. neoformans JEC21
MASAAYSTIKLFSGSSHPELAALIAKRLRIPLARANISQPPSGETKVTIVESVRDCDVYILNTGAGAVNTNLMELCIMIHACKIASARRITAIIPHFPYARQDKKDKSRAPITAKLVANMLREAGCDHVITMDLHASQIQGFFDVPVDKLYAEPSMIQYMRNNIDVHDCVIVSPDAGGAKRATSIADRLNVEFALFHKERKKANEVSRMVLVGSVTGKIAILVDDMADTCGTLGLAAKNLLEAGATKVYAFATHGILSGNALKVISESGMEKLIITNTIPQSENCEKCEKIEVIDVSRVLAEVIRRSHFGESVSYLFHEVPYSNGVGA

SEQ ID NO: 30763 - protein, 834 aa, Cryptococcus neoformans var. neoformans JEC21
MLARKHLIRTARLSIPRPSVATRAVALGFVRTYAQGPPRPPPGGPGGPPGGGFGGMRFPGGGMMGQQPEKGETLKQFSIDLTKLARDGKLDPTIGRDEEIRRTIQILSRRTKSNPVLLGLPGVGKTAILEGLATRIVNKEVPESLHGKRLLTLDLSSLMAGTGVRGEFESRFKSLLKDIEEEEGNVIVFIDELHTLLNLGKAEGSLDAGNMIKPALARGLQLVGATTLDEYRKSIEKDAALQRRFQPIMINEPSVESTISILRGLKSRFEVHFGVQIADSALVTAAVYSDRYISDRFLPDKAIDLVDEASSALKLAQESRPTELEKLDRETVTLEIERESLKNEEDPFSVSRMEKVEKELEEKKQEQRRLADLWAQERERVAEIKGIKEQIEQANVDLENAQRNGEFEKASKLRFSTIPQLQAKLPKAQAELKSENEEEPGMAVRDRVTSEDIAVVVAKSTGIPVANLLKGERERLVHMEESLKQRVVGQDQVIHAVADAVRLSRAGLQAPTRPLASFLFLGPTGVGKTELTKSLAEFLFADEKRALIQLNMSEFHDKHTVSRLIGATAGFVGYEEGGQLTEAVRRRPYAVVVFDEIEKAHPDVANILLQILDEGCLTDGQGRLVNFKNTIICLTSNLGSEALYEPDATHPDGSITEATRASILSHVGRFFRPELVNRLDELLIFNKLPPSVILDIVSLRLSELQSRLDGRRITLEVSDDARAWLAKKGFSEEYGARAVGRVVRDQVISKVAGRLLDGTIKDGDIINIRLEGERLEISSAPNPNIPHPSQEGGDHISPSARGASTEAESRPLNILEDGVEEEGDEDIPRRTVYY

SEQ ID NO: 30764 - protein, 357 aa, Cryptococcus neoformans var. neoformans JEC21
MHQIGNSIKLLTGNAHPKLAEAVAARLGITLTPCHVSKFRSLETSVQIHSSVRDEDVFIIQSPSPPDVNDHLMELLIMISACKTASAKRITAVIPCYPYARQDKKDKSRAPITSKLVANLLAVAGADHVITMDLHASQIQGFFDIPVDNLFSEPTMMQYIKSEIPGWRDAIIVSPDAGGAKRATALADQLNLDFALINRKRRRDLAASMCLPTVPPTPTGSDSGSVHSHDIDDESNIVEKMELLVGDVKGKVAILIDDMIDTGHTVRLAAGVLRENGAKEVYALVSHGLLSDTTMENLSDLPVKKLIVTNSIDQTKRVIACNGLLETLDIAPVIAESIRRTHNGESISALFRPHDSF

SEQ ID NO: 30765 - protein, 592 aa, Cryptococcus neoformans var. neoformans JEC21
MCGIFCCFNRAGDISQYRARAIACSKRQRHRGPDWSGCYMTNNTVLVHERLAIVGVDTGAQPLTNEDESLVLAVNGEIYNHVALRKSLKNKDAVFKTHSDCEVIMHLYKEHDTGLCNMLDGMFSFVLVDKSVSPPRLIAARDPIGITTLYMGWNSQSPDTLYFASELKCIHEECDNLQAFPPGHFYDSKEKKLTRYFNPSWWDSDKGVVPHNDIDYKLLRETLEAAVKKRLMSEVPYGVLLSGGLDSSLIASIAARETDKLAEEQEKLRQERKQAIASGKWVGDEQPLASWPQLHSFAIGLPGAPDLIAARKAADFLGTIHHEYNFTVQEGLDAIPEVIHHLETYDVTTVRASTPMYLLSRKIKAMGVKMVLSGEGSDEIFGGYLYFHAAPTAKDFHEECVKRVKNLHTADCLRANKSTMAWGLEARVPFLDKTFLEVSMNVDAKYKMFSKGTHQEVDEDGRPKMEKYILRKAFDCSPEGKAYLPDSILWRQKEQFSDGVGYSWIDGMKDHAAAIVSDEKFANRATRWPLDTPDTKEAYWIREIFEHHFPTEAAAKTAVRWVPKQEWGVSSDPSGRAVSIHTAAYADGEAKA

SEQ ID NO: 30766 - protein, 485 aa, Cryptococcus neoformans var. neoformans JEC21
MMHASKHKMGFSDFRDAILIQPPSFKKKKEYVLEELLGRGGFGKVVKALWAPPEREPKEVALKIINKKLVKGNEQAVLDEISVLKHLDHPNIVHVWDDFESRDKYYIAFELAVGGELFDRISERGKFTERDAVECIRQVLQATAYLHEHNVAHRDLKPENILYKTRDADSPLVIADFGIAKHLETPDQECSEAAGSFGYAAPEVLLGKPHGMKVDCWSIGIIAYTLLCGYPPFRSDDRNGLLQEMTRGRIMFHDRYWSKVSRTAKDFVKDMLETDPKKRSTAADALNHPWLTSGQATETDLSAAIRDNFDAKRKWKSALRIIQASNRIRSASRSRSPSLSTSPPSTANTANPSPNSALFVPEVPHVLTPLSMTDEDPMSDEHYYFSADDQGHTEEEEEAKVMTRGGKKKAGSMPVGSGSGVTTGTVTPYTTGNEGSNTPKPTIKVIDGNGELRPEETDMQTPPATAPVGAGMMGSIRGMMGKLSL

SEQ ID NO: 30767 - protein, 1412 aa, Cryptococcus neoformans var. neoformans JEC21
MHQQRAPAAHHHSYSYAPYPHASVSAENTVPSMAQPQVYYQQPPADFYPHVPGHNPHTGASHGTQAGPSQSAENNAFAMPDVRQSKSARPRPPPSSVTMPMIPTSLPDPSMHSYAPVQAPVPQQQTRTANRRSHNPAATLNSPSAPRPEELTDEYVLHPSVYAFKQEYPRRAMVGLGPYIVLQTLGEGEFGKVKLGVHADYGVEVAIKLIRRGDLQEEAHASKVEREINVLKTLKHPNIVRMFDVLDTHKYIGIVLEFAGGGELFEYILANEYLKDKEGQRIFAQLISGVDYLHKKGVIHRDLKLENLLLDKNRNLIITDFGFANQFDLSKGDLMSTSCGSPCYAAPELVVLDTPYHGSAVDIWSCGVILYAMLAGYLPYDDDPDNPDAGNVVELYRYIMNTELHYPDHVSPLGKNLLQHMLILHPEHRIKIPVIVKHPWLKSYHDMFNKSVEECEAAFQDAMYRKSRQARKELQERRRVQTQARESLQTKERAHVQRSQSSAPGTIINAAALDQIRRRPHSAMPGSTPLPEIIAKHSESVDDVALTMRSATPPTALSQPTEIRSPTTESPRPRSESMAPRLSFTTSVSTPTAMTVETPSSVPVQSPTDALPPAAMTVMQPSVEAAPPMRDHKNRNTIQVEHAGEGLHDRAKEAFDANHGRADGSMETTSTADTGMVASSLLDVKREESTDIEMESGSSDSEQPKPANDGISQQPGEKSMDIPPIVPITIPLAPPAESGTATAANDSSQVLEPQEKLSPALVEHGSASIDEMASPSTPRVSTSVEQEPVNITPRAKMRAPPVATTPKASLVNERKRHGSMPPPMGPSFVSDSRPESSLTATGLPKLPKKDRYRKGMSLDKFGLAKLLGHASQAHTTVHGEGKMAPPSASSSALALQHQLQQHGGQSQAVSESDSVKKSRRRTLQFGFHSRKDSKASSAAVATPGTPLMDKDTNGENRLSSITGGTASLRDKRRKTVQIGLSTQSEQKDTTVNVPGLSSSGHLVKNPATEPPQGISIGPVVGTDASALSQSSPSAVALEAFAAQQGHYPSYRGSSSRASKVMDWFRRKTFVKETLPEPKSPVIKSDSQSSFVRIGEVASPASKTQESAQASTVSQENTDKAEEKIDSTADQENAAKTTPTKSPVLPQPIGATATTPSVMITPPRPTAATTPTIGSSTQQSPPTTIRTRSASTFTFDESKIRVHTGLVDQSALSTKPPQDVFVEVIQVLRGMGVEMKRESDFKLRCTRAKKKAAGTSIGLGSVVSTGSGMSPFSIMNNASASKTDSRGLPRPTSPSAVANRSSAGIKGLLRRGSSRSSAHPARLTRTGDEVPNPPSQSTPNLELPESSMASKPEPLYGKELMDAGDEVKFTVELCKMKNLPGLFILKIKRTKGNLWSFKFIYQTVIERTTTLTH

SEQ ID NO: 30768 - protein, 667 aa, Cryptococcus neoformans var. neoformans JEC21
MTTMSSDVPNSPTSTSFTGTFSPAATAANTAANARTRDAPSPTTSSSGPKLETNKDQRLIVVSNRLPVTISKDDNGEYHFKMSSGGLVSALSGCKKTMSFTWIGWPGKDIPMQDRETVNRRLLEEYNCYPVYLSDELADSHYNGFSNSILWPLFHYHPGEMNFDSAHWLAYREANMRFADVVSSLVQAGDMVWVQDYHLMLLPMLLRSMITGESAQGEMVRQELGRVKEGVDDTVVKEVLKMGPGVAQAEDEGVEMLDDVEEEGGEMDVKTSPKRPHYGRGMSTFQKQELVAKEKGKEGIRIGFFLHTPFPSSEIYRILPVRREILLGVLQCDLIGFHTYDYARHFLSSCTRILGLETQPNGIEFDGRYCQVGTYPIGIDPNQFIEGLQKESIVKRLRSLEARFDGVKVIIGVDRLDYIKGIPQKLQALETFLTQHPEWIGKVVLVQLAIPSRQDVEEYQDLRACVNELVGRINGRFGTVESVPIHYMHKSVPFEELTAMYALADACLVTSTRDGMNLVAYEYISSQAERHGSMILSEFAGAAQSFNGSLLINPWDVQSTADAINQALTLSPQQRKTNWQKLFNYVSKYTAEAWGVSFVNELNRLSGQRPAGPTGLAGRRKSGSLSRTSSKASMQRRKSSQSGIATGLGAAAGAAVNWAQAQVGTQT

SEQ ID NO: 30769 - protein, 719 aa, Cryptococcus neoformans var. neoformans JEC21
MTTMSSDVPNSPTSTSFTGTFSPAATAANTAANARTRDAPSPTTSSSGPKLETNKDQRLIVVSNRLPVTISKDDNGEYHFKMSSGGLVSALSGCKKTMSFTWIGWPGKDIPMQDRETVNRRLLEEYNCYPVYLSDELADSHYNGFSNSILWPLFHYHPGEMNFDSAHWLAYREANMRFADVVSSLVQAGDMVWVQDYHLMLLPMLLRSMITGESAQGEMVRQELGRVKEGVDDTVVKEVLKMGPGVAQAEDEGVEMLDDVEEEGGEMDVKTSPKRPHYGRGMSTFQKQELVAKEKGKEGIRIGFFLHTPFPSSEIYRILPVRREILLGVLQCDLIGFHTYDYARHFLSSCTRILGLETQPNGIEFDGRYCQVGTYPIGIDPNQFIEGLQKESIVKRLRSLEARFDGVKVIIGVDRLDYIKGIPQKLQALETFLTQHPEWIGKVVLVQLAIPSRQDVEEYQDLRACVNELVGRINGRFGTVESVPIHYMHKSVPFEELTAMYALADACLVTSTRDGMNLVAYEYISSQAERHGSMILSEFAGAAQSFNGSLLINPCMPAFLLLHATVIEADLFFVFLGDVQSTADAINQALTLSPQQRKTNWQKLFNYVSKYTAEAWGVSFVNERAFSVFSLFLSYFNRIDLYKVLTAPSFISVVNRLSGQRPAGPTGLAGRRKSGSLSRTSSKASMQRRKSSQSGIATGLGAAAGAAVNWAQAQVGTQT

SEQ ID NO: 30770 - protein, 654 aa, Cryptococcus neoformans var. neoformans JEC21
MTRDFDSLFFTGPIFVDYSFTARHLESFLSSFPPQVSHAMSSASTPTAPYLEDLVRNSLDQTLPWVVQKYGGTSVGKSLDNITKIVGSYIDNGSKVAIVCSARSTQTKSLGTTNLLLQASREALQPALSSSGDGRSGSMSGTATPFYPKRVGSGFFGKDQSTSMVSSVSSLSQLEPQLGRSGSPSPFQSSSSRSPPRSPATPSQDSSVSQEPAFHATVDLIKKGHLEAARASLKEGPLRDELEEEIERDCESLRSFLYAAQIIDEISPRSQDSIVGTGERLACKIVAAALRDRGVDSELVVLDNIVDASMSAASEAISVDAGDQGVAQLGQEFYDQLSFRLGERLRECGQRVPVVTGYFGPVPGSLLAQIGRGYTDLCAALCAVGLKASELQVWKEVDGIFTADPRKVPSARLVPIITPDEAAELTYYGSEVIHPFTMEQVIRARIPIRIKNVENPSGAGTVIYPDLGFPRGLDTEPPKAERIVEGVDERMPTAVTIKDEIIVLNIHSNRKTLSHGFLARIFGTLDRAGVVVDLISTSEVHVSMAMQDFLNRKRLERLVKDLEKIGEVTVSKDMAILSLVGRNMRNAIGSAGLMFASLARAMINIEMISQGASEINISCVIENKDAIKALNVIHESCLSYPRSPATEMAGLQLQ

SEQ ID NO: 30771 - protein, 439 aa, Cryptococcus neoformans var. neoformans JEC21
MSNSNFLDKAIALVQKAIDEDVKQNYAEAYKQYQDALDYFMMAMKYEKNDKLKELIRKKFTEYLDRAEKLKEHIAKSEEKRSKAKVSATGAAGGSTAGGPDVKGDDGDDPEIKKMRQGLQGAILSESPNVKWEDVAGLAQAKESLKEAVILPIKFPQLFTGKRTPWRGILLYGPPGTGKSYLAKAVATEAKSTFFSVSSSDLVSKWMGESERLVKQLFQMAREQKPAIIFIDEIDSLTGARGEGESEASRRIKTEFLVQMNGVGNEETGVLVLGATNIPWQLDPAIKRRFEKRIYIPLPDIQARRRMFEINVGSTPHGLTPADFTHLAEQTEGYSGSDIAVIVRDALMQPVRKVLSATHFKEVEVDTPEGPQIKLTPCSPGATNAIEKTWTDIESSELLEPLLGLKDFEKAIAVNRPTVSAKDIEKHIRFTDESGGEGA

SEQ ID NO: 30772 - protein, 460 aa, Cryptococcus neoformans var. neoformans JEC21
MPLDLNYAPGSEDEEEDNIDDEDFPGPSSRRQARGAAGKGKGKNKDTGRQAWEGEYQKSWDIVQEDESGSLESAVETLLARGRRKRALMSDTPVRRSIIRHVFIIIDLSESMLDKDYRPTRFEVILGYLRTYVVEWFDQNPLGQIGVIAMRDRLSEVLIPMGGNPEEIVRALSDKRKLEPSGEPSLQNGLVMAKGGMAHLPSTSSLEILVIFSAISTADPDGPITIHNVLDTLATGHIRTSILSLSGEIKICKQIAERTGGKFGVALDQEHLKDLLWETIPPPATTIAPVTANVRSALAAGGRGPNQTGERAPAGDLMVMGFPIRLPLGGETMCACHGLLRKGGYLCPRCGSKLCDVPTDCEVCGLMVVSSPHLARSFWFLFPVANYGPLSIEDVVESSETCFGCDSEFSDATAINAGVAQVEDGVSPTGRYRCAKCKHDFCADCDLYIHDTLHTCPGCS

SEQ ID NO: 30773 - protein, 460 aa, Cryptococcus neoformans var. neoformans JEC21
MPLDLNYAPGSEDEEEDNIDDEDFPGPSSRRQARGAAGKGKGKNKDTGRQAWEGEYQKSWDIVQEDESGSLESAVETLLARGRRKRALMSDTPVRRSIIRHVFIIIDLSESMLDKDYRPTRFEVILGYLRTYVVEWFDQNPLGQIGVIAMRDRLSEVLIPMGGSPEEIVRALSDKRKLEPSGEPSLQNGLVMAKGGMAHLPSTSSLEILVIFSAISTADPDGPITIHNVLDTLATGHIRTSILSLSGEIKICKQIAERTGGKFGVALDQEHLKDLLWETIPPPATTIAPVTANVRSALAAGGRGPNQTGERAPAGDLMVMGFPIRLPLGGETMCACHGLLRKGGYLCPRCGSKLCDVPTDCEVCGLMVVSSPHLARSFWFLFPVANYGPLSIEDVVESSETCFGCDSEFSDATAINAGVAQVEDGVSPTGRYRCAKCKHDFCADCDLYIHDTLHTCPGCS

SEQ ID NO: 30774 - protein, 362 aa, Cryptococcus neoformans var. neoformans JEC21
MAPQTVPCQYKTGKTLGSGTYAVVKECVHITTGEYYACKVLNKKFLMGREHMVRNEIAVLKRVSAGHKNIVQLHDFFETTHNLYLVFDLCTGGELFDRICAKGSYFEKDAANIVRTVTSAVKYLHDQGIVHRDLKPENILFKSKAEDADLMLADFGLSKVLDDDKFAILTTTCGTPGYMAPEIFKKAGHGKPVDIWAIGVITYFLLCGYTPFDRDSQYEEMQAICKGDYRFEPVEYWGGVSETARQFVRDCLTVDPTNRPTVDELLNHPWLRDVEASKDEPAEAKGVDLLPNVKAAFDAKKTFRKAVLGMMAVHRLQDHSATIHGQTEAEQEKLKKEVEAFKEEAAQEDVKDVIQPGAPASI

SEQ ID NO: 30775 - protein, 328 aa, Lactobacillus acidophilus NCFM
MNKEELHQLLHPMKVIGLGGNPALNEKIASILHQPLIETAVHHFSDGEIQVNIGETVRGCDVFVIQSIQDPVNENFMELEIVLDALHRASAHRINVVVPYLAYSRSDTKTRSREPITAKLIANLLQLTGMDRLITVDLHASQIQGFYNTPVDHLHAIPLLAQYFLDNGIATKEDDDIVVVSPDHSGAKLARNFGQYFNAPIAIVDQRGARYDTEVHDIIGDVKDKKCIIVDDLIDTGSRISSSTKSVLASGAKKVYVAATHALLSKNATEVINELPIEQIVVTDTIKHNRYPDRMVRISVDQLLARGIDYVYNDRSIHQIFDEQNRLK

SEQ ID NO: 30776 - protein, 649 aa, Lactobacillus acidophilus NCFM
MCGIVAFYDPKINDKQAVIGKMMATIKHRGPSSDGYYTNDEVALGFRRLSIIDLRGGSQPIYNEDKTRAIIFNGEIYNFKPLREELIKAGHTFTTKADTEVLLHGYEEWGMDGLLKRVRGMFAFLIWDDNNKTLYGARDFFGIKPMYYSNQDGHLLVGSELKSFLEYPKFKRELNVEAVKPYLMNQYNDLEETFFKGVYRFPAGHWFEYKDGEMKTHQYWDAEYKENSLSFEETLKRINDDLKETVDLYRNADVKVGAFLSEGIDSSYLTSLLNPDDVFSVSFDDSTYDEASKAKALADINHWKFFSEKVDADEAMRDFPEMQYHMDEPDANPSIIPLWYLCKLARKHVTVALSGEGADELFAGYVNYGMHTHNDVIKVFTSELKKLPKNKQVKLAHKIKKMPNFPGKVHMYTNLAEPSEFYVGQSVIYDMDYPTIFTSKDANSILQPTYRNKLTVNGIYQKDFKKVKGIDNVKQMQYIDLHHFMLNDIEQKADKISMAHSLEVRVPYLDKKIAELANSIPTKYLVNRHDTKYALRKASEKVLPDEWAKRPKLGFPTPIKQWLKEPRFYKQVRSLFEEEFVNDIFDQKKIIKLLDDNYEGDGSHRRQIWAIYTFLVWYKLFFVDYENTVKKYQHVQPEVANLISQGKLL

SEQ ID NO: 30777 - protein, 324 aa, Lactobacillus acidophilus NCFM
MSYKDDMIIFALNSNVPLAQKIADRVGIPLSKSSVERFSDGEIQINIDETVRGKDVYLVQSTSDPVNDNLMELLIMIDAVRRASARTINIVIPYYGYARQDRKTRAREPITAKLVADMLQTAGADRILSLDLHAPQIQGFFDIPVDNLMGAPLLADYFLRNHLEEDAVVVSPDHGGVTRARKLAEFLGCHIAIVDKRRPKANVAEVMNIIGDVKGKRAIIIDDMIDTAGTITLAAQALIDAGATEVYASATHAVLSGPAIKRLNDSPIKNLVLTDSINQPAEKKLDKMLLVSVGPLMGDAIKCIQEHKALSPLFNTRYEEDKHK

SEQ ID NO: 30778 - protein, 530 aa, Lactobacillus acidophilus NCFM
MEKIKRHKIGLFSAVMLALNSLIGSGWLFGSGSAAKIAGPAAIISWILGAVIIIAIALTYVELGSMFPESGGMSRYAQYSHGPLLGFIAAWANWISLVTLVPMEAVAAVQYMSSWPWSWANWTKQFIKNGDITFEGIGVVFIFMIIFTMINFWSVKIMTHFTNLISIFKILLPTLTIVVLICSGFHAQNFGSNIHEFMPYGTRSIFEATSVSGIIMSYDAFQTVINMGGELKNPRKNIVRGVLISMLITAAIYIMLQVTFIGAIEPSILAKVGWHGINFTSPFADIAIILGINWLVILLYLDAFVSPFGTGVAFVATASRALAAMTHTRHLPKWLGRLNQKYLIPRYAMVVDLILAAILVSLFRNWNLLATVITAATLIAYLTGPVTVMTLRKISPNIDRPFKPRYMPWLAPIAFVLTSLAIYWSMWPTTIQVILVIAVGLPVYIYYEIHYQHSNLKEQLKHCWWMIGYLIFISIMSYIGSTGFGGQDWIKYPFDFGIIIIASLVFYYWGIKTGMQRLDPYAEKIARNKK

SEQ ID NO: 30779 - protein, 718 aa, Lactobacillus acidophilus NCFM
MKNNRNRLLSNGLFYIVVFLLLLWGINWALGGSNNSGSSENISYSQFVKDLRQGKVKNFSVQPANGVYTVSGSYKTAQTAKNQSNSSFDFFSNNSSRKVSSFSTTMLQNDSTVSNVQNLAQKSNARMTTQGESQSGNWISTIVMLVPTVLFIVMLWMMMNQSGAGRGGSGGIMNFGRSHVKPEDPSKNKVRFSDVAGEEEEKQELVEVVEFLKDPSKYTKLGARIPSGVLLEGPPGTGKTLLARAVAGEANVPFYSISGSDFVEMFVGVGASRVRDLFSNAKKNAPSIIFIDEIDAIGRRRGNGTGGGNDEREQTLNQLLVEMDGFEGDEGVIVIAATNRSDVLDPALLRPGRFDRKVLVGRPDVRGREAILKVHAKNKPLAPDVDLKEVARQTPGFVGADLANVLNEAALVAARRNGTEITASDIDEAEDRVIAGPAKKDRLIAEPERRRVAFHEAGHSICGLVLSDSRTVRKVTIVPRGRAGGYNIMLPKDDQFILTKNQLFEQIVGLMGGRAGEEATIGDKSTGASNDFEQATQIAHSMVVNYGMTESLGMVELEKEGESNPYGFKPYSEATAAKIDEAVKKILDEAHAKALEIVKENKEKHRIIAEALLKYETLDEKQIMSLYKTGKMPEKDETEYPSESKASTYEEAKAAAEKREVEKAEKKDSDQALADQEKDALETPLEKNHEVEEHNPENPEKDEKTNSNNDSSADDEQR

SEQ ID NO: 30780 - protein, 825 aa, Lactobacillus acidophilus NCFM
MENSYSKSVNQVLEIAREQAQNFHHRLIGTEHILLALVIETDGEAGKILRSWGLTPTAIREEIERYTGYGSAPKASYMEMSPRLSLALDYAKRQAEQGGYKEIKTNHVLLGITASEQVLSAMILKNLSVDISRLRQDAIDSLEQDQDFNDSANWLGNSDSNQKKRKNSTTPTLDKVAINLNQRTREGNIDPVIGRDKEIERVIQILSRRTKNNPVLVGEPGVGKTAVAEAIATEIVKKRVPEDLLDKRVMALNMGNLVAGTKYRGEFEDRMKKILDEIAKDGKVILFVDEMHTLIGAGGAEGAIDASNILKPSLARGDVQMIGATTFDEYQKYIEKDQALARRFQQVRLNEPSKKDTLAILEGLKPKYEKFHHVTITEESLEDAVDLSSRYISDRFLPDKAIDLVDEASAAVKIKNNVNSDDELVQINNKIKNLIDQKNEAAASQNFVKAAQLQDEQNNLQARREKLVNTLHEKISANATVEPEDIAKVVSDWTGVPVTQMKRNETRQLANLEGILHKRVIGQDKAVSAVARAIRRSRSGIKDERRPIGSFLFLGPTGVGKTELAKSVAAAMFGSEDNLIRLDMSEYMDQIASSKLIGSAPGYVGYEEGGQLSEQVRRHPYSVVLLDEVEKAHPDVFNLLLQVLDEGFMTDSKGRKVDFRNTIIIMTSNLGSRSLFDGNAVGFNADKIDQAKVRQAKVQQAIKQFFRPEFLNRIDETIVFDELTKKQLRNIVSLLTNKLVVRLQRKGITLKLSRAALDKIVQDGYDPENGARPLKRAIQNDVEDKVAEMLINGEVKSGDTLKIGSQHGNLKFEVVAPKKEVEKVK

SEQ ID NO: 30781 - protein, 397 aa, Lactobacillus acidophilus NCFM
MKKVLAINSGSSSFKFKLFSLPDEKVIAQGMADRVGLKGSSFSVLLDDGTEHVTNIDIPDQEAAVSFLINALKKYHAVESLDEIIGVGHRVVNGGEHFKDSTIIDRQNLQKIYDLSDFAPLHNPAEARGIEAFMHVLPKVPQVAVFDTSFHQTLDPVHYLYSIPYEYYEKYRARKYGAHGTSVHYVTLEAAKMMNKKPSDLKLIICHLGSGSSITAVKNGKSYDTSMGFSPLSGVTMGTRSGDIDPSLLQHLMHKTGASIDEMINILNKDSGLLGISGISSDMRDLEFNKDQRAVLARKIFVNRVVRYIGSYIAEMGGADAIVFTAGVGEKDPGVRKDVMDAFKYMGVIPDYEANKKKGRHFITKPESKVHVMVVPTDEELMIAQDVMRLTRDAVLA

SEQ ID NO: 30782 - protein, 416 aa, Lactobacillus acidophilus NCFM
MINQTNTLFVFVASVLVFFMTPGLAFFYGGMVSKKNAVNTMISVFMITGVAIVLFIAFGYNLAFGKDVGGIFGFSKSFFLNGFDLKSLYSKDSGITILTYLMFQMMFSIITPALFVGAIVGRMKFKFLVAFVVIWSILIYYPMVHMVWTPSGILAKTGMLDFAGGTVVHINAGITALLLSIFVGPRLGFDPDGEVRHYNLPWVLMGTSILWIGWYGFNVGSALTVSDVATQAFLTTTVATGTSFVVWMFLDMFLKDKTNMIGLCTGALCGLVGITPAAGYVTVAGAFAIGFICTLASYGFIHVVKPKLEVDDPLDAFGCHGISGIAGSILTGAFATKIVNPQIENGLFYGGGLHLISAQVLGTVFTIVFVGVMTTAIVLPLKKFIPIRVSREEELMGLDLAEHGEQADYGIEFEEK

SEQ ID NO: 30783 - protein, 272 aa, Lactobacillus acidophilus NCFM
MRKKYFLSTFLIALLAITLSACGQNKNQSIYQTVKETKSITWGVKADTPLFGSMSIKDGKVRGFEIDLAEALTHKILGKQAKANFVTTTANTKIQLLKNRNVDAVIAAMTITPERKKQVEFSKPYFPAGQSIMVAKNSKINNVKDLNNKRVLIVKGTTSADAVRKFAPKAEILQFDDYGQAFAALKADQGDAFVTDNGILAGILRDNSGYKIAGGTFTNQPYGIAVNKGQNEMMEHINLALTQLEKDGTYNRLVEKWFGNIPGFNVKEIEKY

SEQ ID NO: 30784 - protein, 272 aa, Lactobacillus acidophilus NCFM
MKKLRKFLFLPLLMLLALTLSACGNKSSQNVYRKVKADKQIVWGVRADTRLFGLTNVKTGKIEGFEIDLARALTKQMLGKNAKADFVTTTANTRIPLLKNGNIDAVLATMTITPERAKQVTFSKPYFPAGSSLLVPNDSKIKSVKDLNNKTVLAVKGTTAVDDVHKSAPKARVLQFDDYGQAMSALKANQGVALTTDNGLLAGIAQENPGYKLVGGVYSDAPYGIAVNKGQKDMADHIDKALDELEANGTYNRLIRKWFAGIPGFSLKGVLK

SEQ ID NO: 30785 - protein, 585 aa, Lactobacillus acidophilus NCFM
MNHEDISIDNGAKANKFKFSSFFKLINSLKPHYSKLIIGTILGFIATAANLFVPQLAQRLINGFKNLSPNLIILTIVIFIGGLVISALSGLILGIFGEDVVAKLRKKLWQKLLNMPVSYFDNTKTGEISSRLVNDTSQVKELLASTLPNAMTSILQFFGALIIMMAMDWQMTLLMFIGVPLIVLAVIPIMQKSRSIGRKRQDELANFSSDSTSVLSEIRLVKSSTGEKKELRDGNHRIDNLYGIGVKEAWISSLTSPITNMLMMIMFLGILGYGAIRVMNGSMTMGALVSFLMYLFQIMSPVIIISQFFNRLSQTSGSTERINQILQEDEETKTDKKKIDIADKTLKFEDVSFEYEKDKPILHNVNLKAEPNTVVAFAGPSGGGKSTIFSLIEQFYQPTSGKIVIGNTEIDDIDLSDWRKQIGLVGQNSAVMPGTIRENLVYGLNKDVTEAELWRVLKMAYADQFVKEMDDGLDTQIGERGIKLSGGQRQRIAIARAFLRDPKILMLDEATASLDSESEAMVQKALNTLMKDRTTLVIAHRLSTIVDADCIYFIDHGTVSGSGTHEELIKSTPLYAQYVHNQFKK

SEQ ID NO: 30786 - protein, 434 aa, Lactobacillus acidophilus NCFM
MKRQISFGQALATVVGSVIGAGVFFKIGTITAQTGSSSMTLLVWVLAGIISIASGLTISEIAASLKINGAIKYLDYTYGRVWGFLFGWAQMIVYFPAQIGALSSIFGVQFVSLFGIEAKYSNLIAVILVLFLLSINLIGTKFSSKMQSVITILKIIPIILIIVLGLFNQNKVSAPIFPVTVGSSKDLIGSLSQGLLSALFAFEGWIVVTNLANEVKNPENDLSRAIISGLSIVTLIYVLINYTFLTVLPINQLVNNDNAAFEASMKLFGQFGGKLITIGILISVYGAANAFMLTGMRTPYILAQDRLLPFSNKIGKANIHTGVPVTGALIVDAIAIIMIILGNFTVLTDMLVFVMWTFNTMLSIAVVILRKREPELRRPFKVPWYPIIPIISVLGGLFIVISTIINQFLLSLIGIGLTLIGLPIYYHMQKKNQN

SEQ ID NO: 30787 - protein, 385 aa, Lactobacillus acidophilus NCFM
MKDIYIVAAKRTPFGKYRGFFKDASAVDMGVMALKGTLKASGINPEDVQALFMGNVLETGLGENMARQVALYSGMKESSAAVTINEVCGSSLKAVRLAQGQMEMGDLDLVAVGGSESMTRAPYFINKEDKDNPEKMTSTMLNDGLMDAFSGKHMGITAENVAEKYNVSREEMDKFSLASHQKAAKATEAGLLKNEILDVEIDGQVLDHDEPIRPGTSLEALGNLKPVFKEDGQVTAGNASPLTDGASMVILATKEKMEELDLTPVAKLGDFAEAGFDPAYMGYTPYFAVKKLLAKTGRSINDYDLIELNEAFAAQSIPVARDLEIPMDKLNIMGGAISLGHPLGATGTRLISTAVNGLKNNDGKLALVTLCIGGGQAIAYEIENV

SEQ ID NO: 30788 - protein, 329 aa, Lactobacillus acidophilus NCFM
MSVFSLFKEQVEQADEKKKIIFPESNDLRILTAVSNLNKDNIIDPILIGKREDIEKLAAENNLDLDGVKIYDQNNYAGLDEMAEAFVKARKKDTSIAEAKAKLAKGNYFGTMLVKMGKADGMVSGAAHSTANTVLPALQLIHAAKGMHRVSGAFVMEKGDERYIFADCAINIDPDEETLAEIGYQSAQTAKMAGIDPKVAFLSFSTKGSAEGPMVNKVHDAAAMFQKDHPEIPADGELQFDAAFVPSVGEKKAPGSKVAGHANVFVFPELQSGNIAYKMVQRLGNFTAVGPILQGLAAPVNDLSRGCSEQDIYDLAIVTAAQALAKDEK

SEQ ID NO: 30789 - protein, 394 aa, Lactobacillus acidophilus NCFM
MKKVLAINSGSSSFKYKLFSLPAEKVIAKGMADRVGLANASFEIKLADGTDHVEKTDIPDQEAAVSLLLKFLKEFNVVEDLNEIVGVGHRVVNGGEYFKDSTIINKENLQKIYELQDYAPLHNPAEGRGIEAFMNVLPNVPQVAVFDTTYHYSLDPVHYLYSIPYKYYEKYGVRRYGAHGTSIRYTAPHAAKMLGKDLKDLKLIVCHLGSGASITAVKDGKSYDTSMGFSPIAGVTMATRSGDIDPSLIQHLMHVEHKSMDEMIHILNSESGLLGLSGISPDMRDIRESDTERAKLARNIFINRIVRYVGAYTAEMGGVDAIIFTAGIGEHDAGVRKAVMDAFKFLGVEPDYEANEENGEHFITKPGSKVKAMVIPTNEELMIERDVVRLTNIN

SEQ ID NO: 30790 - protein, 386 aa, Lactobacillus acidophilus NCFM
MIYFDNSATTKIDPQVLDTYNKVATNIWGNPSSLHKMGDRAHQLLESSRKQIAELLGTKQHEIFFTSGGTESNNTAIKGTAIQKREFGKHIITSSVEHASVANSLTALENLGWRVTRLPVDKEGRVNVNDLRNAIDSDTTLVSIMGVNNEIGTIQPIDEISDLLENYPTIQFHVDNVQALGKDIWDKVFTPRVDLSSLSAHKFHAPRGIGVLYKKEGKMLAPLNDGGGQEKGIRSGTENLPAIAGMAKAIRLLLENEPEKASREAAIKAKIVDYLKDKPGIDIFSPVSDGFAPHILCFALEGIRGETLVHTLEDQDIYTSTTSACASKTADEASTLVSMRIDDKIATSAIRLSFDETNTLEEADEFIKVFDKIYNHFAKINHLGEN

SEQ ID NO: 30791 - protein, 451 aa, Lactobacillus acidophilus NCFM
MKVVKFGGSSLASGQSVEQALNIILNDPERQVIVVSAPGKRNNADTKVTDLLIKYAEQVLKHEETDAIVKQIFARYQEIGYFFGLNDEKLQIIQNILLALPNQNYPDNNYLMAAFKAHGERLNARLIALILQHENIKSRFLDPVDAGLIVTGEPNDALVNPESYLNLDQIKIDPNEKIIFPGFFGITPSGNIATFSRGGSDITGAILARGFHANIYENFTDVNGIFAANPNIVMHPISIKKMTYREMRELSYAGFSVFHDEALIPAIQGQIPINVKNTQEPDNPGTMIVPEKNFSPDNTITGVTSQKHFSALYLHKYLLNKEAGFTLRILQILYKHNIPYEHMPSGIDDITIIFNNDFLNDQLIDQICNEIQATINPDQLEWIDDYAIIMVVGEGMKKTPGVSRQILDSLASQGITPRMINQGASQISIMIGTKKEKADKAVKIIYQDFFN

SEQ ID NO: 30792 - protein, 391 aa, Lactobacillus acidophilus NCFM
MPELASDLGLSKKIQDVRASGIRIFDNKVSTIPGIIKLTLGEPDMNTPEHVKKAAIKSIEENDSHYAPQKGKLELRKAISNYLNKVTGIDYNPETEIIVTVGATEAINATLFALTNPGDKVAIPTPVFSLYWPVATLADADYVLINTAEDDFKLTPQKLEKAVEENPAIKTVILNYPTNPTGVEYTEDEIRALAKVIEEKHLYVITDEIYSSLTYGVKHFSIASLIPERAIYISGLSKSHAMTGYRLGYVAGPAKIMEQIGKVHGLMVTTTTDSSQAAAIEALENGLDDPDEYRRVYQKRRDFVLKALEEMGMHAVKPDGAFYIFAKIPAKYGKDDMQFALDLAFKEKVGITPGSAFGPGGEGYVRLSYASSDENLHEAMKRIKQFLQEDK

SEQ ID NO: 30793 - protein, 394 aa, Lactobacillus acidophilus NCFM
MPNLSNDLQSIINNRLNNLSASKIRAFDQKVSSIPGIIKLTIGEPDLATPDHVKDAAINDIQANDSHYAPQAGKPELLDAISNYLDRSIGVHYDPESEICVTVGATGALNDVFMTLLNPGDKILVPTPVWALYFQLIKMTGAIPIQIDTKKDGFVLTPEHLRHVLNGRGKGAKAIILTDPSNPTGRVYPEEILKELAKIIKEYKIYSITDEIYAELVYGDAKHHSLSEYIPEHNILISGLSKAYAMTGWRLGYIAGPKQIMKAIRKVNSFLITSVTDNVQMAAVEALNNGQNDPKEARKIYESRLRFMQTGLEKLGFEMATPQGAFYIFAKIPEKYGTDDENFAFELAQKAKVGVTPGRYFGKGGEGYVRLSYASSTEQLRESLQRITNFVDNL

SEQ ID NO: 30794 - protein, 321 aa, Lactobacillus acidophilus NCFM
MNKAKVLVLGGLIDDALDDLRSTCEVTVGPVGHRPNDDRQWVLKNIAKYDGVIVAKMIFDKEIIDAAKNLKVISTYGVGFDHIDIDYAREKGIVVTNCPNSVLRPTAELALTMIMASARRIRYYDHALREGVFLNVDEYDSQGYTIEGKTLGILGMGRIGQQVARFAKALGMKIIYHNRHQLKPELEAELNARYVDFASLVKNSDFLSLHAPATDETYHIIDKDVFNNMKDTSFLINVARGSLVDSDDLVAALKEGKIAGAALDVFENEPYPKQDLVNMDNVIMTPHVGSATHKARYNLTKEAANNILTFFKEGKVINSVN

SEQ ID NO: 30795 - protein, 398 aa, Lactobacillus acidophilus NCFM
MLAAIVCALAGMCYAEFASAIPVAGSAYSYGNIVYGEFTGWIIGWALILEYMLSVATVAAGWSSYFSSFISPFGLKIPNAVSGPMNLSKGVYFDLVSVLVILIISILLSRGMKNSIKINIIAVFIKIAIILIFIFVGVQFIKPANYHPFLPYHFSGVIKGATTVFFAFLGFDVVSSSAAEVKNPKKNMPLGIIGTLAIAALLYFGVSIVLTGMVNYKQLNVSNPVAFALQYVHQDWVAELLSFGAMLGMATMMLTMIYSSSRLIYAMARDGLLPSTFSKLDKKHNSPQNALIAVTIIISLGAAFFSVDQLANLVNFGTLFAFTLVSFGILKLRKRTDITNDGFKVPGYPFLPIISGLICIFMICHLSSEVYLMAFIWLVLGAIIYFAYGYHHSQLDHE

SEQ ID NO: 30796 - protein, 433 aa, Lactobacillus acidophilus NCFM
MPTFVDQTKIEVQAGKGGDGMVAFRHEKYVPNGGPAGGDGGRGGSIIFVADSGLRTLMDFRYRRKFKADNGENGRIKSQYGRGAKDLYLKVPVGTTVYDFNTGELIGDLVEKGQELVVAKGGRGGRGNIHFATSVNTAPEIAENGEPGEDRVLRLELKLLADVGLVGFPSVGKSTLLSVTTKAKPKIAAYQFTTLTPNLGMVILPDGRDFSMADLPGLIEGASQGVGLGIQFLRHVERTKVILHLVSMDPNNGREAIEDYHTIRQELKSYATDLSDKRELIVASQMDIPGADKKLAQFRKDLEKESNDEPVYAISSVTHAGVSKLMNDTATLVEEVEKERVEEPKVVQKTKEYKYKAPQRNEFMVEKVGEHEFVVKGEQLERLVQMTNLDHQDGIMRLARRLKRLGVDDALREKGAVNGDDVAIGKFVFEFVQ

SEQ ID NO: 30797 - protein, 286 aa, Lactobacillus acidophilus NCFM
MKVKNIFNWTISILAILLVIISAYFGFAQKGLNSGTSASRWSNQNGVSEIKRRGYLRVAVFGDLPPYGWVNSNGKRVGYDVYLAHRMTQDLGVKIRFVQVNANNRVDTLNSNKADIILANFTVTPERKDVVDFAKPYMKVSVGVISPKSAPITSANQLKNKKLIVTKGTTAENYFSQQKNVNLLKFDSKTQQFNALKNGRGAALADDNSYLYAWVKQNPKYTVGIKSIGPKQYISPAVKKGNRSLLKWTNKEITKLNKESFFVEDYNKELRPYFGKDIKPTDIILA

SEQ ID NO: 30798 - protein, 441 aa, Lactobacillus acidophilus NCFM
MGKENNELKRSLGFGSAISIVIGTIIGSGIFFKQASILDSAGSSSMAISAWIFGGVITLAAGLTIAEIGAQMPYTGGLYVYVENLYGRICGFLAGWMQVIVYGPAIIASVAGFMSIMITNLFGIDAKWRIPIALIIIIAIGLMNFLENKVAAAFSVITTIGKMIPIAAIIIFGLFWGHQDALGQTVSEINRSAGGFGVAVLATLFGYDGWILIANLGGEMKNPQKLLPKAIILGISTVLVIYTLITVGIFRFVPANMIHSLGENTTSYLATRAFGDIGGKLLSIGIIVSMMGTLNGKIITFPRIVYAMARRGDLPFSRILSYVTPKGKSPVVATIFIILLATIMMLFFDPDHLSDLCVFTIYCFYLLTFFGIFILRKKNSKRPFSTPLYPFVPIVAIAGGIFVLVSELFNDPAGVLLFAGIVIIGLPVLYVVKKMDKKRLK

SEQ ID NO: 30799 - protein, 383 aa, Lactobacillus acidophilus NCFM
MNNKIYMDNAGTSPMAPQVVKTMTDMMTNVFGNASATNYYGREAKRVLEDSRHILAESINADDKEIIFTSGGTESDNTAIMQTALARQNEGKHIISTKFEHEAVLRPLARLEKMGFEVTYLNVDKNGQINLDDLKNAIRPDTILVTIMMVNNEVGSLAPIKEIGEIVAPTNAWFHTDAVQAYGEVPIDVKDMKIDLLSTSAHKLNGPKLLGFLYERDGIKLPSFMLGGDQELKRRPGTENVPAIAGFAKAIEIHSNKAIIANEERYFNFKHALVDGLKKNGVDIEVNGNIEDQMAPQVISIWFKGIRSDVLLTNLDLAGVVGAAGSACTAGSLDPSHVLIAMYGKDSPRVWESLRFSFSIENTIEEVNSVVEILTRIINRLKK

SEQ ID NO: 30800 - protein, 301 aa, Lactobacillus acidophilus NCFM
MEEKEFKSGFVALVGRPNVGKSTLMNYLVGQKVAITSNKPQTTRNRISGIYTSDRMQVIFVDTPGIFKPHSKLDDYMDKASLSSLNDVDLVLFMVEPEDMGKGDQYIADLLKEVKVPVFLVINKVDQIHPNKLLPIMDSYHKLDGFKEILPISATQGIGIDDLLNTIYKYLPAGPQYYDADQITDRPEYFVVAELIREQILRLTSQEVPHATAVVVDQMNKHQNGKLVIEATIYVERDGQKGIIIGKGGKMLKQIGIDSRKEIERLLGEKVNLRLWVKVQHNWRSDPSFLKQIGYDKKELG

SEQ ID NO: 30801 - protein, 453 aa, Lactobacillus acidophilus NCFM
MKVVKFGGSSLATGNNVNKALNIIKNDSSRQVIVVSAPGKRTDDDIKVTDLLITYAYTSLRSNNYDDTVEKIFRRYELIAQYFDLPESDLTKIKRLLLTLPTYDYPNADYRMATFKAHGERLNAILIAKILNHQGIKTRYLEPKDVGLIVTGTPNNAEVNPETYVNLKRINLKNNEKIIFPGFYGITPSGHIATFSRGGSDITGAILARGFDAELYENFTDVDAIFSANPNIVTNPAPIKKMTYQEMRELSYAGFSVFHDEALIPAIQGEIPVNVKNTNDPEKPGTLIVPEDGFIPKHTITGIAGGKNFAALYLRKYMLNKGAGFTLKLMEIFDRHHVSYEHMPSGIDDLTIIFKKDALSDQLIDVICNEIQTSLNPDQMQWIDDYAITMVVGEGMKDKLTLCASILYPLGEKNISIQMINQGASQISIMIGTRRQDEEEVIKTIYQNFIENR

SEQ ID NO: 30802 - protein, 614 aa, Lactobacillus acidophilus NCFM
MSKVIGIDLGTTNSAVAVLEGKEPKIITNPEGNRTTPSVVAFKDGEIQVGEVAKRQAITNPNTIVSIKRHMGEADYKVKVGDKSYTPQEISAFILQYIKKFSEDYLGEEVKDAVITVPAYFNDAQRQATKDAGKIAGLNVQRIINEPTASALAYGLDKDDDDEKVLVYDLGGGTFDVSVLQLGDGVFQVLSTNGDTHLGGDDFDNRIMDWLIKNFKDENGVDLSKDKMAMQRLKDASEKAKKDLSGVSSTHISLPFISAGESGPLHLEADLTRAKFDELTNDLVEKTKIPFDNALKDAGLTVNDIDKVILNGGSTRIPAVQKAVKEWAGKEPDHSINPDEAVALGAAIQGGVISGDVKDIVLLDVTPLSLGIETMGGVFTKLIDRNTTIPTSKSQIFSTAADNQPAVDVHVLQGERPMAADDKTLGRFELTDIPPAPRGVPQIQVTFDIDKNGIVNVSAKDMGTGKEQKITIKSSSGLSDEEIKRMQKDAEEHAEEDKKRKDEADLRNEVDQLIFTTEKTLKETKGKVSDEDTKKVQEALDDLKKAQKDNNLDEMKEKKDALSKAAQDLAVKLYQQNGGAQGAAGQAGPQGGNPNDGNNGGAQDGEFHKVDPNK

SEQ ID NO: 30803 - protein, 475 aa, Lactobacillus acidophilus NCFM
MNLWQKMNKKEDPRVYENKDGHLVRSLKVKDFLALGVGTIVSASIFTLPGEVAALHTGPAVAISFILAAVAAGLVAFAYAEMAAAMPFAGSAYSWINVVFGEFWGWVAGWALLAEYFIALAFVGSGLSANFRALIAPLGIKLPAALSNAFGTNGGVIDIISLISILLVALLISHGVSRAARVENALVVLKVLAILFFIVVGLTAIKGSNFVPFIPKYRPTAHGPFGGWQGIYAGVSMIFLSYIGFDSIAANSAEAINPQKTMPRGILGSLAIAVTLFVGVSLVLIGIMPYQKYANSAEPVGLALRYAGHPIVAIVVQTIAVLGMFTALIGMSMAGSRLIYSFGRDGMLPKWLGKLNADRRPNNALWTLTVIGILLGAFFPFSMLSQLVSAGTLIAFMFVSLGIYKLRPREGKDIDDPSFKMPFYPVLPALGFLAALVVFLGLDYQAKLYAGIWFILGLLIYLGYGVHHSVLNNKK

SEQ ID NO: 30804 - protein, 103 aa, Lactobacillus acidophilus NCFM
MYAIIKTGGKQYKVAEGDSVFVEKLDAAEGSEVTFDEVILVANGDDVKVGTPLVDGAKVTAKVEKQGKEKKVVTFKYKPKKHSHSKYGHRQPYTKVTVEKIEA

SEQ ID NO: 30805 - protein, 402 aa, Lactobacillus acidophilus NCFM
MKKILVINAGSSSFKFKVFSFPQEDVIAEGMADRVGLADSTFELKLADKTAHSEKVEIPDQTTAVKILLTNLKKYHVINESNEIIGIGHRIVAGGETFKDSTLINQKNLQQIYDLKEYAPLHNVPEADVIKAFLQLLPNVPEVAVFDTAFHQTLDPVHYLYSLPYKYYEKYKARKYGAHGTSVRFVIQKAAQLLDKPLDQLKLIVCHLGSGASITAVKDSKSFDTSMGFSPLAGITMSTRSGDVDPSLLAYIMEKENLDRNQMIDILNNNSGLLGISGISPDMRDLRDDMAHLSGDKKKRADLARNIFINRICRYIGAYIIELGGVDGIIFTAGVGEHDAGVRAQVMNTLKFMGVVADLEKNKINQAGLITCPDSKIAVMLIPTNEELMIERDVVRVAHLKK

SEQ ID NO: 30806 - protein, 369 aa, Lactobacillus acidophilus NCFM
MDEDIICVGCGAILQSDDPKKAGYLPKSALDKAKREENTDVYCQRCFRLRHYNEIMPVDLNNDDFLALLNSLSEKKALVVNVVDLFDFSNSLLSSLKRFVGNNDFILVGNKFDLFPKNSKQSKIKDWMRQEANRMGLYPKDIFLVSAKKKVNLESLISYINDHSQDKDVYFVGTTNVGKSTLINAIIDMMGDIQDLITTSRFPGTTLDQIEIPLENGHFLIDTPGIMTDNQLATHLNAKDLELVSPKKPLKPATYQLLPGNTLFLAGLGRIDFLKGESTSFTVYVARDMYVHRTKTANADAFYEKHKGELLTPPSADDQMAPLKGKEFRTDYKSDLLFGGIGFVTVPKGCVVKTYTPDGIGLGIRRALI

SEQ ID NO: 30807 - protein, 391 aa, Lactobacillus acidophilus NCFM
MKKVLAINSGSSSFKYKLFTFPNEKVVASGMADRVGMANAVFKIKLNSKEYIKNTPIPNQEAAVSLLIESLKKFNVVKDLKELSGVGHRVVNGGEVFKHSVVINQANLKQLIKLGNLAPLHNIPETVGIEAFMQIIPDIPQIAVFDTSYHQSLSEINYLYSIPYRYYEDYAVRKYGAHGISVEYVAPRAAKMMGKNLNISKLIVCHLGSGSSVTAVKNGKSYDTSMGFSPLTGVTMGTRSGDFDPSALRYIMDKTGMSIDEGIDMLNHESGLLGISGVSSDMRDLIESKQKRAELARRIYINRVVRYVGAYAAEMDGVDGIIFTAGVGEHDSGIRAGVMSSLRYLGLKPDYKANRTDGEKFISMPNSKVKALVVPTNEELMIAREVVRLTR

SEQ ID NO: 30808 - protein, 336 aa, Lactobacillus acidophilus NCFM
MKLILPKDYHPTLTVRDTEAAIVYIRETFQDKLASILGVQRMSAPMFVEKASGLNDNLNGVERPVGFDMKAIPDSEIEVVHSLAKWKRLALKRYGFGMHEGLYTNMNAIRRDEDLDNFHSIYVDQWDWEKIIAKEERNTDTLEVTVMKIFKAIKATEKLVTARYPGSTYRLGDHVSFITTQELEDRWPELSPEERENKIAKEEKAVFIMKIGDKLKRSGKPHDGRAPDYDDWQLNGDLIFWYEPLQSKIEVSSMGIRVSEESLREQLKKAHCEDREKLPFHKMLLEGKLPYTIGGGIGQSRLCMLLLGKAHIGEVQASIWPEEMIEKCESDHIHLL

SEQ ID NO: 30809 - protein, 449 aa, Lactobacillus acidophilus NCFM
MNENTKLKRGLKSRHVTMIAIGGAIGTGLFLGSGSAIHSAGPSIILSYLIVGIITFFMMRALGELILADPDSHSFLESIKKYLGKRAEFVAGWTYWACWLSLAMADLTATGIYLRYWFPWLPQWVGPLVIVVLLMLINMVNVGLFGELESWFSMIKVIAIIALIVVGAVMIIFHTPVKGGTVSLTNLVSYGGFFPTGVWGFLLSFQMVVFAFVGVEIVGQTASETANPHQDIPKAINTLPVRIGLFYVGSMMAIMSVYPWNQIKTTSSPFVQVFTGIGVTAAAGILNFVVLTAALSATNSAIFSTSRSLYSLARNGHAPKKLGNLTKKAIPMNALITSSLILFVVVILNYVMPAEIFAVVSTVSTICFVIVWIMIMFTHIVYRRHNKNNLGEFRMPGYPLTSWLTIVFYIAILILLFFIESTKLALIISIVFVLILTVSYNFVSKNTNN

SEQ ID NO: 30810 - protein, 291 aa, Lactobacillus acidophilus NCFM
MKDILTKRNVKRLLAVLAVITLAVVLTGCASQGANGQVTPVSHTSGNWWDRWIVYYMSAFILWLAKLMGNSYGWAIIVFTIIVRVILLPLNAISIRSTTKMQSIQPQINELRKKYPGRDTESRTLLQQETNKLYKEAGVNPYTGCLPVIIQLPVMYALYGAILRTPQLQTGRFLWMDLSKPDPYYIMPILAMVFTFLSTYISQLSTPKSSQNGMTKVMMYGMSIMVGVMALNFQSAITLYWVISNLFQAVQTFILQNPIKYRKEQEAKNEAERERKRKLRKTYKRLGRKNK

SEQ ID NO: 30811 - protein, 336 aa, Gossypium hirsutum
MESDTIECVSSIDEIVEDHEIPHHNLLHHPHPRHAPHHQFSSSKPHHNGTNNVNSISNIVGPTAIAPAASVHELLECPVCTNSMYPPIHQCHNGHTLCSTCKIRVHDRCPTCRQELGDIRCLALEKVAESLELPCKYYKLGCPETFPYYSKLKHEGICIYRPYNCPYAGSECSVVGDIPFLVAHLRDDHKVDMHTGCTFNHRYVKSNPREVENATWMLTVFHCFGQYFCLHFEAFQLGMAPVYMAFIRFVGDETEARNYSYSLEFGANGRKLIRKSAPRSIRDSHRKVRDSHDGLIIQRNMALFFSGGDRKELKLRVTGRIWKEQQNPDANMCIPN

SEQ ID NO: 30812 - protein, 143 aa, Gossypium hirsutum
GCERTTEGYGCEEDDRRELKHESQCSYRPYSCPYAGSECTVIGDFPYLVAHLKDDHKVDMHNGSTFNHRYVKSNPHEVENATWMLTVFSCFGQYFCLHFEAFQLGISPVYIAFLRFMGDDNEAKNYSYSLEVGGNGRKMIWQG

SEQ ID NO: 30813 - protein, 1531 aa, Zymomonas mobilis subsp. mobilis ZM4
MSIKSSADSFDVFAERERLAKEGMYRPEFETDACGVGLVAATDGKASRRVVTAAIDALKAVWHRGAVDADGKTGDGAGIHVDLPASFFDDAIAHAGHAPLPNRLAVGMVFLPRTDLSAQETCRTIVESEIIDFGYRIYGWRQVPVDISVIGEKAMRTRPEIEQIMIAGPHPDEMSAWNFEKNLYLIRRRIEKKVIAAQTNKIISARCLVRSIVYKGLYLAEALPTCYPDLQDERFVSRVAVFHQRYSTNTFPKWWLAQPFRMLANNGEINTIRGNRNWMKSHEIKMASLAFGENSEDIKPLIPAGASDTAALDAVFETICRAGRHAPAAKLMLIPEAWQHNPDMPKAHRDMYSYLASVMEPWDGPAALAITDGSWAVAGVDRNALRPLRTVRTKDNLLIVGSESGMVVVPENNVIAKGQLGPGQMIAVNLDEGRFYEDRPLKDLIASERPYGEWIKDFKKLSDLDLKSYDPVIPYDRDELIKRQVSAGLTLEDMDLVLSPQAETGKEAMGSMGDDTPLAVLTEKPRLTSQFFRQNFSQVTNPPIDSLRETQVMALTTRFGNLGNILDSENKQKQILTLDTPYLKTSEWCQLKDHFGEQAVEIDCTFSPDDGADALRHAISNLRTQAENAVRSGHSELFLTDEHIGSDRVAVAMILATAAVHTHLIRKGLRSYASINVRASECIDPHYVAVLIGVGATTVNAYLAESAIAYRHSQGLFGTMTLEQCLDNHHHAICNGLLKIMAKMGIAVVSSYRGAYNFEAVGLSRALVNDLFPGMTAKISGEGYASLQRSALLRHQNAFAANKKALDVGGFYRQRASGDSHAYTAELMRKLQKAVSSDSYTTYLEFSKEVHQLPPVYLRDLLGFNWSKQPIPIEEVEPITEIRRRFITPGMPLGALSPEAHETLAIAMNRIGAKSVSGEGGEAPERFHPYENGDNANSPIKQVASGRFGVTAAYLGACEEIEIKVAQGAKPGEGGQLPGFKVTDMIAKLRHSTPGVTLISPPPHHDIYSIEDLAQLIYDLKQINPNARVGVKLVSSAGIGTIAAGVAKAHADSIMISGNVGGTGASPLTSIKYAGTPWEMGLSEANQVLTLNGLRHRVKLRTDGGLKTGRDIVIAAILGAEEFGIGTLSLIAMGCLMVRQCHSNKCPVGICTQDKAMRQKFIGTPERVINLMTFIAEEVREILAKLGVRSLKEIIGQTDLLSQVNRGADHLDDLDLNPVLAKVDANTEARYFQIDGFRNPVPDSLDAQMLQDAQAVFTRREKTQLTYSVRNTQRAIGTRFSAEITRNFGMDSLADGHVHVRLRGSAGQSLGAFSVKGLTLEVFGDANDYVGKGLSGATIIVRPTVSSPIDGHTNTIIGNTVLYGATAGKLFAAGRAGERFAVRNSGAETVIEECGANGCEYMTGGLAVILGSVGPNFGAGMTGGMAFVLDEDNSFERHANPDNIIWQRLASSHWETVLRSMIADHAVKTDSPWAHRVLDEWDLWSQKFWQICPKEMLGRLEYPLDDKKNTEDQKEKGKAGKPELKEQEGAF

SEQ ID NO: 30814 - protein, 1528 aa, Xanthomonas oryzae pv. oryzae KACC10331
MRHRINCGLVDHPVTSSNAPRIERCNVAAALLDRKEADMAPRTRQGLNEHGLYNSARDERDACGFGMVAQLDDQPSRSLVDTAIAALSRMTHRGGVAADGLTGDGCGLLIRKPDAFLRVLARDAGITLGTRYAAGVVFLPLDEADAARCRAELQAQLQSAGVQVRGWRVVPTDDSVCGQLARETLPRIEQVFVNAGAKQTEDAFTLALFLARRRAEQALHAVEDFYVTTLSPNGISYKGMVLPDKLSTFYPDLQRSDLSSSAIVFHQRFSTNTLPRWPLAHPFRLLAHNGEINTIEGNRRWAQARSKVWQTPRFDIAEFDPVISMHGSDSQSLDNMLELLIAGGMDLLQALRILVPPATQALEFKDADLAAFYEFYGLNTEPWDGPAGIVACDSRYAACMLDRNGLRPARWMLTSDRHFLVASEAGVWELPAERITRKGKLGPGEMMAIDLKRGDLLDSDAIDRINRARAPYKQWLQQGVTYLQTELIDPSLVEEPFSEQTLRSYHKLFQLSTEEVEQILRPLAETEQEATGSMGDDTPMAVLSRQTRPLYDYFRQAFAQVTNPPIDPLREGIAMSLTTQLGKETNIFHAGAETVNHVILNSPVLSQRKLRQLLKMEQYVARNRLIDLSYSVEEGLKAGLERICQDVEAAARAGAVMLLLSDRYPVPDRPMAHALLATGAVHHHLCKVGLRCEVNLIIETGTARDAHHMACLLGFGATAVYPYLAYQTLFDLGRRGILQLSKGGEQSQIGRRYRKGIYKGLSKIISKMGICTIASYRGAQLFEIVGLDPDVVELCFADTPARIGGVSLSRLDTESRELTARAWNDQLKPEVGGLLKYVHGGEYHMYNPDVVMTLQRATRTGDAGDWQKYVDAVHSRPASTLRDLVQLKRAGTPTPLDDVAPAEDVLRRFDTAAISLGALSPEAHEALAIAMNRLGGRSNSGEGGEDPARYGTEKRSKIKQVASGRFGVTPEYLVNAEVLQIKVAQGAKPGEGGQLPGHKVNELIARLRYAKPGIGLISPPPHHDIYSIEDLAQLIYDLKQVNPSALVSVKLVAHAGVGTIAAGVVKAGADLITVSGHDGGTGASPVSSIRYAGVPWELGVAESHQALVANDLRERTILQTDGGLKTGLDVVKAALLGADSFGFGTAPMIVLGCKYLRICHLNNCATGVATQDERLRAGYFTGLPERVEHFFRLLAEEVRQWLSYLGVRSLDDIVGRTDLLEQLELSPRPGVKVDLSRLLTHAHYDGSHCAAQRLYESPDSLATQMDGLLADAIAHKTGGEHRFLIHNTDRSIGARLSGAIARVHGNHGMSDAPLNLRFRGTAGQSFGAFNAGGLQLELEGEANDYVGKGMAGGRLVVRPPRGARFEARSTPIVGNTCLYGATGGELFAAGRAGERFAVRNSGALAVVEGAGDHCCEYMTDGVVLVLGKVGLNFGAGFTGGLAYVLDIERDFVDRYNHELIDIHRVSAEGFENHRQHLHTLISRHRELTGSIWAQQILDEFRDYIGKFWLVKPKAASIESLTESLRRAA

SEQ ID NO: 30815 - protein, 275 aa, Xanthomonas oryzae pv. oryzae KACC10331
MQPVIIEARWGLPRSQTVPNTFVPVQFPLKLVDRRMIAPTVAHCQFVRDDGQPLDFQPGQFIQIHFDYADGTPTKRSYSLATIHDHALGPGEAVEIAVSFVPGGSATALFEGLEIGDQLQASGPYGRFCLQPGDHNQRYVLIATGTGVTPYRSMLPLLAEAIATRGVQVVLLQGARNPTELLYGDDFRAFADAHPQFRYVPCFSRDVPEQPHADVRHGYVQQHLAEFVPDAAHDIAYLCGNPDMVDICLEALKAAGLPSAQIRREKYVSSTPPKV

SEQ ID NO: 30816 - protein, 840 aa, Xanthomonas oryzae pv. oryzae KACC10331
MASAPSGTIDTGRPLARPFAAIVLRNAGGELFGSAGHFHPQLHVIGHPLRIQQVGLDCRAHRTAWLGDMRAIVEAALRRQRLHIRKTAFGQILFAGRLELAHAGRVDQTRTGRQRNQRAVRGGVTAARIVFAHPIGLHLLGAQQGVGQGRFARTGRAHQYRRTAIAQPRPQRSHAGRILGIDRAQRNVLRLQLFQHRQRILGMFGLIGLGQHHHRLRTAAAHQQQIALDATRIEVRIQPAHDEHRIDIGRDHLLVVMRAGRPPLDRSAPRQQRHDALALHQHPIAHRRPLMAGEARPLPLRQRLGLEAGLRRIGHHIAGAVLLHHPRRQRLRMRGEDCLPGRLFRRPRPGPADGLEGGVIGGDVAHGAILAGWPQRLVQSGPAGRLTRHLTSLPMQACPLVIFPIPCQVSRLQPARRMSTAPQKPLAIRERLSEVRYEIRGELARRARELEAQGRKLIKLNIGNPGAFGFRAPEHLQRAIADDMGRTDPYTHQQGLLEAREAVAKAYARRQHPDAHPDRIFIGNGVSELIDLSLRALLNPGDEVLVPSPDYPLWSAATILNDGRPVYYRCAPENGFQPDPVEIETLVSSRTRAIVLINPNNPSGASYSRALLERIVAIATKHNLLLLVDEIYDQVLYDGAAFVPVAPLAGAHPCITFSGLSKVHRACGWRVGWALLSGDQARINDLRNAMDLLGALRLCANVPGQYAIDAAVNGPDTISALCAPGGRLYETRRAVIEACAASEHLSLVAPAGALYAFPAVVGAAARNFDDHAFALDLMNKEGVLVVPGSSFNVPYRHHFRVTLMPEASVMRDVFARIDRALARRAEAVTKVVPLKSRSVA

SEQ ID NO: 30817 - protein, 836 aa, Xanthomonas oryzae pv. oryzae KACC10331
MMLPAALSSVGIAGGMQGRFRVEPHSAPRTPRCSMRSPCRADSCATGPCSGRRVEFSSPAPSRHTQPMSTDDFKQAALDYHRQQPAGKIKVTATKPMLTQRDLSLAYSPGVAFACEAIVDDATQASELTARGNLVAVITNGTAVLGLGNIGPLASKPVMEGKGVLFQKFAGIDVFDIEISENDPDKLVDIIASLEPTFGGINLEDIKAPECFIVERKLRERMNIPVFHDDQHGTAIIVGAAVLNALVVTGKKIEEVKLATTGMGAAGISCVNMLVSLGLKPENILALDRDGVIHTGRTDLDPDKQRYARDTDKRTLAEIVEGADIFLGLSAAGILKPEMVASMARQPVIFALANPNPEITPEAAKAVRPDCIIGTGRSDYPNQINNVLCFPYLFRGALDVGATGINEEMKIACVKAIAAMARREASDLGAAYGGETPSFGPEYLIPRPLDPRLLVELSSAVAQAAMDSGVATRPITDMEAYRDKLGQFVYRTSLMMKPVYDRARADKQRVVYAEGEEEVVLRAVQNVVDEGLAFPILIGRPDVIEARIERMGLRLTAGVDFEITNILDDPRFNDYWQYYHALTERRGVTVTAAKELMRSRPTLIAAVMVARGEADAMLSGVVGRFHKKLGYARSVIPLEPRVSSTSAMTGVINQLGVFFFLDTHVQEDPTVEQVVEATLQAAYRLKLFGIEPNIALLSHSNFGSHDSRDALKMRQVREALLKRKPELNIDGEMQGDTAWDEALRKQIMPNSTLKGRANLFVLPNLEAANIAYNLVRVFTDGVAIGPILMGISKPVHILTTSATSRRVMNMTAIAAVDAQIRKLLEAEKGGADKSND

SEQ ID NO: 30818 - protein, 523 aa, Xanthomonas oryzae pv. oryzae KACC10331
MTSPCSAWPPVTTIFAMGILRNPKREGVAGNDVRAFRPQCKRRGAEAHRSNDAEWGCKAPAAVIRCSWTASGGRHDAGAYRPALAQLVWQQAQPTRSAFFRRQGLQLQRVNRPAHQLAQGRIDHAVPRQRCLADECRADHGGLEVHAVITVHVDAGFGHAGFDEFTDGFGVHRAFPHKMSAHSTLHPSSRMAVSHLPPATVSDASLVASGQRVLEIEREALANVGARIGSEFAAACRLVLASRGRVVATGMGKSGHVARKIAATLASTGTPAFFVHPGEAGHGDLGMITEADIVLALSYSGESDEVRMLLPVLKRQGNPIIAMTGRTSSTLAQAADVHLDVSVSAEACPLHLAPTSSTTASLAMGDALAVALLDARGFTADDFARSHPAGSLGRRLLLHITDVMHAGDDLPRVREDASLSEALMEMSRKRLGMTAVVDNDERLIGLFTDGDLRRALDSDIDVRSAGIAQVMTRNPRTIGADQLAAEAARLMEDYKINGLIVVDAQQRAVGALNIHDLLRAKVV

SEQ ID NO: 30819 - protein, 700 aa, Xanthomonas oryzae pv. oryzae KACC10331
MRAMCLALTSASLRAWRTLSSIGLRHALARARAARDACGARPVTPRCQQAGALTMCGLAGLLLASPRLHGEQLDALVRPMGAALRHRGPDDAGTWCDAQAGVALAHQRLSILDLSPLGHQPMRSADGRYVLAYNGEVYNFAQLRAALSALGHRFRGHSDTEVLLAAVVEWGLDETLTRCNGMFAIALWDERDNCLFLARDRVGKKPLYYGWAGDTLVFGSELKALWQHPDFDNGVDRNALTLLLRLGYIPAPACIHAHTFKLMPGRVLRMDAQAVAAGAAAHRADQAQQPFWNAREAMQRALAAPFTGSDAQAEEQLDSVLRDAVALRMVADVPVGVFLSGGTDSSIVTAMMQAQSAQPVHTFSIGFEGSHHDEAPLAREVATHLHTDHTELYVSGADALAVVPCLPDMFDEPFADASQVPTALVARLARGGVTVALSGDGGDELFFGYGRYQRALRNWRMHGLVPGPLRRLMAVAARRNGESSRTGGLAALVAEAGARGIGDIYRNRISRWRDPAAVVPGATEPDSFYSLADPLHGSGTPADAMMLADFAAYLPDDLLCKVDRTTMAVGLEARAPLLDWRVAEFAWSLPLSLKYRDGMSKYLLKRVLCRYLPDTMVYRGKRGFGAPVSAWLRGDLHGWADDLLAHGALQREGVFAADTVAGLWRDFNGGERKWHTHLWTVLMFQAWQAHWREQRAAITR

SEQ ID NO: 30820 - protein, 474 aa, Xanthomonas oryzae pv. oryzae KACC10331
MERPRSDAPMPEPSSTTAPQFRRSMQVRHLVMLSLGGVIGTGLFFNTGYIIASTGALGTVLAYLIGALVVYLVMQCLGELAVAMPQTGAFHVYAARYLGPATGYVVAWLYWLTWTVALGSSLTAAAFCMQYWFPHSPAWPWCLLFCALIFGLNTVSARWFAEGEFWFSLIKVITILVFIVLGGAAVIGLLPLADGSPAPGLRHLRADGWFAHGTLPILMTMVAVNFAFSGTELIGVAAGETEQPARAIPLAIRTTLMRLVVFFVGTVLVLAALLPAEQAAVETSPFVRAFELLGIPYAADLLNVVILTAILSAANSGLYAAARMLWSLANEGTLPSGLTRLTGRGIPLRAVSLSMLGGLLALLTGVYAADTVFVAISAVSGFAVVVVWLSICASHYVFRRQLLRDGVAPETLAYRARWYPWTPILGFSLCLLACIGLAFDPQQRIALWCGVPFVALCYGAYALTQRLAARRLHA

SEQ ID NO: 30821 - protein, 495 aa, Xanthomonas oryzae pv. oryzae KACC10331
MACCNERMRGSVMARDAAVGTAQRASDSLPRLAGALTADAALDSAETVAPQGLCRCEHSVAATQSHTPSGIVADPIAALHCPMSPKRTSFPKQDIRVLLLEGISPTAVDVFRAAGYSQIELHAKSLPEDELIARIADAHIVGIRSRTQLSAEVLAHAKRLIAVGCFCIGTNQVDLDAAEVAGIPVFNAPYSNTRSVAELVIAEAILLLRGIPQKNAECHRGGWSKSAAGSHETRGKVLGIVGYGHIGTQVGVLAESLGMQVIFHDIETKLSLGNARAAIDLDDLLARADVVTLHVPETPSTKDMIGAAEIARMKHGAHLINASRGTVIDIDALDAALTSGQIGGAAVDVFPIEPKGNGDAFASPLTAHDNVILTPHVGGSTLEAQDNIGIEVAAKLVRYSDNGSTLSAVNFPEVTLPEHPDSLRLLHIHRNVPGVLSQINELFSRHNLNIDGQFLRTDPKVGYVVIDVSASEELAAILKDGLAQITGTLRTRVLY

SEQ ID NO: 30822 - protein, 132 aa, Xanthomonas oryzae pv. oryzae KACC10331
MSLPASMHLSLLKAKIHRATVTHAELNYEGSIAIDGLLLEATGIREFEQVHIWDVTNGARFSTYAIRAEDGSGIMSLNGGAARHVQVGDLIIVAAFASMSEDEAKTFKPNLVYVNARNAISHTNHSIPTQAA

SEQ ID NO: 30823 - protein, 335 aa, Xanthomonas oryzae pv. oryzae KACC10331
MPPRHWARRSRRHRNTCAANRATRAACSPTDPYPRRHTEQGQRMPIGFLGLGTMGLPMAHNLLRGGFELSVWNRSPERAQPLRDAGATVVEQPCGAAHGPLLFSMLADDDAVRQTLLERGVLDALPAGSVHVNMATISVALAHALTALHAERGVAYVAAPVLGRVDVAEAGKLNILAGGDDVAVARVQPMFDALGQKTWHIGRAPEQANAAKLAANVCLASAIGAMAEASALARGHGVDTTQFLGMLTSTLFAAPAYQGYGRLIMQRAYLPAGFTATLGRKDVDLAIQAGADKQVPMPLGEVLRAGLDEAIAHGDGHADWAVLAEVSARRAGQVA

SEQ ID NO: 30824 - protein, 579 aa, Xanthomonas oryzae pv. oryzae KACC10331
MRRRRRLRSPQQTSGVACSARHHRRLGAITRTKEEHMLEIYGKPTPINVRNVLWLCDELALDDTLHAYDRTRFATIWLHAANATSWTDSFAVLRWATLAHCVESREVRMSSWLRRKSIDQVTVHEAGRQLVRSLSWPHLIALGIGAIVGTGIYTLIGVGADKAGPAVLLSFVAAGIVCACAALAYAEMATMMPAAGSAYTYSYTALGESIAWVVGWSLVLEYSLVVSTVAVGWSGYFVGFLQWLGASLPHELIAGPHAGGIANLPAVVITFLVAGMLMAGTKESATLNAVLVVLKIIALGVFVAIALPTFKSANLQPFMPYGISKAMGPDGVERGVMAAAAIIFFAFYGFDAISTAAEETKNPGRDLSIGIVGSMIGCTLIYVLVALAAVGAMRFTVFGKSPEPLALILRELGHGKAALVIGAVAIIALPTVLLAFLYGQSRIFFVMSRDGLLPRGLSKVNARTGTPVAITLLTAVLVAALAGVARLDEIAALANAGTLAAFTAVAACLLVLRVREPGRARAFRTPLAWVVGPVAILGCLYLFWSLPSNTQGWFLLWNALGVVVYLAYGRRNSRLNSAG

SEQ ID NO: 30825 - protein, 226 aa, Thalictrum dioicum
MGRGKIEIKRIENTTNRQVTFCKRRNGLLKKAYELSVLCEAEVALIVFSSRGRLYEYSNNSVKKTIERYKKASTDSPNSGSVSEANVQFYQQEASKLHNQIASLQNHNRNLLGESLSNLNIKELRQIEKKIEGGISKIRAKKNELLFAEVEYMQKREIDLQTDNKYLRAMIAANERAPPEHMNLMPANEYHIMSSAPFDSRNFLPANLLDHNNNYSRSDQTTLQLG

SEQ ID NO: 30826 - protein, 408 aa, Methanosarcina thermophila
MKVLVINAGSSSLKYQLIDMTNESALAVGLCERIGIDNSIITQKKFDGKKLEKLTDLPTHKDALEEVVKALTDDEFGVIKDMGEINAVGHRVVHGGEKFTTSALYDEGVEKAIKDCFELAPLHNPPNMMGISACAEIMPGTPMVIVFDTAFHQTMPPYAYMYALPYDLYEKHGVRKYGFHGTSHKYVAERAALMLGKPAEETKIITCHLGNGSSITAVEGGKSVETSMGFTPLEGLAMGTRCGSIDPAIVPFLMEKEGLTTREIDTLMNKKSGVLGVSGLSNDFRDLDEAASKGNRKAELALEIFAYKVKKFIGEYSAVLNGADAVVFTAGIGENSASIRKRILTGLDGIGIKIDDEKNKIRGQEIDISTPDAKVRVFVIPTNEELAIARETKEIVETEVKLRSSIPV

SEQ ID NO: 30827 - protein, 921 aa, Daucus carota
SLSSAISPSSYAAIAAAYSARTPIFNKKKTAAVLSPLSLFHQSPSLSKTGIFLHRGRKESSSKFYIAASVTTAVPSLDDSVEKVHLPRGAMWSIHKFGGTCVGSSERIRNVAEIVVEDDSERKLVVVSAMSKVTDMMYDLIYKAQSRDDSYESALDAVMEKHKLTAFDLLDEDDLARFLTRLQHDVITLKAMLRAIYIAGHATESFSDFVVGHGELWSAQLLSFVIRKNGGDCNWMDTRDVLVVNPAGSNQVDPDYLESEKRLEKWFSSNQCQTIVATGFIASTPQNIPTTLKRDGSDFSAAIMGALLRAGQVTIWTDVNGVYSADPRKVSEAVVLKTLSYQEAWEMSYFGANVLHPRTINPVMRYDIPIVIRNIFNLSAPGTMICRESVGETEDGLKLESHVKGFATIDNLALINVEGTGMAGVPGTATAIFGAVKDVGANVIMISQASSEHSICFAVPESEVKAVAKALEARFRQALDAGRLSQVANNPNCSILATVGQKMASTPGVSATLFNALAKANINVRAIAQGCTEYNITVVLSREDCVRALKAVHSRFYLSRTTIAVGIVGPGLIGATLLDQLRDQAAILKENSKIDLRVMGITGSRTMLLSETGIDLSRWREVQKEKGQTAGLEKFVQHVRGNHFIPSTVIVDCTADSEVASHYHDWLCRGIHVITPNKKANSGPLDQYLKLRALQRRSYTHYFYEATVVAGLPIITTLQGLLETGDKILRIEGIFSGTLSYIFNNFKSTTPFSEVVSEAKAAGYTEPDPRDDLAGTDVARKVIILARGSGLKLELSDIPVQSLVPEPLRGIASAEEFLLQLPQFDSDMTRKREDAENAGEVLRYVGVVDAVNQKGVVELKRYKKEHPFAQLSGSDNINAFTTERYNKQPPIIRGPGAGAEVTAGGVFSDILRLASYLGAPS

SEQ ID NO: 30828 - protein, 440 aa, Nostoc sp. PCC 7119
MSNQGAFDGAANVESGSRVFVYEVVGMRQNEETDQTNYPIRKSGSVFIRVPYNRMNQEMQRITRLGGKIVTIQTVSALQQLNGRTTIATVTDASSEIAKSEGNGKATPVKTDSGAKAFAKPPAEEQLKKKDNKGNTMTQAKAKHADVPVNLYRPNAPFIGKVISNEPLVKEGGIGIVQHIKFDLTGGNLKYIEGQSIGIIPPGVDKNGKPEKLRLYSIASTRHGDDVDDKTISLCVRQLEYKHPESGETVYGVCSTYLTHIEPGSEVKITGPVGKEMLLPDDPEANVIMLATGTGIAPMRTYLWRMFKDAERAANPEYQFKGFSWLVFGVPTTPNILYKEELEEIQQKYPDNFRLTYAISREQKNPQGGRMYIQDRVAEHADELWQLIKNQKTHTYICGLRGMEEGIDAALSAAAAKEGVTWSDYQKDLKKAGRWHVETY

SEQ ID NO: 30829 - protein, 355 aa, Ralstonia sp. KN1
MYSLTIEPIGQTIPIAPGQTVLDACLRNGVWLPHACCHGLCATCKVQVVEGEFEHGEASSFALMDFERDSGQCLACCATAQSDMVIEADIEEDADSLGLPLADYRAEVVEARALTPTIRGIWLRVKGGAAAAFQAGQYLNLRVPGCDQPRAFSLANRPGDDLVELHVRRVEGGQATGYLHDQLSVGDELGFSAPYGRFFVRKSAQKPMLFLAGGSGLSSPRAMILDMLAAGETLPITLVQGARNRTELYYDEAFRALAGAHPNFRYVPALSDEPADSGWDGARGYVHDVLHGLYANGATADFRGHKAYLCGPPPMIEACIRTLMQGRLFEEDIHTEKFISAGDAQNSARSPLFKI

SEQ ID NO: 30830 - protein, 356 aa, Zea mays
MACLTDLVNLNLSDTTEKIIAEYIWIGGSGMDLRSKARTLSGPVTDPSKLPKWNYDGSSTGQAPGEDSEVILYPQAIFKDPFRRGNNILVMCDCYTPAGEPIPTNKRYNAAKIFSSPEVAAEEPWYGIEQEYTLLQKDTNWPLGWPIGGFPGPQGPYYCGIGAEKSFGRDIVDAHYKACLYAGINISGINGEVMPGQWEFQVGPSVGISSGDQVWVARYILERITEIAGVVVTFDPKPIPGDWNGAGAHTNYSTESMRKEGGYEVIKAAIEKLKLRHREHIAAYGEGNDGRLTGRHETADINTFSWGVANRGASVRVGRETEQNGKGYFEDRRPASNMDPYVVTSMIAETTIIWKP

SEQ ID NO: 30831 - protein, 291 aa, Vogesella indigofera
MNTTTPTIAVLGSGLIGAPVARNLASKGFKVKVWNRTAAKAQALVQDNLQACASVAEAVRDADCIVTVLKDGDSVASAMAAGSGHFRPGAKWLQLSTVGIDAAASLAQLASQQQLVYFDTPVQGTRQPAEQGQLIILASGPQAGREEVQTVFDAIGKRTLWVADEAGQASRLKLALNNWAFTLTHGLAESLALAKGLGVDPALVVDVVSNGPMDCAYFQLKSAAMLAGNYTPSFSVANAVKDSRLILDAASQAGLYAEVAGAGLHRFERALAAGHGDKDMAASFLAPDLPA

SEQ ID NO: 30832 - protein, 649 aa, Pyrenomonas salina
MENKIEGVAIGIDLGTTYSCVGVWLHDRVEVIANDQGNRTTPSYVAFTETERLIGDSAKNQVAMNPDNTVFDAKRLIGRRFQDPAVQEDVKPFPFKVICKDGDKPAVEVKYKGETKIFAPEEISSMVLLKMKEIAESFLGKEVKNAVITVPAYFNDSQRQATKDAGAITGLNVLRIINEPTAAAIAYGLDKKTSGSKSERNVLIFDLGGGTFDVSLLTIEEGIFEVKATAGDTHLGGEDFDSRLVNFFVSEFKRKYKKDVTSNARSLRRLRTACERAKRTLSSGTQTTVEIDSLIDGIDYYASITRAKFEELCMDLFRGTSEPVEKVLRDSKISKSEIHDVVLVGGSTRIPKVQQLLIDYFNGKELCKNINPDEAVAYGAAVQAAILAGDTSEKMDLLLLDVSPLSLGLETAGGVMTVLIKRNTTIPTKKTQVFSTYADNQPGVLIQVFEGERSRTKDNNILGKFELTGIPPAPRGVPQIEVTFDIDANGILNVSASDKSTGKSNKITITNDKGRLSKEEIERMVEEAEKYKTEDEKLDKKLEAKNSLENYAYNIRNTVRDEKLKEKIQEEDKKSIEEKVKEVLEFIETNEDLEKEEYEEKEKELKNFANPIISKLYQQGSVPDMGNFSTGQNEQDDNANMGPKIEEVG

SEQ ID NO: 30833 - protein, 337 aa, Sinorhizobium fredii
MMGLRHVKGEGHSPSAILDSIGRTLATATNGIKALAEHLATDESFARSLVEAVELVGDGHGRVVVSGVGKSGHIGRKIAATLASTGTSAYFVHPTEASHGDLGMVTSDDVLILLSWSGETAELANMLTYAKRFKVPIVSISSNRDSILARNSEIALVLPKVPEACPHGLAPTTSAMLQLAVGDALAIALLERRGFSAEDFKTFHPGGKLGAQLRLVHELAHVAEQMPLLAVGRPMSEAVIEMSSKGFGVVGIIDGSGVLVGVITDGDLRRHMAGDLLGQPVEEVMSCHPKVIHADVLASAAMEFMQEHKVTVLFLVDEAGMPEGILHIHDLLRAGVA

SEQ ID NO: 30834 - protein, 882 aa, Triticum turgidum
MYTKGPPLDVLRASISSAPSTSSHGSAQDDCDSLGDVYVWGEVVCDNSARTSSDTVIRSTGKTDFLLPKPLESNLVLDVYHVDCGVRHASLVTRNGEVFTWGEDSGGRLGHGTREDSVHPRLVESLAACNIDFVACGEFHTCAVTTTGELYTWGDGTHNVGLLGHGTDVGHWIPRRISGPLEGLQIAYVSCGTWHTALITSMGQLFTFGDGSFGVLGHGDLKSISCPREVESLSGLKTIAVACGVWHTAAIVEVIVTQSSATVSAGKLFTWGDGDKHRLGHGDKEARLKPTCVASLIDYDFYRVACGHSLTVGLTTSGKVWTMGNSVYGQLGNLNSDGRPCLVEDKIASEHVLQIACGSYHVAVLTSRSEVFTWGKGANGRLGHGDIEDRKVPTTVEALRDRAVRHIACGANFTAAICLHKWVSGADQSQCSSCRQPFGFTRKRHNCYNCGLVHCNACTSRKALRAALAPSPGKLHRVCDSCYSKLKNASSSANKKDLAPGESNGEARVGKSILSSNMDMIRSLDSKAAKQGKKTDALSFLRNPQVSSLLQLRDIAFSGGADLNRPAAPRAARTPAARSVTSSRAVSPFSRRSSPPRSTTPVPTTHGLSLSKSATDNLVKANELLSQEVERLRAQVDSLRNRCDHHELELHKSAKKVQEAMTLVAEESAKSKAAKEVIKSLTAQLKDMAERLPPEHGAYDFNEAKQVHVPNGVEPHVATYSSMNGKVHQARNELLNAPSTNSGRSPHSNGGISNQHKLLGNISENSEGSTHSLRITSPHGSDRPHRRAHSNSDEMLSASSRGDDNVSIDARSLQNGDDSYKPRGTISISSNQVQAEWIEQYEPGVYITLTTLRDGTRDLKRVRFRYFNYFLSCLLSSTPSVP

SEQ ID NO: 30835 - protein, 680 aa, Candida tropicalis
MALDKLDLYVIITLVVAIAAYFAKNQFLDQQQDTGFLNTDSGDGNSRDILQALKKNNKNTLLLFGSQTGTAEDYANKLSRELHSRFGLKTMVADFADYDFENFGDITEDILVFFIVATYGEGEPTDNADEFHTWLTEEADTLSTLKYTVFGLGNSTYEFFNAIGRKFDRLLGEKGGDRFAEYGEGDDGTGTLDEDFLAWKDNVFDSLKNDLNFEEKELKYEPNVKLTERDDLSGNDPDVSLGEPNVKYIKSEGVDLTKGPFDHTHPFLARIVKTKELFTSEDRHCVHVEFDISESNLKYTTGDHLAIWPSNSDENIKQFAKCFGLEDKLDTVIELKALDSTYSIPFPNPITYGAVIRHHLEISGPVSRQFFLSIAGFAPDEETKKSFTRIGGDKQEFASKVTRRKFNIADALLFASNNRPWSDVPFEFLIENVQHLTPRYYSISSSSLSEKQTINVTAVVEAEEEADGRPVTGVVTNLLKNIEIEQNKTGETPMVHYDLNGPRGKFSKFRLPVHVRRSNFKLPKNSTTPVILIGPGTGVAPLRGFVRERVQQVKNGVNVGKTVLFYGCRNSEQDFLYKQEWSEYASVLGENFEMFNAFSRQDPTKKVYVQDKILENSALVDELLSSGAIIYVCGDASRMARDVQAAIAKIVAKSRDIHEDKAAELVKSWKVQNRYQEDVW

SEQ ID NO: 30836 - protein, 384 aa, Rhodobacter capsulatus
MTQPAIYLDNNATTRVFPEVVAAMLPYFTEHFGNASSGHGFGAQAGLGLRKARLAVAALIGAASEQEILFTSGGTEANTTAIRSALAVQDGRREIIISAVEHPAILMLAADLEKTEGVRVHRIPVDHLGRLDLAAYRAALSDRVAVASIMWANNRYDLPVPQLAAEAHAAGALFHTDAVQAVGKLPMSLADTEIDMLSLSGHKFHGPKGVGALYLRKGVAFRPLLRGGKQERGRRAGTENVPALVGMGLAAEIVAARMAADLSRIATLRDWLESGILALGGCQRLGDPANRLANTCTLAFDRIDSEAVLTKLARAGIAISTGSACASGAMEPSHVTRAMAVPFTAAHGVVRFSLSADTTAAELSRVLAILPEILAELRPVPVTA

SEQ ID NO: 30837 - protein, 583 aa, Betula pendula
MSSLSVRFLSPPLFSSTPAWPRTGLAATQAVPPVVAEVDAGRLEPRVEEREGYWVLKEKFREGINPQEKLKLEREPMKLFMEGGIEDLAKMSLEEIDKDKISKSDIDVRLKWLGLFHRRKHHYGRFMMRLKLPNGVTTSAQTRYLASVIRKYGKDGCADVTTRQNWQIRGVVLSDVPEILKGLDEVGLTSLQSGMDNVRNPVGNPLAGIDIHEIVATRPYNNLLSQFITANSRGNLAFTNLPRKWNVCVVGSHDLFEHPHINDLAYMPAIKDGRFGFNLLVGGFFSPRRCAEAVPLDAWVSADDIILVCKAILEAYRDLGTRGNRQKTRMMWLIDELGIEGFRSEVVKRMPNQELERAAPEDLIEKQWERRELIGVHPQKQEGLSYVGLHIPVGRVQADDMDELARLADTYGCGELRLTVEQNIIIPNIENSKLEALLGEPLLKDRFSPEPPILMKGLVACTGNQFCGQAIIETKARALKVTEEVQRQVAVTRPVRMHWTGCPNSCGQVQVADIGFMGCMARDENGKPCEGAAVFLGGRIGSDSHLGNLYKKGVPCKNLVPLVVDILVKHFGAVPREREESED

SEQ ID NO: 30838 - protein, 333 aa, Methanosarcina thermophila
MVTFLEKISERAKKLNKTIALPETEDIRTLQAAAKILERGIADIVLVGNEADIKALAGDLDLSKAKIVDPKTYEKKDEYINAFYELRKHKGITLENAAEIMSDYVYFAVMMAKLGEVDGVVSGAAHSSSDTLRPAVQIVKTAKGAALASAFFIISVPDCEYGSDGTFLFADSGMVEMPSVEDVANIAVISAKTFELLVQDVPKVAMLSYSTKGSAKSKLTEATIASTKLAQELAPDIAIDGELQVDAAIVPKVAASKAPGSPVAGKANVFIFPDLNCGNIAYKIAQRLAKAEAYGPITQGLAKPINDLSRGCSDEDIVGAVAITCVQAAAQDK

SEQ ID NO: 30839 - protein, 292 aa, Capsicum chinense
MAFRLSHLSLVLSLVALALAGVAIYRNTYEAMMNNGGLLQTVSPDIGLLESAASILTLNNKNNIGAERKSAKLNQQLTQESCVFSAVNGVVDSAIDAETRMGASLIRLHFHDCFVDGCDGGILLDDIPGSFQGEQTSPPNDNSARGFEVIAQAKQSVVDTCPNISVSCADILAIAARDSVAKLGGQTYTVALGRSDARTANFTGALLQLPGPSDNLTEQIRKFSDKNFTIREMVALAGAHTVGFARCVTVCNSNNVNPAARLQCNCSATQTDSNLQQLDATPAVFDKFTTMR

SEQ ID NO: 30840 - protein, 575 aa, Ehrlichia ruminantium str. Welgevonden
MLEIRNLVFAVVLSVLIMMGWRLVYEKFFTVQHVVEDEDSSSMIPEIDNVLTYRSRNEIIDSTQNLRVKLSNKEINGSILLKGAQLDDLVFKNYHITPDSSSDGIILLSPENTEGVYFIEFGWIDPQHKIVVPNQLSTWTSDKSVLSPNNTVTLTWDNQQGVIFQIKVTLDDYYMFKIEQIIINNTDNVVNLIPYGRINRARHTTEKSYWISHEGAVGSFGYTLKEWTYKNIIKERNIKISQQNTDDNQWVGIADKYWFTALIPNILQKKSKLSFHVKHGKYNNEDRFQVDFSHDSYSAYPNKTASSTSYLFAGAKELKLLDKYKKDLNISLFDKAVDFGILYFITKPVFLLLEYFYDLIGNFGLAILLLTIVIKLIMFPLSYKSYVSMFKLKYLQPEILKIKELYKNDNTKMSKEVSLLFKKNDVSPMSGFIPILIQIPVFFALYKVLFVTIEMRHAPFYLWVKDLSNFDTANVLTLFGLLNFNPPICIGILPVILGITMIIQQKMNTSTHSSQDQDKIQASFIKFLPYVFIFIFSSFPTGLIIYWICSNSITIIQQLIIKAYIGRKFNLKHDL

SEQ ID NO: 30841 - protein, 526 aa, Ehrlichia ruminantium str. Welgevonden
MDIYMLITARLRYAIMFMVKLAHGLCTQQNKLQPVRMSYIASNQSLSEGYLEQVIVQLKKKGLINATKGPGGGYSLSIAPHLITLSLILESIGENIKITRCENNSPGCLSNNNRCVTHKLWDDIGNYIKDYLNNISLEDIVNNNFKSNIALHKDDKPYIYADYNSTSTILPEVKYQLNNLSYIKLYNPSSIHKLGQKTRSIIEEARNIAIKQLNAQYYDVVFTSSGTEANNLVINSTSDYKHLISSTEHLSIIKCATNAELIPVDSNGIICLNALSSLLHKFKDDKILVSVMTANNETGAIQPIKKIVELSHKFGALVHTDAIQACGKIHIDIEDLGVDLLTISSHKLGSIAGAGVLFFNSKKIKIKPMIIGGHQEKGLRAGTENVLAIYLLSISLSNLYKSITKMLLVEKLRNKLENEILSLVPDAQIFSRNVERLPNTSCISMPNVNSEIQVISFDIKNIAVGNGSACSTGVVEPSHVLSAMGVNQEIANNSIRISLSPDTTDEHIRTIVNCWYEIYTHNQVHK

SEQ ID NO: 30842 - protein, 220 aa, Ehrlichia ruminantium str. Welgevonden
MKIFLDTIDISFLEEFCISGLIDGVTTNPSLFSKSELKCSDLIFKLCSLIKGPVSIEVISTSYKDMISEALEISKIAENVVIKLPLTYDGLIACRILSNEHNLKVNVTLCFSPAQAILAAKSGAYFISPFVGRLDDIGQIGMELIKDIREIYSKYHSFNTQILVASIRHPMHVVQAAKIGADIVTISPSIFKQMFVHPLTNKGLEDFLRNWNESGKKMFS

SEQ ID NO: 30843 - protein, 863 aa, Ehrlichia ruminantium str. Welgevonden
MKLVMDLNKFTDISKNFIVQAQTSAVALGHQSLVPEHLLKVMLDDKDEIVEVLLTSCGCNVETLRNDVISALNKLPVVSGPGSGHIHLSKEMAQVLQEAVNLAKRHQDSYVTVERLLQALTIIKDSNVSRILIAHGVTPQKLESLIVNMRNGARADSVNSEQKFNALKKYAKDVTEVARAGKLDPVIGRDEEIRRTIQVLLRRTKNNPVLIGEPGVGKTAIIEGLAHKIVKGDVPIGLRDMRIMSLDLGMLVAGTKYRGEFEERLKAVVNEIVSSNGSIILFIDELHTLVGAGATDGAMDASNLLKPALARGEIHCIGATTLDEYRKHIEKDVALARRFQTIFISEPTCDDTISMLRGLKERYEGHHGIDIPDRSIIAAVALSQRYITDRYLPDKAIDLIDEAASRARMEIDSKPEVIDKLDRKIMQLKIEIGVLEKESDESSKQRLMKLKDELEKLNVQSAELSSKWQAEKMKMSKMKACKEKLDIARSDLERAQRSGDLAKAGELMYGVIPEIEKELKEHEKFTSSLFKKEITEHDIASIVSKWTGIPIENIMSSEREKLLRMEEEIGKTVIGQDSAVKAVSDAVRRSRAGVQDAQKPLGSFLFLGPTGVGKTELVKTLAEFLFCDKSALLRFDMSEFMEKHAVSRLIGAPPGYVGYDQGGALTEAVRRRPYQVILFDEIEKAHGDIFNILLQVLDEGRLTDNHGKLVDFRNTILVLTSNLGQEILMNNESGNINEESVKESVTNVLRSHFRPEFLNRLDEIIIFHRLTKEHIERIIDVQFSILQKIVAQRKLEITLSSDAKTWLINNGYDPLYGARPLKRLIQQQIQNNLAKLILANQVAEGNKLRVDLLDDNLVIHKIS

SEQ ID NO: 30844 - protein, 337 aa, Xanthomonas oryzae pv. oryzae KACC10331
MARPMPCCAAARHGAGVPLECSVLSILEQCMATQYVPVSLIGVPTDIGAGHRGARMGPEALRIAGLHEALVGRGVEVRDLGNLDGPRNPWQAPQAGYRHLDEVVAWNQALMGASYAELRAGRMPIMLGGDHCLGIGSITAVAKYCREQGRPLRVLWLDAHSDFNTSEVTPSGNVHGMPVACLCGLGPETLTHLGGSAPALLPEQVRQIGIRSVDPEEKRLIKQHRIDVYDMRYIDEAGMKRTMEAALQDMSADTHLHVSFDVDFLDPSIAPGVGTTVPGGPNYREAQLVMEMIADTGRMGSLDIVELNPVLDNRNATAELAVDLVESLFGKSTLMRD

SEQ ID NO: 30845 - protein, 402 aa, Xanthomonas oryzae pv. oryzae KACC10331
MSDVYLIDGIRTPIGRYGGALSSVRADDLGAVPIAALLVRHPQMEPAAIDDVYLGCANQAGEDNRNVARMSLLLAGVPSSVPGSTLNRLCGSGLDAVGTVARGIRAGELDLAIAGGVESMSRAPWVMGKADSAFARNQQLEDTTMGWRFINPRLQAAYGTELMGETAENLAQLHAIAREDQDAFALRSQQRVAAAQAAGFFDGEITSVAVAGRKGGDASTVEYDEAPRPNTTAEMLAKLKPVFRQPGTVTAGNASGLNDGAAALLLASAQAVQAHRLTPRARVLGFASAGVEPAYMGIGPVPATQRLLARLHLRIAQFDAIELNEAFAAQALACTRAFGLADDAAHVNANGGAIALGHPLGMSGARLALTLLRQLEASNGRLGLASMCIGVGQGVALAIERL

SEQ ID NO: 30846 - protein, 544 aa, Xanthomonas oryzae pv. oryzae KACC10331
MLPVHGVLTDRLFMSEHALRRDVGPFALMLTGLGSIIGSGWLFGAWRAAGLAGPDAVWAWVLGAAIITTIAVSYAELGAMFPESGGMVRYSHYSHGSLVGFIAGWANWIAIVSVIPVEAEASVQYMASWPWAWAQGLYAQAPGGAGELSVPGLLISAVLVLVYFLLNFWSVKLFARSNTLITVFKLAVPAATGVALIASGFHSENFSVGVHGDAQVLDLAAVLTAVATAGIVFSFNGFQSPVNLAGEARNPGRSIPFAVLGSIALATVVYVILQVAYIGAVPPDLLAKAGWHGIDFRSPFAELAIIVNLQWLAMLLYIDAFVSPSGTGITYTATTARMVYGMEKNGTMPAALGKLHPVWGVPRMAMFFNLAVSFVFLFFFRGWGTLAAVISVATIISYLTGPISAMALRRHAPELHRPLRIAALPLLAGVAFVMATELLYWARWPLTGEIILLIVVALPVYCYYQARQGWRDLRRNLKGAAWMICYLPMIALLSWAGSSKFGGHGYLSYGTDLAMVAAVGVVFYIWGVRSGWRTPSVEKPVAQA

SEQ ID NO: 30847 - protein, 573 aa, Xanthomonas oryzae pv. oryzae KACC10331
MNTSAHSTPRNGARWLTQALEAEGVETLFGYPGGTIMPFYDALVDSRLKHILVRHEQGAALAANGYARASGRVGVCVATSGPGASNLVTGIADAMLDSVPMVCLTGQVATPLLGTDAFQELDVFGMTMPIVKHSFLARRVEDLPEMVREAFRIAREGRPGPVLIDLPKDVQVANASHLPAHVPAAVLPPPAPADAKLAEALAAIASAERPVVYGGGGIALAGAVEAFRRFVEATGIPTALTLRGLGALPHAHPDYLGMLGMHGTRAANMAIQECDLLVVVGARFDDRATGKLSEFAPFARVIHLDADAYEISKLRTADIAVPGDVATSLKALSAARANCQGWRTRCFANREKFGARYDAPGIDIYAPALLKRLSEVAPADTIIACDVGQHQMWVAQHCRFNDPRNHLTSGALGTMGFGLPAAMGAQFACPDRTVVLVSGDGSFMMNVQELVTIARCKLPVKIVLLDNSSLGMVRQWQELFFAERYSEIDLSDNPDFAALAQVFGIPAKRIIARADVDAALADLLAQPGPGLLHVAIDARANVWPLVPPNNANSTMLDSNPAHAAKETSHALPA

SEQ ID NO: 30848 - protein, 308 aa, Xanthomonas oryzae pv. oryzae KACC10331
MSLDPALRSRIDTLLQSSRVVLFMKGQPGMPQCGFSAKAVGVLDGLGIDYAHVNVLADQEIREGIKVYGDWPTIPQLYVDGELIGGSDIILQMADSGELSSMLGLQAPDRTPPKITITPAAVEMLKGALADAPDASLTLSIDANFQPNFQLAPTNPNAIAAESNGLRVQFDLASARRADGITIDWVDDIRGRGLAIDNPNAPKPVQELSVRDADDRLKAGSLTLVDVRPADERALASVAAPFRTLDAHERAAIEQLPKDTALAFLCHRGGRSLQAAEHFRSLGFTNVYNVTGGIDAWSDDVDNGVAKY

SEQ ID NO: 30849 - protein, 500 aa, Xanthomonas oryzae pv. oryzae KACC10331
MGVWATLSAQCRSHDCSAERAFRSLQHLRCASASLSPDTCMTDTPRRDDAATLERFGYAQELKRQLTLKDLLIYGLVSMVPTAPFSIFGGVFDISAGMVPLTYLVGFVAMLFTALSYQQMSQAFPVAGSVYAYVGRGLNSGMGFLAGWAILLDYLLVPTLLYVVGANAMYNVVPAVPQPAWIGFFVVLNTVVNLRGIETTARANRFFLLGQLVVLAVFLVLATLAIQRGVNGAHWSWRPIYDPQAFSPHVIFSALSVAVVSFLGFDAISTLSEEARGGNRVVGRATLLALLIVAGVFVLQTWLAALLQPTLQRYPSAQASNDAFFEIGRLIAGPWLQIVIALTVAISAAIANSLVAQAATSRLLFAMARDRQLPAFLRYIHPRTAVPQRAILLVAGLSIVLGEVFVGQIALLSSLCNVGALTAFVLLHIAVLWHFRAQGRRVLHGLAPLIGIVILAYVLLNADTHAQLGGTAWMVVGLTVLAFLKLSGRSTEFRASDAVE

SEQ ID NO: 30850 - protein, 254 aa, Xanthomonas oryzae pv. oryzae KACC10331
MLTINNLHASIAGKDILKGLSLDIQAGQVHAIMGPNGAGKSTLGNVLAGRDGYEVSAGTVQFEGKNLLDLTPEERAAAGLFLAFQYPVEIPGVNNTYFLRSALNAQRKARGEDKLDSMQFLKLVRQKLAVLHLKDELLHRGVNEGFSGGEKKRNEIFQLAVLEPKLAILDETDSGLDIDALKSVADGVNALRSPERSFLVITHYQRLLDYIKPDVVHVLAEGCIVQSGGPELALELEKHGYHFLKDRVVPEVAA

SEQ ID NO: 30851 - protein, 155 aa, Xanthomonas oryzae pv. oryzae KACC10331
MSRKVAARKSRIHGNGMFALAPLRKGERIIQYKGRLRTHAEVDADDTGDVESGHTFLFTLSDDYVLDANYEGNVARWINHSCDPNCEAVIEEAEGDDRRKDKIFIEAKRDIKPGEELTYNYGITLAERHTPRLKKIWECRCGSKNCTGTMLQPKR

SEQ ID NO: 30852 - protein, 869 aa, Xanthomonas oryzae pv. oryzae KACC10331
MSAPHSTDRWIVLKFGGTSVSRRHRWDTIGQLASKRASETGGRVLVVVSALSGVTNALTAIADGAADSAQRVAALDQRHREFLAELELDADAVLGERLAALHALLSDARAATRTLEWQAEVFGQGELLSSTIGAAYLHASGLDMGWLDARQWLSALPPQPNQSEWSKRLSVSCQWQSDADWRARFAAQPTRLLITQGFIARHADGGTAILGRGGSDTSAAYFGALLGASRVEIWTDVPGMFSANPKEVPDARLLTRLDYYEAQEIATTGAKVLHPRSIKPCRDSGVPMAILDTERPDLPGTSIDGNAEPVLGVKAISRRNGIVLVSMEGIGMWQQVGFLADVFTLFKKHGLSVDLIGSAETNVTVSLDPSENLVNTDVLAALSADLSQICKVKIIVPCAAITLVGRGMRSLLHKLSDVWATFGKERVHMISQSSNDLNLTFVIDESDADGLLPILHAELIDSGAMPVSEGDVFGPRWREITGSVRLRPTPWWHAERAHLLSLSKAGTPRYAYHLPTVRARAHALAQIAAVDQRYYAIKANAHPAILMALEQAGFGLECVSHGEVRRVFQALPELSPRRVLFTPSFAPKAEYAAAFALGVTVTVDNVEALRNWPEVFRGRNIWLRIDLGHGDGHHEKVNTGGKASKFGLSSTRVDEFVDVARTLEVTITGVHAHLGSGVETGEHWRMMYDELAGFARRIGTVETIDIGGGLPIPYSAEDEPFDLDVWAKGLAEVKAVHPGYRLAIEPGRYLVAEAGVLLASVTQVIEKDGVQRVGLDAGMNTLIRPALYDAWHDIENLSQLDAPADSTFDVVGPICESSDVFGKRRRLPAATMPGDVVLVADTGAYGYSMASTYNQRELPREEVIDAPAG

SEQ ID NO: 30853 - protein, 71 aa, Xanthomonas oryzae pv. oryzae KACC10331
MSNIERENGLVKWFNDAKGFGFISRENGEDVFVHFRAIQIQGFKSLKEGQKVSFTVVQGQKGLQADAVQVV

SEQ ID NO: 30854 - protein, 455 aa, Xanthomonas oryzae pv. oryzae KACC10331
MSRLVVVSNRVAVPGENRAGGLAVGLLAALKERGGMWFGWSGKTVRGDSGGMHEQTEGDITFVTMDLNKRDIDSYYNGFANRTLWPLLHFRLDLVDYDRATREGYMRVNRLFAEKLAPLLKDSDTLWIHDYHMIPLCAMLRELGVGCKMGFFLHVPMPSADLVQAMPDHARLFNTFYAYDLVGFQTQRDAERFKAYVRLFGGGRILQGDLVEGPGGRRFTASSFPIGINTDLIANQAKASVGKQAVRDLRESLRGRQLAIGVDRLDYSKGLPERFQGFERYLERYPDQSGSLTYLQIAPVSRGDVTEYRQLRSQLEQIAGHINGGHAEPDWTPLRYVNQNFSHATLTGFYRAASVCLVTPLRDGMNLVAKEFVAAQDPENPGVLVLSLFAGAADEMKEALLVNPHDLDGVADAIATAASMPLVSRIERWHAMMDHLRKNNINHWRQRYLEALSEV

SEQ ID NO: 30855 - protein, 106 aa, Xanthomonas oryzae pv. oryzae KACC10331
MYAVLVTGGKQYRVAQGETLRVEKLEVEAGNEIKFDTVLMLGDSDGIKLGDALKGASVTAKVVAHGRADKVRIIKFRRRKHHMKRQGHRQHYTEIEITGIAGGDKK

SEQ ID NO: 30856 - protein, 350 aa, Xanthomonas oryzae pv. oryzae KACC10331
MKLVDEAEILVTAGHGGNGCVGFRREKFIPLGGPDGGDGGSGGSVWIVADENVNTLVDFRHERTFKAQRGENGMGRQAYGKGGEDRIIVVPVGTVVINVQTDEVIGDLTRHGDRLLVAKGGKGGLGNMHFKSSVNRAPRQSTTGEEGEERLLKLELRLLADVGLLGFPNAGKSTLIRAVSSATPKVADYPFTTLYPNLGVVSVEAYRSFVIADVPGLIEGAADGAGLGTQFLRHLQRTRLLLHLVDMAPMDGGVDGVSPADQVRTLERELERHDPQLLKKPRWLVLNKADLMFEDEARAAAETIVAELGWTAPWYLVSALGRDGTFPIMKDVMAFFDRQREDELEARNAG

SEQ ID NO: 30857 - protein, 312 aa, Xanthomonas oryzae pv. oryzae KACC10331
MTTKQSVEDRPDLETDTMSNIAFIGLGNMGGPMAANLIKAGHQLRAFDLAPAALDAATAAGAHAASSAQDTLADAEIVISMLPASRHVEGLYLGDSGILAQIPHGALVIDCSTIAPLSARKVADAATARGLTMLDAPVSGGTAGAAAGTLTFIVGGAAEVLERARPVLQAMGKNIFHVGDNGAGQVAKLCNNMALGVIMAATGEALALGVAQGLDPAVLSQMMAVSTGRSWATEVCNPWPGVLPNAPASRGYSGGFGNDLMLKDLGLVAESAVQAGVSIPLGELARNLYAMNSQAGNGALDFSSVVKLVAKV

SEQ ID NO: 30858 - protein, 299 aa, Xanthomonas oryzae pv. oryzae KACC10331
MSVTSSPHRSGSVAVIGRPNVGKSTLTNALVGAKVSIVSNRPQTTRHRLLGIATFPEGQLVLVDTPGLHREQKRAMNRVMNRAARGSLEGVDAAVLVIEAGRWDEEDTLAFRVLSDAEVPVVLVVNKVDRLKDKTALLPFLAQVSEGRTFAAVHPVSALKRKGLEALVGDLLKLVPEAEAMFGEDEITDRSQRFLAGELVREQLMRQLGEELPYATTVEIERFAEDGALLRIGAVIWVEREGQKAIVIGKGGTRLKEIGGKARLQMERLFGAKVFLETWVRVREGWSDDEAALKAFGYE

SEQ ID NO: 30859 - protein, 75 aa, Xanthomonas oryzae pv. oryzae KACC10331
MQRSRITMPNGTVKWFNDAKGFGFISPEDGSADVFAHFSAINSKGFRSLQEGQRVSYDVTQGPKGAQASNITPVE

SEQ ID NO: 30860 - protein, 391 aa, Xanthomonas oryzae pv. oryzae KACC10331
MSDIVIVAAKRTAIGSFLGQFNGVPAPTLAAAAIQGALAQSGIAPADVSEVIVGCVLPANLGQAPARQAAIAAGIPTSTGATTVNKVCGSGMKAIMFGHDLIKAGSASIVVAGGMESMSNAPHLLPNSRTGNRYGNFQAVDHMAWDGLTNPYDGQAMGVFGEATAEKFGFSRADQDAFAIASVERAQAAQRSGAFADEIVPVTVATRKGKVVVDSDEQPGKSDVAKILTLKPAFKKDGSVTAASSSSISDGAAITVLMSADDARRRGVTPLARIVGHVTHSQEPEWFTTAPVAAIQSLVGKIGWQLDEVDLFEINEAFAVVAMTPIKQLGIAHDKVNVHGGACALGHPIGASGARLVVTLVNALRSRGGTRGIATLCIGGGEATAIAIELI

SEQ ID NO: 30861 - protein, 564 aa, Xanthomonas oryzae pv. oryzae KACC10331
MCSIFGIFGLQPGDDLQALRRQALECSQRQRHRGPDWSGVYVDAGAILVHERLAIVDPAGGSQPLLSEDGQLALAVNGEIYNHRELKAELLQPYAFQTGSDCEVINALYREDVPALYLNRLNGIFAFALWDKTEGRVIIARDPIGVVPLYWGHDREGRLRVASELKSLVDDCADAAQFPPGHWYDSATGALSRYYERAWREYAEVEGVQVQLQELREAFERAVHRQLMTDVPYGVLLSGGLDSSLVAAVAARYARHRVEENDTTEAWWPRLHSFAIGLKGSPDLAAAEVAAAALGTVHHGFEYTFEEGLDALPDVIRHIETYDVTTIRASTPMFLLARRIKAMGVKMVLSGEGSDEIFGGYLYFHKAPNAREFHEELVRKLDALNNYDCLRANKSMMAWGVEPRVPFLDREFLDVAMRMDASFKMIDKTSSGAARMEKGVLREAFAGYLPESILWRQKEQFSDGVGYGWIDGLKAHAAANVSERELAAADRRYPVNPPQTKEAYFYRTLFEQFFPGQSAAETVPGGKSIACSSPTAIAWDASFAAMADPSGRAIAGVHAQAMDS

SEQ ID NO: 30862 - protein, 641 aa, Xanthomonas oryzae pv. oryzae KACC10331
MGKIIGIDLGTTNSCVSIMDGGKARVIENSEGDRTTPSIVAYTKDGEVLVGASAKRQAVTNPKNTFYAVKRLIGRKFTDAEVQKDISHVPYGILAHDNGDAWVQTSDAKRMAPQEISARVLEKMKKTAEDYLGEKVTEAVITVPAYFNDSQRQATKDAGRIAGLDVKRIINEPTAAALAYGLDKKGGDRKIAVYDLGGGTFDVSIIEIAEVDGEKQFEVLATNGDTFLGGEDFDNRVIEYLVDEFNKDQGIDLRKDPLALQRLKDAAERAKIELSSSQQTEVNLPYVTADASGPKHLNIKLTRAKLEALVEDLVKKSIEPCRTALNDAGLRASDINEVILVGGQTRMPKVQQAVADFFGKEPRKDVNPDEAVAVGAAIQGGVLAGDVKDVLLLDVTPLSLGIETMGGVFTKIIEKNTTIPTKASQTFSTAEDNQSAVTVHVLQGEREQARFNKSLAKFDLSGIEPAPRGMPQVEVSFDIDANGILHVSAKDKKTNKEQKVEIKAGSGLSDEEIQRMVADAEANREEDKKFHELVQARNQADGLIHATRTAITEHGSKVGGDVIGKVEAALSDLETAVKGDDKAQIEARTKTLEEAGQSLYAAAAAAEQGGSADAASGNAQASKAADDVVDAEFTEVKDDKK

SEQ ID NO: 30863 - protein, 605 aa, Xanthomonas oryzae pv. oryzae KACC10331
MRRHWQSCPSFNPGSRMIQPAAARPNPLRKLGSLRTLWPFVQRQRGLFVAWLVALTISAAATLSLPAAVKRMIDQGFSGDAQINQAFALLFAVSVVLALASAARFYFVALLGEKVVADLRGRLYAHLIGLDAGFHDRSRSGELVSRLSADSELLRGLIGSTMSVALRSVATVIGSVVMLFVTSPRLAGFTLIGIPLAVLPIVLGARRLKKISRASQDRVADANTLAAETLGAVRTVQAHARERYESQRFSTALLTAIDTAKVRIRTQATVTAVAIMLIFGAIVAVLWSGAHDVVSGRMTPGTLGQFVLYAMIGGGSVGALAEVWNELQRAAGGMGRVGELLDEQPAIVAPAAPQPLPQPLRGAIHFDQVVFHYPQRPDAPALDGFDLHVSPGETVALVGPSGAGKSTVLAMLLRFHDPVSGKVRIDNIDLRDIDPVLLRERIALVPQQPTLFAASAADNIRYGRLQASDAEVEAAAAAAEADVFIRALPQGYRSELGERGTRLSGGQQQRVAIARALLKDVPILLLDEATSALDAQSERAVQQALDRLMEGRTTLVIAHRLATVLKADRIVVMDAGRIVAQGTHAQLIAEGGLYAELARLQFIDQ

SEQ ID NO: 30864 - protein, 437 aa, Xanthomonas oryzae pv. oryzae KACC10331
MIGGGIFVITGQAAADHAGPAIMLSFVLAAVCCAFCAMAYAEFAAMVPVSGSAYTYTYATFGELAAWFIGWMLVLEYGVSASAVAVSWTGYFLSLLDHFGIHLPAAFVSAPLDGKLQPTGAIANLPAAGIVLLLTWLCYVGIRKSSAMNMAMVILKTGLILLVIAVGWKYVDTANWHPFIPANEGPGKYGMEGVLRGAAMVFFAYIGFEAVSVAAQESHRPQRDLPIGMILSLVICTVLYISMAAVMTGLLPYTLLGTDEPVVTAIAAHPQLAWLRVIVEVGALIGLSSVVLVMIIGQPRIFMIIARDGLLPSIFTRIHPKYRTPHINTVITGVGIALLAAVFPLDVLGELTSMGTLIAFAAVCAGVLILRRTHPELPRPFRMPAAWLICTAGMLSCLALLSAMTLHNWMLMGLWTLVGLVIYSGYGYRHSRLRDGR

SEQ ID NO: 30865 - protein, 512 aa, Xanthomonas oryzae pv. oryzae KACC10331
MRRTTFVRASARLCFATYGMYRMLKSVLRVKPIEPAGLVDAGEPVEGSPQGEATLQRTLSAKHLIMLGIGAVIGAGIFVMTGQAAANHAGPAVMLSFVFAGIACTFAGLCYAEFAAMMPVSGSAYSYSYATLGEGIAWFIGWCLVLEYLFAGSSVAVAWSAYLISFITGTLGLPFPTELTNAPLAWINGEFVASGSILNLPAVMIVTAVSGLCYVGITQSAFINAIVVAIKIAVICLFVGFGAAYVDPANWHPFIPENTAPGVYGWSGVFRAASIVFFAYIGFDAVSTSAGETKDPQRNMPIGILGSLAVCTIIYIIICAVLTGLMPYTQLGTAKPVATALEAHPQLTWLKTAVEIGAIAGLSSVVLVMLMAQPRIFYTMAKDGLMPKLFGKVHPRFHTPYVGTVIVGVIAASLAGLIPLSVLGELVSMGTLLAFATVCAGVMVLRFTKPALERPFRVPLAMIICPLGTLACLALFFQAFQEHWKVFVGWTVIGLLIYFGYGIHHSYLAKRA

SEQ ID NO: 30866 - protein, 419 aa, Xanthomonas oryzae pv. oryzae KACC10331
MAGAAMGQGTLFCSVRAQPPGGFAYTRVPPFLVRTGTMPLTTKLPKVGTTIFTVMSQLAAEHGAVNLGQGFPDFAVPQRLVDELTKAMAAGHNQYPPMPGVATLRQAIAGKAQRCYGAQVDADTEITVTSGATEAIFNAIHAVVRASEDVIVLDPAYDCYEPAIDLAGARAVHVALDPQTFAVDWDALRAAITPKTRLLMINSPHNPSGAVLSADDMQTLTELLRGTEIFLLSDEVYEHIAFDGRRHESVLRWPELRERAFVISSFGKTYHCTGWKIGYAIAPPALTAEFRKVHQYNTFTSFGPAQHAFAAMIRDEPEHDEQLGAFYQAKRDRFREQLLTTRLKPLPVPGGYFQLVDYSAISDLPDTAFVKWLTVEKGVAAIPLSPFYERAPAGQRLARLCFAKNDATLDAAIERLQKL

SEQ ID NO: 30867 - protein, 235 aa, Xanthomonas oryzae pv. oryzae KACC10331
MRSLDEIARWMSMSDAERQNYLHTVLPARALTAQLPEYAQLRRALYPLDTAPAGPGWNHAELIDLTDGDASAEAAVLCGLVPREQGTTVLLTRRTDSLRHHAGQVSFPGGRMEPSDADAAAAALRESCEEIALGAQQVHALGYLDPFLTVSGFRVTPVVAVIDPAFVAVPQPDEVADVFEVPLAYLMDPDNLRSVELEFRGCPRRVLEYNWPGHRIWGATAAILLNLRRRLEQVA

SEQ ID NO: 30868 - protein, 401 aa, Xanthomonas oryzae pv. oryzae KACC10331
MSKQIQDAYIVAATRTPVGKAPKGVFRNTRPDDMLAHVLRAVVAQAPGIDTSRIDDAIIGCAMPEGEQGMNVARIGVLLAGLPNSVAGQTINRFCSSGIQAIAMAADQIRLGNADLMLAGGTESMSMVPMMGNKVAMSPSVFADDHVAIAYGMGITAEKVAEEWKVSREDQDAFALASHQKAIAAIAAGEFRDEITPYEIHSHQPDLAGNVIALRKHLVDTDEGPRPDSSLEGLAKLRPVFRNGQFGGSVTAGNSSQMSDGAGAVLLASEQAIKDYGLTPLARFVSFSVAGVRPEVMGIGPIAAIPKALKQAGMTKGQIDWIELNEAFAAQALAVIRDSELDPSKVNPLGGAIALGHPLGATGAIRAATLVHGLRRLQQKYGMVTMCIGTGMGAAGIIEAL

SEQ ID NO: 30869 - protein, 413 aa, Xanthomonas oryzae pv. oryzae KACC10331
MSQQTASTNPESPIPTPGTKDIVLAFSGGLDTSFCIPYLQERGYAVHTVFADTGGVDAEEREFIEKRAAELGAASHVTVDGGPAIWEGFVKPFVWAGEGYQGQYPLLVSDRYLIVDAALKRAEELGTRIIAHGCTGMGNDQVRFDLAVKALGDYQIVAPIREIQKEHTQTRAYEQKYLEARGFGVRAKQQAYTINENLLGLTMSGGEIDRWEAPGEGARGWCAPRNAWPTEALTVTLKFVEGEAVELDGKPLPGAKILAKLNTLFAQYGVGRGVYTGDTVIGLKGRIVFEAPGLVSLLAAHRALEDAVLTKQQNRFKPDVARKWVELVYEGFYHDPLKSDIEAFLKSSQSKVNGEVTLETRGGRVDAVAVRSPHLLNTKGATYAQSADWGVQEAEGFIKLFGMSSTLYAQVNR

SEQ ID NO: 30870 - protein, 121 aa, Xanthomonas oryzae pv. oryzae KACC10331
MFARVTVNRGLVQPDRYRSCFIVPLYQRLQLSLSSGFSDAAIYPSIVSGVSKMSERMNGIVKWFNDAKGFGFITPESGPDLFVHFRAIQGTGFKSLQEGQKVTFVAVQGQKGMQADQVQAV

SEQ ID NO: 30871 - protein, 648 aa, Xanthomonas oryzae pv. oryzae KACC10331
MRMNDLTKNLLLWVVVAVVLMVVFQSFSPRMAGGVGPDSITYTQFLKEVDSGRVKSVDYTDETNLAVNAIRFKRTDGSEATVYGPRDDKLVDVLYSKNIEMTRQKPSTGPGFWSLVLNFLPVILIIGFWLFIMRQMQGGGGGAKGAMSFGKSRAKLQGEDQIKITFADVAGCDEAKEEVGELVDFLRDPTKFTKLGGKIPRGVLMVGPPGTGKTLLAKAIAGEAKVPFFSISGSDFVEMFVGVGASRVRDMFEQAKKHAPCIIFIDEIDAVGRHRGAGLGGGHDEREQTLNQLLVEMDGFEGGEGVIVIAATNRPDVLDPALLRPGRFDRQVVVGLPDVKGREQILRVHMRKLPLADDVVPMVIARGTPGFSGADLANLCNEAALFAARGSEKEVRMDHFDRARDKILMGAERRSMAMSEDEKTLTAYHEAGHAIVGRLVPEHDPVYKVTIIPRGRALGVTMYLPEGDRYSMNRVAIESQLCSLYGGRVAEELIFGGDKVTTGASNDIERATKMARNMVTKWGLSDELGPVAYGEEEDEVFLGRSVTQHKNVSDETTRKIDEVVRSILDKAYSKTKTILTDNLDKLHAMSQLLLQYETIDVPQIDAIMEGREPPPPAGWGKSDKDGGNNNDKGSPRPLPPIAGPAEQI

SEQ ID NO: 30872 - protein, 528 aa, Xanthomonas oryzae pv. oryzae KACC10331
MTTHAATTQGKFHKRLSLTDLTFIGLGSIFGSGWLFSASHVSSIAGPAGIVSWILGGIAVLLLGLVYCELGAALPRAGGVVRYPEYSHGALLGALTGFITLIAFSSLIAIEVEAARQYAAAWFPSLSQANSTHPSVWGWLVQLALLVLFFLLNYFSVKTFALANNIVSIFKFLVPILVIVLLMRHFNADNLTVHGVAPSGMAGVEAAISAGGIIFAYLGLTPIVSVASEVRDPQRNIPIALILSVALSTVIYVLLQLAFLGSIPAGQIAQGWTGIDKAFSLPYHDIALALGMAWLATLVICDAVVSPSGTGNIYMNATPRVVYGWARSGGFLPGLTRVHPVSGIPRPALWLSLGLSIFWTLPFPSWETLIGVVSAALVLSYAVAPVAVAALRRSAPALPRPFFVRGLTVLGPLSFMVAALIVYWSTWPTLSWLLGLQVLAFALYVLYRLPSREGRTRLLRQVCASLWLIVFFVLVMLVSWAGTFGGHGWIAYPFDTLSVAAIAFFIYHWGARSGLRSDELALEEDDGE

SEQ ID NO: 30873 - protein, 106 aa, Xanthomonas oryzae pv. oryzae KACC10331
MLVMERIQAEVEQHPIVLFMKGTPQFPMCEFSSRAVQALVAAGADQLRTINVLEEPEVRANLPRYSNWPTFPQLFIHGELIGGCDITLELFEVGELKRIVSEAYQP

SEQ ID NO: 30874 - protein, 375 aa, Xanthomonas oryzae pv. oryzae KACC10331
MRSAAMWVRSRRAFPVRSMSDTARAKVWVSQPLFDDVVAQLGEHFELTTTEHVTVWSPVELAARLASLDGALITLNERVGAAEIAAAPQLRAIANVGVGYNNLDIDALSAAGILASNTPDVLTETTADLGFALLMATARRITESERWLRDGQWGQWSFKAMLGADIHGSTLGILGMGRIGQGIARRGAHGFGMRVLYHNRSPLPAATEQALGAQYVEFDTLLAQSDHLVLVVPYTRDSHHIIDAAALGKMRATATLVNIARGGIVDELALADALANGRLAGAGLDVYQGEPRVRPELLALRNVVLTPHIGSASLATRRAMVQLAVDNLIAALGEGPHAGHPPSALNTDAVAAARHGGTAADAKKTGVTGTIATKR

SEQ ID NO: 30875 - protein, 346 aa, Xanthomonas oryzae pv. oryzae KACC10331
MKEKPGITSTFSLHHRPHALRRRPRDLMQDQRNLLVFSGNANKPLAQSICKELGVRMGKALVTRFSDGEVQVEIEESVRRQEVFVIQPTCAPSAENLMELLVLIDALKRASAQSVTAVIPYFGYSRQDRRMRSSRVPITAKVAAKMICAMEADRVLTVDLHADQIQGFFDVPVDNVYASPLLLADIWRAYGTDNLIVVSPDVGGVVRARAVAKRLDDADLAIIDKRRPRANVATVMNIIGDVQGKTCVLVDDLVDTAGTLCAAAAALKQRGALKVVAYITHPVLSGPAVDNINNSQLDELVVTDTIPLNEAARICAKIRQLSVAELLAETIRRIAFGESVSSLYVD

SEQ ID NO: 30876 - protein, 399 aa, Xanthomonas oryzae pv. oryzae KACC10331
MASTFCAGRRGRHQRRACRALLASPRLGARPEQRMAVQVLVLKERADGERRVAATPETVKKLVARGASVWIEPDAGRASSMDDAVYLQAGAQPAGADAVARADVLLCVQAPLTPTLLQCKPHTVVIGMLSPDADPARAQAFAARALIVFPLERLPRTTRAQSMDVLSSQAGMAGYKAVLLAAQLAPRFFPMLTTAAGTMRPCKVLVIGAGVAGLQAIATAKRLGAQVEGFDVRPETREQIASLGARFLDLGVSAAGEGGYARQLTDDERAEQQRRLAEHLKGVDVVVCTAAVPVRPAPKIVTAEMARGMRAGSVIVDLAAETGGNCAATRPGETYDLDGVMIAGPLNLASQGAVHASEMFARNVYAFAALLIKDGALPFDWDDELLAKTRWSAPAVATS
